United States Patent Application Publication US 2006/0134663 A1 - sequence listing, part 116

SEQ ID NO: 358773 - DNA, 396 bp, Homo Sapiens
gagcaaagaattgtttttttaagaggatattgaggagactggacagaaacaaatgaacaacagcgcctgagcatctcttgaactgtgaggaaatcactaataagatactcagctgaagattacatatacttatctggctcacatacctgagtcaatgaatagaaaagaagggattgttgaagatttagagtaaatatttacccttccaaaatttgaaagcagttttggtttgggagaagcagtaattaggctgcagtgttcagtatcttgaaagcacgaagtctcactgatttgcaaaataaaagcttggattaaaaactcagctggcagaaaattatctttcaaaagtgaaggagaaacagagactatctcagacaaacataaattgaacctgca

SEQ ID NO: 358774 - DNA, 1711 bp, Homo Sapiens
  misc_feature (1588)..(1621): n is a, c, g, or t
  misc_feature (1640)..(1652): n is a, c, g, or t
gtaatatcaacaaaggctgtggctatggctgtcagctccatcatgtggtctactgcttcatgattgcatatggcacccagcgaacactcatcttggaatctcagaattggcgctatgctactggtggatgggagactgtatttaggcctgtaagtgagacatgcacagacagatctggcatctccactggacactggtcaggtgaagtgaaggacaaaaatgttcaagtggtcgagcttcccattgtagacagtcttcatccccgtcctccatatttacccttggctgtaccagaagacctcgcagatcgacttgtacgagtgcatggtgaccctgcagtgtggtgggtgtctcagtttgtcaaatacttgatccgcccacagccttggctagaaaaagaaatagaagaagccaccaagaagcttggcttcaaacatccagttattggagtccatgtcagacgcacagacaaagtgggaacagaagctgccttccatcccattgaagagtacatggtgcatgttgaagaacattttcagcttcttgcacgcagaatgcaagtggacaaaaaaagagtgtatttggccacagatgacccttctttattaaaggaggcaaaaacaaagtaccccaattatgaatttattagtgataactctatttcctggtcagctggactgcacaatcgatacacagaaaattcacttcgtggagtgatcctggatatacattttctctctcaggcagacttcctagtgtgtactttttcatcccaggtctgtcgagttgcttatgaaattatgcaaacactacatcctgatgcctctgcaaacttccattctttagatgacatctactattttgggggccagaatgcccacaatcaaattgccatttatgctcaccaaccccgaactgcagatgaaattcccatggaacctggagatatcattggtgtggctggaaatcattgggatggctattctaaaggtgtcaacaggaaattgggaaggacgggcctatatccctcctacaaagttcgagagaagatagaaacggtcaagtaccccacatatcctgaggctgagaaataaagctcagatggaagagataaacgaccaaactcagttcgaccaaactcagttcaaaccatttgagccaaactgtagatgaagagggctctgatctaacaaaataaggttatatgagtagatactctcagcaccaagagcagctgggaactgacataggcttcaattggtggaattcctctttaacaagggctgcaatgccctcatacccatgcacagtacaataatgtactcacatataacatgcaaacaggttgttttctactttgcccctttcagtatgtccccataagacaaacactgccatattgtgtaatttaagtgacacagacattttgtgtgagacttaaaacatggtgcctatatctgagagacctgtgtgaactattgagaagatcggaacagctccttactctgaagaaagtgattcctatttgatggtgggattgtgaacactgaattcactccagtcaacagattcagatggagaatgaacnnnnnnnnnnnnnnnnnnnnnnnnnnnnnnnnnnccttaaaaggggggccggnnnnnnnnnnnnnaaaaaaattgccaccggtcccttggaccccctccttttaaagagggaagaaacacttct

SEQ ID NO: 358775 - DNA, 823 bp, Homo Sapiens
acaaaccaagaacttctacagtagtccaagcacagttggagtgaccaagatgactctgggaacacctcccactttgccaaacttcaatgctttgagtgttcctcctgctggtgcaaagcagacccaacaaagacccacagatatgtctgcccttaataatctctttggccctcagaaacccaaagttagcatgaaccagttatcacaacagaaaccaaatcagtggcttaactcagtttgtacctcctcaaggttctccaactatgggcagttcagtaatggggacacagatgaacgtgataggacaatctgcttttggtatgcagggtaatcctttctttaacccacagaactttgcacagccaccaactactatgaccaatagcagttcagctagcaatgatttaaaagatctttttgggtgaggtgtcttacttctattttgaaggattatttcagtttcaatcatgggtgagctgatttacatctttatatagttggcttggcaggaagtacttctatgggaaagtgaacagttctgtgacaggaaacatctctgtccatgccagcatagtagttgtatggacttctaaccagttgagtttcttaaagcattgaagattatttcctcttaccaactcctcttcaggtttttaaagacccagcccttcccaatctcaaagcagaacaaaggaaactgagttatctcgaataacataactttctcaatcaaatgtctcattgggctcgtggatctagggttctttcaaacattgaggtgagggccatcgcagctcctctattaggtcctatctgggtaccc

SEQ ID NO: 358776 - DNA, 853 bp, Homo Sapiens
  misc_feature (811)..(811): n is a, c, g, or t
  misc_feature (824)..(824): n is a, c, g, or t
  misc_feature (832)..(832): n is a, c, g, or t
atgatagcagttctaagtcaacactgttaccgatataatcgatctcgtgtctgactctcacttagacagcaggtctccggctaagataaggaaatagatattcgttctcatcttctctaggttcccttgtaatttcatcatctccaagtactgctttagaaactggggagtatctggctggagatgctggtgtctggcccaagaaggaagatgggctaacatggttatcaacaggctgagaagaagagttggtgatatcaggtggtgcatagccatcattcatatacatacttgtgggttttgccactttcaaataagcaaaatcagatgtgttctttaaggcagttactgcttcttcatgagtaacttcttctaaacatacgttattcactgctaagagtttatctccaatctgaagtttgccatccttatgtgctgcacctccttcaattattttggttacatagatgctattatccccaggaatatgctgatttccaacacctccagcaatgctaaacccaagacctttaggacctttaatgagctttatttccattattttttctgacactggtttccttctttttacatacaagcgtacaatagaccctgcttctttcaacgcttcaactgctttgctatgtgttacatcacgaacatctacttcatttactcgtaatatacagtcattgacccggcaatcttccatcttgggcggctgctccccctgtgataattttgggtaatggaaaatacttggagtcatctcccaatgtgtggggttggtccgtacctgcctggcaatggnggaaaccaagccnggaatttncccctttcaagtgtggatttc

SEQ ID NO: 358777 - DNA, 445 bp, Homo Sapiens
gtgagtaagaaacttcagttcttctatcagctgctttcttaaggctaacaatacactttaaatgataatacgctctactaagacatctaaatattagaaattactaccttctagactgaatttataagtagtgcagaagttctcacattttaaaaaacataataaaatactgaagcggatttagcatatgtttaccaataaaaaattataaaatttctcccaattgtacaacttaagaataaaccaacataagagtgataatactgataagataaaacaatgccagatgcatatctaattaatcagcttcctttaacctcttgtattgttgctctctgagtcattaaggttttctaatctgctgcatgttacaaacttgttcctaactttgaaaactgcatgaaaaattactaggtctgaggttcaggcacacccggatttattt

SEQ ID NO: 358778 - DNA, 534 bp, Homo Sapiens
  misc_feature (23)..(23): n is a, c, g, or t
  misc_feature (37)..(37): n is a, c, g, or t
  misc_feature (82)..(82): n is a, c, g, or t
cacaatccacaaacactgatccngagaatttggctgnccctatcagattaacattgttagtccccgtcaatcagaactcaanggcaatccttttgaactcccattttaaacccacgtgagtaagaaacttcagttcttcctatcagctgctttcttaaggctaacaatacacctttaaatggataatacggctctacctaagacatcctaaatattagaaattacctacctcctagactgaatttataaaaggtagttagcacgggttggaactacattatacttctctgtgaagggaattttgtagtgcagaagttctcacattttaaaaaacataataaaatactgaagcggatttagcatatgtttaccaataaaaaattataaaatttctcccaattgtacagcttaagaataaaccaacataagagtgataatactgataagataaaacaatgccagatgcatatctaattaatcagcttcctttaacctcttgtattgttgctctctgagtcattaaggttttctaat

SEQ ID NO: 358779 - DNA, 427 bp, Homo Sapiens
  misc_feature (221)..(248): n is a, c, g, or t
tattacagagaagaaaactacagcacagaaatttcgactgcttagtgtaacgttcatggctcccaggcacaaaagcaggtcttagatccccatcatactgtgtcaattcagacatatctgagagcatcaatttctaaaaacttagaaattaaaaaagaaagagcatttccccaaaattgaagacaaattgaagatagatgccacagaagtcttagaagggnnnnnnnnnnnnnnnnnnnnnnnnnnnngaagtgggctatctaagggatctgtcagtaaataccaaccacattaattcggcaagcctttctctctttaaatttcagtaaaacctctatcgctgaaatggtgctgaaaagaaaaatgaatcgctagaggcaggaagttatttccagttcatgctccacttcccacagctagacccttc

SEQ ID NO: 358780 - DNA, 793 bp, Homo Sapiens
caggatatccatgatgcacatggcttgagataccagtggggcggctcccatagcaacaagaagcttttgtcctccttgggaatagacacccgaaacattctcttcacgggcaataagaagcagcctgttatagtgcccatgtatgcagcaggattgggtatgttagagcccaccaaggaaccactgaaaccactttctgctgcagaaaaaatagcttccatcggtcagacagccaccatgttcaccagatatggaacacatgttacatctgatcagttccagggagtctcttaccacccgtccagtttgactggagtagcagtggccttactaaccctttagatgctagtggaggttccactcttctgaaaccttgatttctttggggcccgtggatgacagtagctctagcagcagcaccacaatccccaggtgtggatccggagttgtatgagttaacaacttcctaagctggaaatctcccacctcaagcctcaaagtgactgatgcatttgcaagactcatgtctacagtagagaagacaagcacatctaccagtaggaaaccgaaaagagaagagcacctaagtgaagaagctatcaaggtgatcgctggccttcctgacttaacattcatgcatgccaaggtgttgatgttcccagccacgttaacaccttccacaagctctcaagaaaaagcagacggataactgatgtgaattggacagtttctattgcttttccttttttccatcccttccctaccatcaaaagcatacctgctctaattaaaa

SEQ ID NO: 358781 - DNA, 1571 bp, Homo Sapiens
aagaaaatgatttggatgattctttaagtgtaaaaaatggtgatagtagtaatgactttgtgacttgcaatgatatcaatgaagatgattttggtgattttggtgactttggctctgccagtggctcaactccaccttttgttactggtactcaagattcaatgagtgatgccacttttgaagagtcttcagagcactttccacattttagtgaaccaggtgatgactttggagaatttggggatataaatgctgtttcttgccaagaggagacaatattaacaaagtcagacctaaaacagacttctgataatttatcagaagaatgtcaattggcaagaaaatctagtggaacaggcactgaacctgttgcaaaacttaaaaatgggcaagaaggtgagattggacattttgattctgtgccaaatattcaggatgactgcaatggttttcaagactctgatgattttgcagacttcagttcagctggtcctagccaagttgtagattggaatgcttttgaggatgaacaaaaagatagttgttcttgggctgcttttggagaccagcaggctactgaatctcatcatcgaaaggaagcctggcagtcacataggacagatgaaaatattgatactccagggaacccccaaaacgcacagtgtaccttcagcaacttccaaaggagcagttgctagtggccatttacaggaatcagccacttcagtttcagacagctttattaaaccgcctggagcgaattttcgaagcatgttttccttccatacttgtccctgatgctgaagaggaagttacttccctgaagcacttgctggaaacaagcactttgccaataaaaacgagagaggccttacctgaaagtggggaattgctagatgtgtggactgagctacaggatatccatgatgcacatggcttgagataccagtggggcggctcccatagcaacaagaagcttttgtcctcctttggaatagacacccgaaacattctcttcacgggcaataagaagcagcctgttatagtgcccatgtatgcagcaggattgggtatgttagagcccaccaaggaaccactgaaaccactttctgctgcagaaaaaatagcttccatcggtcagacagccaccatgtcaccagatatgaacacatgtacatctgatcagttccaggagtctctaccacccgtccagtttgactggagtagcagtggccttactaaccctttagatggtgtggatccggagttgtatgagttaacaacttctaagctggaaatctccacctcaagcctcaaagtgactgatgcatttgcaagactcatgtctacagtagagaagacaagcacatctaccagtaggaaaccgaaaagagaagagcacctaagtgaagaagctatcaaggtgatcgctggccttcctgacttaacattcatgcatgccaaggtgttgatgttcccagccacgttaacaccttccacaagctctcaagaaaaagcagacggataactgatgtgaattggacagtttctattgcttttccttttttcca

SEQ ID NO: 358782 - DNA, 1040 bp, Homo Sapiens
accatacttttcacgatgaggtggatgagtatcggcgacactggtggcgctgcaatgggccgtgccagcacaggccaccgtattacggctatgtcaaacgagctactaacagggaaccctcggctcatgactattggtgggctgagcaccagaaaacctgtggaggcacttacataaaaatcaaggaaccagagaattactcaaaaaaaggcaaaggaaaggcaaaactaggaaaggaaccagtattggccgcagagaataaagataaacccaacagaggtgaggcccagctagtaatcccttttagtgggaaaggatatgttctaggagaaacaagcaatttaccttcacctgggaaactgatcacttcacatgccattaataaaacccaagatcttttaaatcaaaaccattcagcaaatgctgtaagacttaattctaaaatcaaggtgaaatttgaacagaatggttcaagtaaaaattctcatctggtctcccctgctgttagtaacagtcaccaaaatgttctaagcaactactttcctagagtatcatttgccaaccaaaaggctttcagaggtgtgaatggatctccaaggataagtgtaacagttggcaacatccctaaaaactcagtctcttctagttctcagagaagggtttcatattctaagatatccctaagaaattcttcaaaagtaacggaatcagcatctgtgatgcaatcccaggatgtgagtgggtctgaagatacattcccaaataaacgacctaggctagaagataagactgtttttgacaatttttttatcaagaaagagcaaataaaaagcagtggtaatgatccaaagtatagtacaaccacagctcagaattccagcagttcatccagtcagagcaaaatggttaattgcccagtttgtcagaatgaagttctggagtctcagattaatgagcacttggactggtgccttgaaggtgacagcatcaaagtcaaaagcgaagaaagtctttgacagccagtcaggaagttcttgtta

SEQ ID NO: 358783 - DNA, 887 bp, Homo Sapiens
  misc_feature (51)..(87): n is a, c, g, or t
  misc_feature (232)..(232): n is a, c, g, or t
  misc_feature (784)..(836): n is a, c, g, or t
gatgtatacgactcatatagggcgaatcggagctctacgcggtggcggcgnnnnnnnnnnnnnnnnnnnnnnnnnnnnnnnnnnnnnatcaggccaaatcggccgagctcgaattcgtcgagagcggagtttagttccccagaagacaccaatgaggggaaaattcgactaaaaccagaaactcctcgaagtgaaacttgtatttctaatgacttttattctcatatgcctngtggagagactaatcctttgataggctctttactccagaaccggcaagatgttattgcaaggattgctcaacacttgaagcacaatgatccaaaagcatcacatatcccccggcaagtcattcaacatgcatgactccagttcggttgcatctaaagtgtttaggagttcatatgaagacaaaaatttgttgaagaaaaataaggatgagtcctcagtttccatttctcacacaaaatgttccttgttaggagacatcagtgatgggaaaaacttaatacctaataaatgttttacttcttttaaaaataatagtaaagaaaagtgttctttgaaacatcaaacaagaaatcagtgtcagaacaatcctagtgaaatcatccaaagtacgtatcaggagacacagaacaaaagttctagtttatcaacttcctcaattttgtctcagcacaaagaacataggaatagaagatataaggaggaggaactatctctaaggctgagatagagtgccatggaaggtcctctagtagagggccactgctcctgcatnnnnnnnnnnnnnnnnnnnnnnnnnnnnnnnnnnnnnnnnnnnnnnnnnnnnnctctcaccagggctaaggtccagaccttgctgaataggatgcagatctggc

SEQ ID NO: 358784 - DNA, 886 bp, Homo Sapiens
ctctgcggggtgcggctagtggcggagcgcgctgcgaggggagggctttccactgtcgctggcgtgaactcgcgtgcccggtgggtatcagggaagaacccccgccccggacccccagatctgccatggccgaggtagcgatcgtctctgcggccacgaagactgttttaacttgtaccactttcccttccatttttcctggggtgcctctcaccctgcatctgcgcgttcagcaagctggatttcgggaatgctcagttcagaagagaaaaaattgccgggaatcaagtccttctttttgttagtcggtagtcgattgatgggaagtgttcaaaatcattcgatgtggtgacaaggcttcaccaggtactgccttctaacgagctggccatttccacatgtcagataggaccaacttgccttttaactacccgtgtgatacttaaacactgttgcccggtatcacagcttttcttcaaaacaggaagcaacgagaatgagggcattccagtagcaggagacagcatgcatagagatgctgatgaagaaagagcctagcgcaccgtgggaaactgcaaaagttcagactgggttggaatgcctggaaatgttgtgaatgacaggagatgaggctggcgagaaaacagaggtcagattgtggaaggctgtcaagccaaagactttgattttattcttgagattgatgagatgtgtgtaatccaggagtgtgcaaaacaatctgtaagggttcagaaaacatactgcttctatatatagttacctttgtcttaacttgaaaatttcaaattgtgtaggagttacaatgtgtgtaattgttattatagtacccgatccaaataatttataaataaataaatatagacat

SEQ ID NO: 358785 - DNA, 896 bp, Homo Sapiens
agctcggcggggtgcggctagtggcggagcgcgctgcgaggggagggctttccactgtcgctggcgtgaactcgcgtgcccggtgggtatcagggaagaacccccgccccggacccccagatctgccatggccgaggtagcgatcgtctctgcggccacgaagactgttttaacttgtaccactttcccttccatttttcctggggtgcctctcaccctgcatctgcgcgttcagcaagctggatttcgggaatgctcagttcagaagagaaaaaattgccgggaatcaagtccttctttttgttagtcggtagtcgattgatgggaagtgttcaaaatcattcgatgtggtgacaaggcttcaccaggtactgccttctaacgagctggccatttccacatgtcagataggaccaacttgccttttaactacccgtgtgatacttaaacactgttgccggtatcacagcttttcttcaaaacaggtaatattagggacacttgaaatttgggaattagatttacctttgctgttactaaataattgttagaattttaaatgtcatattcattttactcaactaatctctttagctttcctatttatattcctacttatgattacgtgtaattctcattggaaggattaaaatattttgaaagtaagacagtaaaattgtgaaatactctggtattggttacaaaacagtacttaggtaccttcttcctgattttctgtattttacaaaataaggccaggacagtggccaatgcttatattcccaagtggccagtaggcgaagcaagagaattgcttgaagccaacctgggcacattgtgaaaccccaggtcaccaattaaaacacacaggcaaaaagagtatttttgcggacaaa

SEQ ID NO: 358786 - DNA, 1868 bp, Homo Sapiens
  misc_feature (65)..(128): n is a, c, g, or t
  misc_feature (1761)..(1797): n is a, c, g, or t
tcccgggattgcaagtctgcagccagcagagctccagttgttgcaaagtgctcagcactaagggnnnnnnnnnnnnnnnnnnnnnnnnnnnnnnnnnnnnnnnnnnnnnnnnnnnnnnnnnnnnnnnncggaggtcatttgattgcccgcctcagaacgatggatctgcatctcttcgactactcagagccagggaacttctcggacatcagctggccatgcaacagcagcgactgcatcgtggtggacacggtgatgtgtcccaacatgcccaacaaaagcgtcctgctctacacgctctccttcatttacattttcatcttcgtcatcggcatgattgccaactccgtggtggtctgggtgaatatccaggccaagaccacaggctatgacacgcactgctacatcttgaacctggccattgccgacctgtgggttgtcctcaccatcccagtctgggtggtcagtctcgtgcagcacaaccagtggcccatgggcgagctcacgtgcaaagtcacacacctcatcttctccatcaacctcttcggcagcattttcttcctcacgtgcatgagcgtggaccgctacctctccatcacctacttcaccaacacccccagcagcaggaagaagatggtacgccgtgtcgtctgcatcctggtgtggctgctggccttctgcgtgtctctgcctgacacctactacctgaagaccgtcacgtctgcgtccaacaatgagacctactgccggtccttctaccccgagcacagcatcaaggagtggctgatcggcatggagctggtctccgttgtcttgggctttgcccgttcccttctccattatcgctgtcctctacttcctgctggccagagccatctcggcgtccagtgaacaggagaagcacagcagccggaagatcatcttctcctacgtggtggtcttccttgtctgctggctgccctaccacgtggcggtgctgctggacatcttctccatcctgcactacatccctttcacctgccggctggagcacgccctcttcacggccctgcatgtcacacagtgcctgtcgctggtgcactgctgcgtcaaccctgtcctctacagcttcatcaatcgcaactacaggtacgagctgatgaaggccttcatcttcaagtactcggccaaaacagggctcaccaagctcatcgatgcctccagagtctcagagacggagtactctgccttggagcagagcaccaaatgatctgccctggagaggctctgggacgggtttacttgtttttgaacagggtgatgggccctatggttttctagagcaaagcaaagtagcttcgggtcttgatgcttgagtagagtgaagaggggagcacgtgccccctgcatccattctctctttctcttgatgacgcagctgtcatttggctgtgcgtgctgacagttttgcaacaggcagagctgtgtcgcacagcaatgctgtgcgtcagaaccagctgaggacaggctttgcctggacttctgtaagataggattttctgtggtttcctggaattttttatatggtgatttgtatttaaattttaagactttattttctcactattggtgtaccttataaatgtatttgaaagttaaatatattttaaatattgtttgggaggcatagtgctgacatatattcagagtgttgtagttttaaggttagcgtgacttcagttttgactaaggatgacactaattgttagctgttttgaaatnnnnnnnnnnnnnnnnnnnnnnnnnnnnnnnnnnnnngccagtcttggctgaaatgttttatttaccatagttttatatctgtgtggtgttttgtaccggcacgggat

SEQ ID NO: 358787 - DNA, 672 bp, Homo Sapiens
tgatccaccacacctggcccttgcaatcttctactttaaggtttgcagagataaaccaataaatccacaccgtacatctgcaatatgaattcaagaaaggaaatagtaccttcaatacttaaaaatagtcttccacaaaaaatactttatttctgatctacacaaatgttcagaaggatattctctcaatcattgctaaactgatgacttaccatgggatggggtccagtcccatgaccttggggtacaattgtaaacctagagttttatcaactttggtgaacagttttggcataatagtcaatttctacttctggaagtcatctcattccactgttggtattatataattcaaggagaatatgataaaacactgccctcttgtggtgcattgaaagaagagatgagaaatgatgaaaaggttgcctgaaaaatgggagacagcctcttacttgccaagaaaatgaagggattggaccgagctggaaaacctcctttaccagatgctgactggcactggtggtttttgctctcgacagtatccacaatagctgacggctgggtgtttcagtttgaaaatattttgttgccttcatcttcactgcaattttgtgtaaatttctcaaagatctgaattaaataaataaaattcatttctacagacccacaaaa

SEQ ID NO: 358788 - DNA, 1410 bp, Homo Sapiens
  misc_feature (50)..(86): n is a, c, g, or t
  misc_feature (1105)..(1117): n is a, c, g, or t
aatgatacgatcactatagggcgaactcgcgcgtcacgcggtggcggcgnnnnnnnnnnnnnnnnnnnnnnnnnnnnnnnnnnnnnatcaggccaaatcggccgagctcgaattcgtcgagagcggaagtggctctcagggcgcttccggggaccaggcccgcttttggctgcatcagccggggattgccggcgccaggcatctgcatctgggaccgacctcctgggctggctgatcaaagaggaagcagcagcaatgtctgctgtgggggctgcaactccatacctgcatcatcctggtgatagtcacagtggccgagtgagtttcttgggggcccagcttcctccagaggtggcagcaatggcccggctactaggggacctagacaggagcacgttcagaaagttgctgaagtttgtggtcagcagcctgcagggggaggactgccgagaggctgtgcagcgtcttggggtcagcgccaacctgccggaggagcagctgggtgccctgctggcaggcatgcacacactgctccagcaggccctccgtctgccccccaccagcctgaagcctgacaccttcagggaccagctccaggagctctgcatcccccaagacctggtcggggacttggccagcgtggtatttgggagccagcggcccctccttgattctgtggcccagcagcagggggcctggctgccgcatgttgctgactttcggtggcgggtggatgtagcaatctccaccagtgccctggctcgctccctgcagccgagcgtcctgatgcagctgaagctttcagatgggtcagcataccgctttgaggtccccacagccaagttccaggagctgcggtacagcgtggccctggtcctaaaggagatggcagatctggagaagaggtgtgagcgcagactgcaggactgacccctcacttgaccagtcccattcagatccggcttggacaggcacctgagatggtgccaaagtgcagctgactcttcccacgacagccctgcccttcccatgaggcaggctcttcagtgagtgtttgaacgtaattatgtagttttctgtttaattgaaaaagagagctatgccnnnnnnnnnnnnnggaagtaaagcagctaaaaacatgtttctataggtgagtgttggacctcacaccctccccttccctgtacatttgtctttggtgctggacgtggccatgtgaggccaggttgaggccctttgtagacaacatacagttgctcagcctggccccatgtagccaggtgcttttgtagatcttgtgttttaggttgggcattttcactcttctgccttaaatccctgaccccatggagctgacattctagtgcggctgaggggaggggaaacattgtaaaataaatcataaaaatt

SEQ ID NO: 358789 - DNA, 1100 bp, Homo Sapiens
ggggagtcacgcgcgccggacgccacccgacaggaggggaaacggggcagctctcaaaaccctggaggcgcagaccgtccacacgagacagggacgcccgctcggctccgctccgcgctgatcctcaaggtctcgcggtttccccgccgcccacccggacgccgacgaaagccagcgagctcctcagcctcaggcatctgcatctgggaccgacctcctgggctggctgatcaaagaggaagcagcagcaatgtctgctgtggggactgcaactccatacctgcatcatcctggtgatagtcacagtggccgagtgagtttcttgggggcccagcttcctccagaggtggcagcaatggcccggctactaggggacctagacaggagcacgttcagaaagttgctgaagtttgtggtcagcagcctgcagggggaggactgccgagaggctgtgcagcgtcttggggtcagcgccaacctgccggaggagcagctgggtgccctgctggcaggcatgcacacactgctccagcaggccctccgtctgccccccaccagcctgaagcctgacaccttcagggaccagctccaggagctctgcatcccccaagacctggtcggggacttggccagcgtggtatttggggagccagcggcccctcccttgattctgtggccccagcagcagggggcctggctgccgcattgttgctgactttcggtggcgggtgcatgtagcaatctccaccagttgccctggctcgctccctgcagccgagcgtcctgatgcagctgaagcttccagattgggtcagccattaccgcttttgaggtcccccacagccaagttcccggagcttgcggtacccgtgggccctgtggtcctacaggcgatggcgatcttggccacaacggtgtagcgcgagactggcggactgggaccctactttgacccgtccccattcaaatccggctgtgagcaggccctgtgaattggtgccaaggtcacgtgaacttttcccagaagagcctgcctttccagtggaagggcctcacagacgtgtaaccgaaatagtaagcgggttatgacaaaagcattc

SEQ ID NO: 358790 - DNA, 712 bp, Homo Sapiens
cctgctgctgggccacagaatcaaggaggggccgctggctcccagataccacgctggccaagtccccgaccaggtcttgggggatcaagagctcctggagctggtccctgaaggtgtcaggcttcaggctgatggggggcagacggagggcctgctggagcagtgtgtgcatgcctgccagcagggcacccagctgctcctccggcaggttggcgctgaccccaagacgctgcacagcctctcggcagtcctccccctgcaggctgctgaccacaaacttcagcaactttctgaacgtgctcctgtctaggtcccctagtagccgggccattgctgccacctctggaggaagctgggcccccaagaaactcactcggccactgtgactatcaccaggatgatgcaggtatggagttgcagcccccacagcagacattgctgctgcttcctctttgatcagccagcccaggaggtcggtcccagatgcagatgccggcgggcgctcctccgcggaaaagccccgcagtatccagagctctccgaacacagcggcgaagcagcctttcctaggcccacacccccagctcgggagggagactccatcctactccaccccacgctcccgctgtccgagtcgcccccagcacctggcgccggcaatccccggctgatgcagccaaaagcgggcctggtccccggaagcccccacgct

SEQ ID NO: 358791 - DNA, 367 bp, Homo Sapiens
  misc_feature (17)..(17): n is a, c, g, or t
  misc_feature (31)..(31): n is a, c, g, or t
gctgaactcctcccccnacgaacagccccgncccctccccccagaaggccaggctcctcaagtgaatgtttgaaacgtaaattatgtaagttttcctgtttaaattgaaaaaagaagaacctatgccctttttttcctttttggaaagtaaagcagcctaaaaacatgtttcctccaaggtgaagtgttggaccctcacaccctccccttccctgtaacatttgtctttggtggctggaacgtggccatgtgaggcccaggttgaggccctttgtagacaacatacagttgctcagcctggccccatgtagccaggtgcttttgtagatcttgtgttttaggttgggcattttcactcttctgcctt

SEQ ID NO: 358792 - DNA, 658 bp, Homo Sapiens
  misc_feature (115)..(123): n is a, c, g, or t
aaaaattgtttttttcaatatcattctagaggtagttaaaattgaatcaatccattcaatccattatctttatgtaatctactcctaggtagctgatactatagtaagatgtaannnnnnnnngtctttgcaaaggtgttcttgttgctgacaaggaacagcagaatagtgaacaagtttgtggctaaacattattcccagattttaaaaaatgttcagtgtgcacaattgttactaccagatctttgtcaaaataatctttctgtcactgaataactgacccataaaacaatagagcatattgacctagtgtgcacggtaagcaatgagtaaataagaaatggttgtaaaatatttaccaaatgtaactttctaatttgggtagctttaagatgggtcaaaataaaaggaatgctattatttgtgaagaattacaagtttacatatgtttattcttgccagtcttttactgaaaattcctagaaatgatatcctttcctttatatataccataatatttgtatgatattcctctccaaagataggggtaatattatacattgataatagtcattcattattgaaaaactaacaatacactaagtactccactgcatgggacatagtaacccatcaataaatgatagtgtcgtacttc

SEQ ID NO: 358793 - DNA, 568 bp, Homo Sapiens
  misc_feature (131)..(131): n is a, c, g, or t
cagccaggatacaccctcccaacaacatgcttcacattattttaaatataactactgcatttatattttttaatggtgttgcaaccacttgtacacgtgctacaccttactgacaaacttgggcagctganaataaaagagaataaattctattccactgtaagaagttgatttcttttcagctttctttgtatatcagtaaagaacacgaattgtttgaaaataattttaagtctgataagtatggatagcatgttacctaagcttttaatttgtacattttgatgtctgatcatttgcatggaagagacaatagtgccacgtctgaattgttctcttgtgcttggttaatatgtacttctctagattgttcaaaaagtttcaaatgacattccttactctttggttttcagaggcattcaagcaaaatatcacagtggtcttttgttttctgaccaatctaacaatacctgtgattaaatttaatttgttagtgtaaataaatttcttgccaatgagtattattgttgttagacaacgaatgcaataaaaagaaatactgaaaaaa

SEQ ID NO: 358794 - DNA, 435 bp, Homo Sapiens
  misc_feature (22)..(22): n is a, c, g, or t
  misc_feature (212)..(212): n is a, c, g, or t
  misc_feature (230)..(230): n is a, c, g, or t
aaccccacgtaagaagtggaantcctttccagccttcccttgtaaaacccagtaaagaaacacgaattgtttggaaaaataattttaaagtccggataaagtatggatagccatgttaccctaagccttttaaattgtacattttggatgtctgatcatttgccatggaagagacaatagtgcccacgtcctgaattgttcctcttgtgccntggttaatatgtaacttnctctagattgttacaaaaagtttcaaatgacattccttactctttggttttcagaggcattcaagcaaaatatcacagtggtcttttgttttctgaccaatctaaaaatacctgtgattaaatttaatttgttagtgtaaataaatttcttgccaatgagtattattgttgttagacaacgaatgcaataaaaagaaatactgag

SEQ ID NO: 358795 - DNA, 200 bp, Homo Sapiens
  misc_feature (3)..(3): n is a, c, g, or t
  misc_feature (7)..(7): n is a, c, g, or t
  misc_feature (9)..(9): n is a, c, g, or t
atntgtntnaaaatcacaaatcaatgtgagccacctatcacataataaccaggatgatcagacgctccactggtgattacaaaaatgaaaccagcagtgtttccccccattgattctactcctttcatacaaagatctcaaaagtattttctacaccataaatctttctaaattttccctcgtgccgaattcggcacgag

SEQ ID NO: 358796 - DNA, 1098 bp, Homo Sapiens
ggtccggaattcttgggatgtgagtatttttcctcagcttccctctttctccgtattctgctcctcctcagtcccatcctccacgctttggaagctactgccttactgcccggagcgccgtcgtccccgaacctcccctgcttctccctttccttctgttccggtttctggtcgtaactcaagagcaaaccaccgtactgcaaaggaaccagatattgtgctcgcggttccaaaccgggcatgggcaccgaatgcttctcgataaatccccttatggtctctgagcattaaagaaagcaagggaggaaaacatgcgcccaagctcgttcgcaggaacatgttcgcgtgtctgcgcctgtgtgcgcagccagttttctggctgaggatcgctcgccaactacagacatcacccgcccaggacccggtgccacactcacccagaagacgaaactccacaggagcgagaagaggagtccatttctccgtcggctcggcacggcacggggatgcaggcccctgattcagtacgttctgtgaaagtggagcgagaagccaagacgtggatcgagaagccccgtggggcgggtctcagggtggcccaaaagacccctgttcacgccactaccagcctaactttaggaactgtcgtccacctggcttttattatactgccttaaacatattcacttttttgagactctagaaatttcacaagttttggggtagagcacactgggctttgggtgtgtttctcatgagggcactgacgctgaatggtgcagtgagaaaggacggtagaaaccactgcctttgcttttaccattgaagaaactgaggtcctgtgactttcccgaggtcatcggaatctgccttgcacaggagacttaaaatagttgccagcagataaaagaatgagcaaaaccacatctactccaatttgttaagtctgaaagaaagtaattgaggggggattcctctttggggaaatatttatttcctgcattgaaaatagtttaatgttagtaaacatataaagttagccaaggttgcttttgtgttataatgatgcagctgctgccaaccagaagtacatttacg

SEQ ID NO: 358797 - DNA, 513 bp, Homo Sapiens
tatcctgagtcacatcagatgtttcaactacatgtcctcttggtattccagatattttgctgtgatgggttcttcaagctgaattcctccactgcccattaatgcaaatgctggatacagtgtatgtgaacagtccacttggcgttcataaaggcatttcatctgatccatatcatagaaatttactttgcctttatcacagtcaaggaaaatcccaatacttgttggcatagggagaactctattttcaggttcattagaagaagtaggtgacttgggtataaaaaatttctgcatgcctatagtaactaaggtaaatggttgtgaagaatcaaaacaggcatcctcacttccactgtcatgcccactgtcttgctcatatcttggactaactgcatcccggggagaacggagccattcttgtagtttatcgctagaagcaactcccacttttaccaggtatgaatatggttccacacggaaggcccagaagtgttttccttttgtaatgcc

SEQ ID NO: 358798 - DNA, 611 bp, Homo Sapiens
  misc_feature (97)..(97): n is a, c, g, or t
atggggataaatatccatttgagtagaagaaataagatctagtgtttgacagatcagtagggtgattatagttacccataatctattgtgtatttanaaatacttagaaaagaatatttcaaatgttcctagtataaaagaaatatttaagggatggctaccccaattaccttgatttgatctttatacattatcaaatttgatacaaatgaatgtatcatgagagcgatttgaacacaagcagtctagacctaaggccacattctttcttaacatctatattattataaatactctacctggttataaataaaataatcatacatgtttaaagaaacaattggattttttaatgaccagacaagaccaacaaaaatgatcaagtatatttgataaaggacaatacaaaaataaaactgacccctaccttgtattacacacggaaaagtcagttctaggaggattgggaatataaatatgaaagataaataaaatttctaacagataacataaaggaatgtcttcatgatcacaaaatagggaaagtacagaaaggactaactacaaaggaagagattattaaaatggactacgttaaaattaaaacctct

SEQ ID NO: 358799 - DNA, 858 bp, Homo Sapiens
  misc_feature (565)..(582): n is a, c, g, or t
  misc_feature (584)..(593): n is a, c, g, or t
  misc_feature (786)..(794): n is a, c, g, or t
catagaatttggatcctttggtcgggttctcccaaattcttttgaggtgtccatggtcaactgcttcagctttgttttggcaaccccctgcccgaagtcgcatataggctgttcttcaccttgtttccaaggctgaggaacagaaagtagcctctgttttgaggaggtggaagttaagtatacatttattttttactgtgacttgttcaggaccacattttacaaaatgccttgtttccttcattgtttctggaaaggaaagttctattaatattgttttactttgaatatagaatagtttttttaattagggcttattttgaaaaattctgagtttaattcaaatgtatgccaataccttccaaagtaaggtaatattcagagacagttgttgtgatcagatggcttagagaaatttctggaatattcacattcgaagattccttattaatgaatgtctttgacttaaatctaaccaaaaactgcaacattattctttgtacattttcattatatagtgttaacaagcttagttgcaaacaaataaaatacttaagctattaannnnnnnnnnnnnnnnnncnnnnnnnnnnaggggcggccgcctctagagtaatccttcgaggggcccaaactttacccgtacccagcttttttggaacaaggggtccccaataagggagcccgattaataacttagggactggcccgccctttttaaaccccccggactgggaaaactggctaaccttgggaatcttttgggaaggaaccctactctttctnnnnnnnnncaaaattgtggccaaacctacctacgaaaatttagacctctaaggaaaattaaaaaatttttta

SEQ ID NO: 358800 - DNA, 438 bp, Homo Sapiens
  misc_feature (244)..(278): n is a, c, g, or t
  misc_feature (421)..(421): n is a, c, g, or t
atatagttggacgaaccaaaccacagcatcccttaggttaaaagcaaacggggcagctttgcctagagctcattgacagtgtgatggggggagaagggttgtcacaatggaagatgaggacactagactcatgtagcacagaaacatgaagccacacgcaccggcagcctccggggtgttcctcgctctctcgtatgttaaaccttatattttataagagtttttcctcttatttcactttttnnnnnnnnnnnnnnnnnnnnnnnnnnnnnnnnnnnctttacacagaatttatatgtgggtaagtgtttcatggaaatttctaatcttaacgaagctaagtggagctcactcgtatcccaaagtataaccaggtgcagaagccacagtctgagaccttgacgacagttcctcgtccacncaaatggagccggctca

SEQ ID NO: 358801 - DNA, 635 bp, Homo Sapiens
  misc_feature (602)..(602): n is a, c, g, or t
ggaaatttagatttctgtggtaaatataaatgagtttcattttaagtaaactcattttgtgggatttgagatttaaaaatgaaattaattttgcacattctagtcatggttgggctctaaggcaatgttgtaaagctgtaattgtttgccttatgggaagaagtgaaaaggaattaaaatttatggtgtgtctactatgaaccaggcatgatgctgagagtttaactgtgtaatttttggcctaaatagccctgtgaagtagatattattccaactttacaggttagaaaatttgaggcacagagaggtgaaatatttgcctaaagtgaaacggcaaatttggcaatttggacttggattcaagtgtttataactaaagcccagctccttgcatcataccctggtacctaaaagacataaaaactcacttcaggtgcaatgtgaatgaaaatgacgctatgacccaaggcttggtgtctatgtgctccttgagaaatagttcccgtggatagatccgggcaatactcaaaaacccttgctatctttgccatgcattactctaaccacttgacatgtataaattaaatctcacaattcgtgangaatggctattatcattccatatttcaaaaaaa

SEQ ID NO: 358802 - DNA, 1009 bp, Homo Sapiens
  misc_feature (214)..(214): n is a, c, g, or t
agcccggttattcatgtagcactccatagccttaaaaggaggctaatttaagtataaaaggtgttccctggtaaaaagtttactattaaaatattttttaagttaggaatttttaaagctatacatcaatagtaaaagcgatgagcaaactttactcacatgcttaaggataaaatttgacagtttcatttgtcttcgtattagaagcccttanacagcctccttcaagcaagtgcagccagcgtaagcaggggacagacactttcagtggaacatttatggctctgagaacagcaccactcttttggggacaaggccatcactggagctcccgggcctcctggaattcaggtggcaatgtccaacatccaaactcacagagcctggcattccgatggggaaggacagaaaggctgggaccctctgctgagaagaggctccttttcccaagggaagctcgctgcttcgagtgcacacacgtgttgctgttataaggtcctttgctttgacaattcgagagagtattagaaaacactagcggcgtgaggtgactactgacaatcacctcctctgttttctggctcatgattttcctaaagcaaagcctcaggctcccggcttctatttatatccacatgtaaagccccagatcactcgggcacctgcttccattcatggaattctggccagccagtggctgatgcctacacaagcttttcttcaaaaagccccaatttctgacagccatggcagctttccctccacccctattttgccaaacccccaaatcttgcagatttatatccagtgtgagcacggactatgcttcttcccagaaagtagccgcctgcttgcttctttgcattgacatttgcactgctaagaacagccaatccagaaagctataattggtaagcagggcacagagaaattcaaagccaattattagccaaaaaatgggacaaatgccaaacaagacaagagcttcttccacttctgctgtagcaga

SEQ ID NO: 358803 - DNA, 765 bp, Homo Sapiens
  misc_feature (545)..(545): n is a, c, g, or t
ccccgggctgcaggaaaatttaaaaagtctaattacaagatgaaaggaatggctgttctagaagaaaaatgtatcttttaagttgatatggaattcattattgaagcaattgtttattgcctaaaaggtggattttggtaattttttttcccttcctaacatttaggctgatttgagaaattctgtgtttcagaaagaatctgctaagggcaatgctgtagtttgcttcatcttgtaggagaataaaacctctatttagtatggggggaaagcacaaaacaacccttgattttctatcatgactgatatatgcattgaaatggaccaggtcattaaaaacttctctgtttgtagtggttcctatatagtctagcaatacctgaattagggaaatttgagtagagatccttagaagcattgttaagttacaaattatggttaataataagctcagtaaacactttagaatagtgttataattggtatatatgtgccaggaatgatacgaggaactttatgtgtcatgatccctgattacagatcangaaaccacggctcaaagagtgaagttcttttcccaaggtcacatagcatgtaagatcaactccaagccctgtagttgttcagcctgtaatatggtacgctgtaacaaatcgctggacttttccttcagctgctggttgaacatctggggttctatgagctagggctccctgtaaacccttttcgacaatggtgaacctttgccataagcatttcgaaggg

SEQ ID NO: 358804 - DNA, 800 bp, Homo Sapiens
gttcgcgccgcggtcgccggctgcttacgtgggcgggcctagtgtggggctgagggtgcgggtcgctatggcggtggacatcacgctgctattccgggccagcgtcaagaccgtgaagacgcggaacaaggcgctgggagtggcggtgggcggcggggtcgatggcagccgggacgagctgttccgccggagcccccgccccaagggcgacttctccagccgggcccgcgaagtgatttctcacattggcaaactgagagattttcttctggaacacaggaaagattatattaatgcttatagccataccatgtctgaatatgggaggatgacagacacagaacgagaccagatagaccaggatgcccagatattcatgaggacctgttcagaagcaattcagcaactacgaacagaagctcacaaggagatacattcccagcaagtgaaggagcacaggaccgctgttttggatttcattgaacgattacttgaaaagtatttcattttcttttaaaggtcaaatgtaacatttcacaatagatgtgatgcagaatttagctttgctagctgaagactgtagtatctcattatatttaatgatggctttgcctgagaagctgttttaagcagtctctcttctggtattttcttctgcaacaggagtatgtaaactttactcagaacagagagccatccgagttaaaagagtggtggataagaaaagattatctaagctggaaccagaaccaaatacaaagacaagagaatccacatcttctgagaaagctcacagagtc

SEQ ID NO: 358805 - DNA, 1038 bp, Homo Sapiens
  misc_feature (957)..(966): n is a, c, g, or t
tcccgggatcggctgcttacgtgggcgggcctagtgtggggctgagggtgcgggtcgctatggcggtggacatcacgctgctattccgggccagcgtcaagaccgtgaagacgcggaacaaggcgctgggagtggcggtgggcggcggggtcgatggcagccgggacgagctgttccgccggagcccccggcccaagggcgacttctccagccgggcccgcgaagtgatttctcacattggcaaactgagagattttcttctggaacacaggaaagattatattaatgcttatagccataccatgtctgaatatgggaggatgacagacacagaacgagaccagatagaccaggatgcccagatattcatgaggacctgttcagaagcaattcagcaactacgaacagaagctcacaaggagatacattcccagcaagtgaaggagcacaggaccgctgttttggatttcattgaagattacttgaaaagagtatgtaaactttactcagaacagagagccatccgagttaaaagagtggtggataagaaaagattatctaagctggaaccagaaccaaatacaaagacaagagaatccacatcttctgagaaagtttcacagagtccttcaaaagactctgaagaaaaccctgccactgaagaacgtccagaaaaaattttggctgaaacacaacctgaattgggaacgtggggagatggcaaaggcgaagatgagttatccccagaagaaatacaaatggtttgaacagggaaaatcaccggattatttgggtgaaaatgaacagcttggtttgaatgaagtggaggcgcaattccaaggggagaagggggttgaagaatttccaggactccaaagaaatattccccgggaaaaagggttttggccaccgggaagactgtagaattggacggccattcccccccggtttaccttnnnnnnnnnnaaccttggaaactctcccaagggaagggccaccgcccccacctcttgagagagggggcttttaaaaaacaca

SEQ ID NO: 358806 - DNA, 433 bp, Homo Sapiens
aagatttgatctgaatatgataccggttgctaaatcacacggcggctgggccgggactgtcaaatggtccagaaaaggaagatacacattcccacagaagttaaacttttgagagggcaggggaagcaacgaggacagatatccttcacatgtatctctctcctttccggcaaaagcaaggaggaaaaagcatccggcgagaagacttaagtgacatactcaaaagagaaggagtgtggggaggtcgcagattctgtagccaagacggctgggaaaaggacggagcgccacggacaggggacccgcggcctaacctcggggctgacccgccgcgctccctcgtctcctccgcaggtcctcaggcagtgcgtccagtcaagcccgctcggcagttcccgccgcagcccccgagatacagccagggccggcgcgc

SEQ ID NO: 358807 - DNA, 833 bp, Homo Sapiens
gctatttgcattattttagagcttagccatccaacacaaatcacagcctgaaaattcataaaataagaggctaagccctaaggtgaatgcagatcagaatattatatatatataacattttttacaagaaaggaaaataccttttcttcataaactctttgaaactttattgatgattctgtatgtgcattatcttaagaattcgtctcattgtatgcctttttgtaaaacaaaaccaaaaacacacatattgcctggttttgatttcaaggatacgtaggaacatggaatgatgattacttgatgaaaagcctgccagccttgaagcttccccatatgatacaggttttatgaacagtgcaacagggatgcatcaggcaggagtgactggcctattatggactggaccacaaagtattcagagtcaacactcagtcaatctgccaagcacagaagtctgtcttaggcatccagcacctctcttcccaccacaccccttgtgacaatgtgtgctctcctgcatatctggcctcaggaatcttcctgtgaatatccattctgtgtctatgccaggactaaatgccccatggtctcccaaagttctctgcttcttatctcctccccatcctgaaattcaggcttttaggactcatctcccagtgacttcctaagttgcataagctgctaatgtgccagtgggtgaagataaagatgcctgccacctctactccctagagcatcctagggatataaaggacaaaagtactaattaggtttttggttttgaatgttttgtttttctgcttacaaacaaccagaagttgctccatttg

SEQ ID NO: 358808 - DNA, 617 bp, Homo Sapiens
  misc_feature (67)..(67): n is a, c, g, or t
  misc_feature (96)..(96): n is a, c, g, or t
  misc_feature (146)..(146): n is a, c, g, or t
  misc_feature (172)..(172): n is a, c, g, or t
  misc_feature (174)..(375): n is a, c, g, or t
atataaagcgttattgattgaaagagtatgcaaatatgaacatatatgctattagagattagatcantatatttctttcaatgttgttctactatntgatttaaaagaataaagcaggtcaggtcggttggcccacacctgtatcncaagcacttaaggaggctgaggcagnannnnnnnnnnnnnnnnnnnnnnnnnnnnnnnnnnnnnnnnnnnnnnnnnnnnnnnnnnnnnnnnnnnnnnnnnnnnnnnnnnnnnnnnnnnnnnnnnnnnnnnnnnnnnnnnnnnnnnnnnnnnnnnnnnnnnnnnnnnnnnnnnnnnnnnnnnnnnnnnnnnnnnnnnnnnnnnnnnnnnnnnnnnnnnnnnnnnnnnnnntgacaaagtgagaccctgtttgtaaaaaaataaaataaggcagttaaacgtgttaggcacacaattaaggggaatgcataaataattcttttgctgttagtgatttgagttcagaatttattgagcacttagtgccaggcagactattaagtgctgaagaatcaaaggtgaattacaggaagtcaaaattataatgtaatggaggaagacacaaatactcgtgccgaattcctgcagcccgg

SEQ ID NO: 358809 - DNA, 579 bp, Homo Sapiens
  misc_feature (542)..(542): n is a, c, g, or t
agtgggattacaggccacaaaatgcatggcacagggaagggtttgacaactttttgatggatgaacaaagaagattcaagccacttgtcaacaagctcaaagtgattgaaagtggaagcatttacccacacgctcatgcaggttgagaggtgctgcggagatgggtgtccacggatgaccgttcggaggccgacttcggggatgtggccccattagctcaagagtgggtgactccctaccacactgatggcgttggccaggacaggacaagcctactgcagtgacacagtgtcactgatccctgatgcccacgtgggtgttttactttagctaatgctgcagagataatgcagacagagaaatgaggccccagcgctgagcagcccaatcacctgcttgtaagcagcgagtgtttctggctctgctcctgagccccaaaccactgtggactcacgaagaatctttcagacgttgagtcagaatgtcaggccttgagtgtagtctccaccccttaatgaccttgcattgataattctattccncgagcctcactgtacccatctatgacatgaggacaat

SEQ ID NO: 358810 - DNA, 581 bp, Homo Sapiens
  misc_feature (452)..(452): n is a, c, g, or t
agactgccccctagggtcactgcttcactagccgcaccccaccccagattggggttctacctcccaccccacatcctcgttgtggggggacttccaggggctcctctgcagcctcctccactacttcctccaccccatctatgtccttgacttaggggggcattttgtcttttttagatttgattttgttctctctcctttgtctgtttgttgtcaaagatgctgctgggcagacaggcagggaaaggatctgtctgcccatctggcccagggggtccgagaagggaagccttgggcaagaggagaccagttgcaatactgtacttcctggtcagtggccagaggatgcgtgcaatagcagaggccaggtgaccccttcagccttggcctctgcccctcccttggccctccctccctgctcctccctggtgttgggcagtccttttctaaanctgtcccctcgtgtgtgtctggggcatgcccaggctgggccctgtgccctgtctgcatgcctccaactgtcatgctgtgctcgagccccaataaagacatttggagcatcctgctgctcctgctgtgtg

SEQ ID NO: 358811 - DNA, 1075 bp, Homo Sapiens
agcgggatgagcatgtgttgaatcctcaagagaggagggaggaagcaagaaggaaagcttgaagggaggaggggaggggggcaggtgctgatttcagccctgtagcgtcaggattgcgtcaattcgggttccagccacgtctggagtctcggagacgagcttctcagaagagccaaaacaggaaccgaggtggcaaatcactgtgcgagggcgagtggacctccctctttgcctcctccctgttccaggagctggtgccctgggctctgcgctgttgttttcagcgctccgaaagccggcgcttgagatccaggcaagtgaatccagccaggcagttttcccttcagcacctcggacagaacacgcagtaaaaaatggctccgatcaccaccagccgggaagaatttgatgaaatccccacagtggtggggatcttcagtgcatttggcctggtcttcacagtctctctctttgcatggatctgctgtcagagaaaatcatccaagtctaacaagactcctccatacaagtttgtgcatgtgcttaagggagttgatatttaccctgaaaacctaaatagcaaaaagaagtttggagcagatgataaaaatgaagtaaagaataagccagctgtgccaaagaattcattgcatctggatcttgaaaagagagatctcaatggcaattttcccaaaaccaacctcaaacctggcagtccttctgatctggagaatgcaaccccgaagctctttttagaaggggaaaaagagtcagtttcccctgagagtttaaagtccagcacttcccttacttcagaagagaaacaagagaagctgggaactctcttcttctccttagaatacaacttcgagagaaaagcatttgtggtcaatatcaaggaagcccgtggcttgccagccatggatgagcagtcgatgacctctgacccatatatcaaaatgacgatcctcccagagaagaagcataaagtgaaaactagagtgctgaggaaaaaccttggatccagctttggatgagacctttacttcctaatggataaccctaacccaaatca

SEQ ID NO: 358812 - DNA, 751 bp, Homo Sapiens
  misc_feature (508)..(508): n is a, c, g, or t
  misc_feature (549)..(549): n is a, c, g, or t
ggatgagccaccgtgcctggctgggtatttatattatcattctagtttcagagtatacagaagtttcatcccatcatttggaaaaataaaggcatctgaagtacaatattacttatagaaatagtttatattcctattaaatcttaatcttgtggcatcagggaaatatttgttacatagtaggcaatttttatccagtactttatagattcaactctaagttgcaagcgaagtcaaaactgatgaaaatttatttagaaaaatctaaaaattctggttttaaatatgagaatcagtggaaaataagggtataattttgtaggtcatatgattgaagaaaatattattttaacaatgtaaagcaatatgatttgttactataattaacctgtataaaagatacattttatggtggtttcagtaggtcattttaaaaaccaatgtgcattagttttcaagtataaggtttaagtaatttggtttaataatcagaaaatattcaatacangtgttggatattctgtcatgcactatttttcagttgacaantttctgaattttaattgaatactgtttcttcagtcatggttaatgccactttatccctgaaaataatttcaaaaattgggtttgggtcagtgattcctcaggaaaaagatctcctgcccattaagaagtggtatcaaaatctcctaaggaaatgaggggaaagaaggggggctgtacaattttaaaaaagcttattccttat

SEQ ID NO: 358813 - DNA, 672 bp, Homo Sapiens
  misc_feature (598)..(598): n is a, c, g, or t
  misc_feature (646)..(646): n is a, c, g, or t
gttggggtacatttactgtgattatcgagtagttaaccaatttgccagacattatcagactggacagccactgccaaaaaatatggtgtctcgtctttgtgaatctaaaaaggtttgtgctgcagctgatatgcaacttcaggtcttttatgccactctggatcaaatctaccatgggaagcatcccctgaggaattcaaccacagacattctcaaggaaacacaagagaaattctatggcctaccatatgttccaaatactgcctggcagctgcgattcagccacctcgtggggtatggtgctagatattactcttacctcatgtccagagcggtcgcctccatggtttggaaggagtgttttctacaggatcctttcaacagggctgcacggggagcgctatcgcagggagatgctggcccacggtggaagcagggagcccatgctcatgggtgaaggtatgcttcagaagtgtccttctggtgatgacttcgtaagtgcccttcgtttccgacttggatctggactttcgaaaccttcctcatggattctgaataaaagaaacactctacaacctcttaaatcaaggccatgtanataatgactttgttataaatgctacagctgtgaaaagcttgttctganttcattgttcgcttctgtaattctga

SEQ ID NO: 358814 - DNA, 1110 bp, Homo Sapiens
  misc_feature (510)..(519): n is a, c, g, or t
agaaaataggggccaaattgtcacatggtggcagcttttatgaatatggcatcagtgtggctttctttgagaattcaagacaagtgtgaatggaggctgtgcaagcaggagtctgtaacagaacctctcttccccagggctgccggggagcgctatcgcagggagatgctggcccacggtggaggcagggagcccatgctcatggttgaaggtatgcttcagaagtgtccttctgttgatgacttcgtaagtgccctcgtttccgacttggatctggacttcgaaactttcctcatggattctgaataaaagaaacactctacacctcttaaatcaaggtcatgtagataatgactttgttataaatgctacagctgtgagagcttgtttctgatttcattgttcgcttctgtaattctgaaaaactttaaactggtagaacttggaataaataatttgttttaattacgccggccggcgggcgcgctggtcgcgcacggcgcacgccgnnnnnnnnnntgtgggcgcagagggggacgagccttgctgggccgccctcggccccttaaaaaactttttcagggcccttcgcctgtgggggccgcggggccccacagggacaggggacacgggggaagtaagggtgtttcccaaggggagacccctcggtcatgaaaaaaggggctgtggtattctctcccccaataaaaaaaacgccgccgggtgggaaaccccgagggttttttttgagaaaaataccccggtagtgggggctctctggagccgcacttttctgggggtatcttatccaaccgggggagccccccggagcagaggcttcccgaagattcacaataattcgcgccccccgaccgcttggggccccgcccgctgtcccaagagggacgcgggggcggaccagtatagtcctatgggggcccgttttcctcggcgcgcactatgtggggcagacgcctgactgtcaaaagaacggcgtcgagtgtgaagaaacaccgcacgcagacatggtcgccgcgggcccggaggatacgacaaggcagcccctctgcgctcccccccctttcgcggcgtgctatctacgtcatgggt

SEQ ID NO: 358815 - DNA, 1241 bp, Homo Sapiens
cagtgataacacaatgcattggattcagttttgtgaaaatggattctgtggccatccaagggatgtatcagggatgatcagctgatgagaggctccagaaggatttctagatcgcttcaagcctatactgatggccttagctttgttcagtcattgtaactgggattgttgtcattgctaccgtggtagtcaccttcatgtcatctataatagtactcctggagagccctggctgcctacaccagtggaaaagagtctccagttctgctctggcctactaactgttaccactgagagaacaacatgttcatttgacatgattgaagctggcatccgtatatgaagatccttgtcaagctttcttctgtggtctgattagtgttgataccggggcacctcctctggtacttttaagtgttttgttaattatgtttactttttggaatggtgtaagcctaaccacaaataaaagatctttgcctaagtttttgatttctcaaatattgtgttcattagtctagactgggaatggggaggggaaatggggaaaatgaatgaatgaaatcagaaaaaagtcagcggctcagtaaatacagtttaaagagagaataattacttcagagctacccttttaagagaaaaccatcagaaattgataatgtttatataaagtttataaagccattgtgttttgttatataacaaatcagagatgttattttagaatcgattcccatctaaagaactcaattttgagtctgacatttccaggaccagatattgtcttactcacatttcctttggctttgaaatagggctttccttcccaaatggctatttttaggctagggatgttaacatccagggatttgtgtgtggaataactggaatgtcatttttgcttttaagcccatttctgatgatatagccaaagcaggttgtctgactatgtaggatttttacatcttgaaactaaatcagaaatccagacatgaaaataacctttctagaatgcctaggagcagaaaacaataatagcatgctaaatcacaaatgatgctatgtatgggtatgtaaatatcagtgctgtctgcatttctgggtttattgaagacctcttgttgtatatatcctcaaaaattaatgtaattgacatcttcaagaatgtttctattgtcttccattcataatcagagatgtaatttgtatggactaaataaaaactttattatgtaatgaaa

SEQ ID NO: 358816 - DNA, 945 bp, Homo Sapiens
aattttgttttctcaacgttacttatggtcttacggcctgtcacattagttatttataatgtaatattcctggaattttatcttcatatgttcccagagcgtgattaaatgcaggttggttatacatcagtcgtttttcaacgcgctttgggtcatcagacagtcttttggcaattgtccacattgctgtgaaatagttgctactaggaaatgtgggcgcttttgaaaatgcatctaacacatcactcagggaattacattcctcagacagttttctactgctgatacggtttggttttgtttccttggtaagaacatcttcattggagacttcatgattaaggtttactttcttcaattcatcatcagatttatcaacagggacaagagactgctttgagtcaaaaaacagtcttttagcataaagtagtctttcaattctaagggctgttagagtgcttatgccctttgtttgaaagccaacatctgatttaaaaatgaatgcatcctgaaagagatatctaatgatatcagttgattgcattctgttatgaaagttatttaaaatgttccagtttgaatgaactatttttggtttgcaaagtcccaaacaacatagcctcatagttctgcttgttgaaactaatgtactgaattgtctaaggttccagaaaaaggagcccgctttgttattcattttgctctccactgaaacacttccaaatggcttcaaagttgtcaacatgaaaccaacgtcacttctactagtgaaaaagaacacgtgctgtcgttttcttccaggacaactcgtgagactcttctcctcgaagtaaaaagtctaggatgtgatacgggctgccgctaagcccaagctcgtcctccactcaccttagagcacaagaccgtgactacgtacaggagcagccatgacagctcccccccgct

SEQ ID NO: 358817 - DNA, 668 bp, Homo Sapiens
aaacaacatgctaaagtacactgtgaatcctttggaaaagttgtgtagaatataatgttcagcactttcctaactgatttgatttttttacccacaaatcctactttagtagtagggtactagagcatgagtaaccaaaaagcagtttaactatgacttgaaaacttctaaattacatcaaatgccataagaggaaaaaaatgaaaatcatttatccttgagtaaattcttcttcttggcttcttcaaaggatgatctctacacaggtaaaatgagggtaaagttcttggctaaaatgcaaagcaagcatttaatacaagcaagtgttttgctaagcatagaactatgctggaagctggaagaggtcataggaagacttgcatcatgcccaaaatgtaaaagttaaaaatgaagcttctttcattcaaggtgtggagagaatagagggagttggagtcagttccctgccaggctcctgctgccttttccccacctctagtgacccatcagagattcttcaaaatctggggactctgtgggatacagttaaaaataacacatttttatatgtacacaactccctcactttctaagtttgtgagaaagggggtaaattgttaattaccagaaaaaataacgtttgtagaaaatggtgctataaagcaaaa

SEQ ID NO: 358818 - DNA, 516 bp, Homo Sapiens
  misc_feature (20)..(20): n is a, c, g, or t
  misc_feature (31)..(31): n is a, c, g, or t
  misc_feature (45)..(45): n is a, c, g, or t
ccgagtacaaccccaatggnaactaaagaantttgtgtaccccgnaagccacgttaaacaccgtgtccaacttccattgaaaaagggtttccaaatttaccttttaaacagtgtttaatggacgagaccctcagatgtgttgaccgtaagcctctatcctgcaatgtttttgtgtagagtggcgattgaatgcctgccccgggtcagtgtatcctaaatccccgagaccctcgtttgatagtgccctcttgtaatatttcctcaagtgagtggcatgtgggttgtgatattgaccatgtgattatggacatcgatatgaaaaataaataaataaaactaaggaaccctggaaactaccagtgggcatgtattagccagtcattgtaacctcgtgtctagtagaacaatgtacaaggtatgtacagttcataaatttgttgtcatgtgtatgagaagtactttgtgctgatcgccttatttatattcatcaaataaaccttgtttctttctgaagtg

SEQ ID NO: 358819 - DNA, 406 bp, Homo Sapiens
  misc_feature (395)..(395): n is a, c, g, or t
ggcacgaggcgttaacagcgtgtcaactttcatttgaaagtgggtttcaaatttacctttttaaacagtgtttatgacgagacctcagatgtgttgacgtaagctctatctaattccccgagaccctcgtttgatagtgcttcttgtaatatttcttcaagtgagtggcatgtgggttgtgatattgaccatgtgattatggacatcgatatgaaaaataaataaataaaactaaggaaccctggaaactaccagtgggcatgtattagccagtcattgtaacctcgtgtctagtagaacaatgtacaaggtatgtacagttcataaatttgttgtcatgtgtatgagaagtactttgtgctgattcgccttatttatattcatcaaataaaccntgtttctttct

SEQ ID NO: 358820 - DNA, 373 bp, Homo Sapiens
cctcatccttcatgctacctcaatcaagaagctttctttcttggacatgtgcacaagtttgtccttcttgtggtgtgagtattcactagggatgctccccctcctaaacttctcttgagttgagcccttgctgttgttaatcgttagaagtgtcatatttgcaccgtatgtctaggctagttccggctgatgggactgatgccacatgtgaatcatgagttgaatgtataaaaatttcagctttgccactgttgtcctttggatggatattatgcacagggaaaagtagatggagaggaaaacaaagagttgatcagctcctagttctggagttggttattagaaattataaaaaatggtggctactgctcag

SEQ ID NO: 358821 - DNA, 562 bp, Homo Sapiens
  misc_feature (204)..(204): n is a, c, g, or t
cccttgtaaagacctgtgcttagactaacaaaccagacaggtacagaactcagggattcaaaccaaggtaatatgtcctccttccctttctccagttggcattgccacattctacataagacaatgggggctgaagcctcatccttcatgctacctcaatcaagaagctttctttcttggacatgtgcacaagtttgtccttcntgtggtgtgagtattcactagggatgctccccctcctaaacttctcttgagttgagcccacaatccccacaaccattgggatgcattgcattgcatcagcagcaggtgttttcttgctgttgttaatcgttagaagtgtcatatttgcaccgtatgtctaggctagttccggctgatgggactgatgccacatgtgaatcatgagttgaatgtataaaaatttcagctttgccactgttgtcctttggatggatattatgcacagggaaaagtagatggagaggaaaacaaagagttgatcagctcctagttctggagttggttattagaaattataaaaaatggtggctcaactcag

SEQ ID NO: 358822 - DNA, 673 bp, Homo Sapiens
tattatcatgttatttacagttaatgctgaaataattctcaagtgcaggaatataaatgttaagtggttttatgattccaagctgatatatttcacctgttaaaaattatgctgctaaattagcattagaggccttatgtttggtaattacaagtgtctgggctattggcgcgtctctatatatgtgtgtgctttgttccagtttcttcaaattatctatgtataattgtatgaaatatttaaatagcaaagaagtcaaagaagattgttaaatattcaacaagaatcataaatacctttatatgtattttaaaagtattgggctgttctgaacatgattatgctggtctgtctgccttttagcctgactccttcactcttgtgtgtgaagtctattagcaactttcaataagctaagcaatgttgtaacttgcaaaaaagcctccactctgagaaacagggccttatagagtaggaatgttttcatactgggactactgaaattttgcagatgtgtgcatctgttccatttaaggtgcccttaaatgtgttgaatgtaatgtgttgaatgtttatgtgtaatggctaaagtatctatatgtatgtgcataaaactgtcacaagatgtattctcaggaatactgttacctggagtttgaaaggaataactatt

SEQ ID NO: 358823 - DNA, 784 bp, Homo Sapiens
  misc_feature (157)..(177): n is a, c, g, or t
  misc_feature (347)..(356): n is a, c, g, or t
gtgatgtcctcagacctggacccccaccagcctcactccccatcccaaccagagatggctcacttcggatcgagggttgactacatctcatcatctcacgaatctgctgtaatataagacaacagcttttaaatgtgtatataacccatgatttcgnnnnnnnnnnnnnnnnnnnnncttgatggtttccctctccctccctctcttcccattctccttttaaatctctttgaatcacatttggtagtgattttgacttagtccagtagtcacatagctttaatatctagttcaaagctaaccatagtataattgttatattaaggagttattttttcttaaaacannnnnnnnnngcttgctttggttctgttctcacttttaaaggatgctgagatggtaatatgactctccctattttggtaccaattctgagactgtatgaattttcaggtggaactttagcacacactgaagcaaagttgtgaagtgcagggcgggaggtgggcgtgagctttctattttgcgttgtagaagaagtgagatgtagtaagctaactaacagactttctagcaggtccttttgtgatgtctctttgttaatctgagtctatctattttccgcaataaagggaaggacgacagtgtttggagtgtcctcctcttctataagtgcctttttcctgttgaaagaggtgatattataaggttttttgaaattgtgaattctagaaaagaaatgttgtaaatacgattccattaactacctagaggctgttcattt

SEQ ID NO: 358824 - DNA, 607 bp, Homo Sapiens
gccagggcctcaagacagctcttcactctccactctgcactctgattccgctatttcttggctctgggttctgctgtcaaagtcccaggggccactattgtgggctctcaccctgtatccaagccccacttcacctgcccccttgtatagctgccttcctcacatccctccagcttgcccacattttgctcacggatgggggcagactctactgttccctctgcacctgcatctctctccttcaggcctttcatgtacaccgggaccaccaaagggccatgaactctttgtcagtcaagtcccaaggtcccatagagagcagatggccactttaatgtcacctcaagcccttaggctgtttttagacatccatctccttagtggatgctttttatagacccccatccaagacctcacacatcttgtaattaaatttcatctggtagtattttgactttttttccagcctgtcaacaccttctgtgttcttacttcgtggatctcaaatatttgataccctcttcagtgttggattaatctaaaatttggtgcttgcgttaatgttttcatgaagttactggtaatgtcctggaagacatcaggcatt

SEQ ID NO: 358825 - DNA, 613 bp, Homo Sapiens
  misc_feature (21)..(21): n is a, c, g, or t
  misc_feature (64)..(64): n is a, c, g, or t
  misc_feature (128)..(128): n is a, c, g, or t
  misc_feature (169)..(169): n is a, c, g, or t
ttggtgggtaacacacctcgnttcctcatcctgctggaagaatccactgctgtcaggacccacntgctctgagaagcctcgacttgggagcaactctgctgcgtctactttctaggtagtcagtgtcntaagcacctgccaaaggttctccttacctcctttgggagcnccatcttggtcctggttgtggggcacctaggagggggccacacacatccgtctgcagagagatgggatgggcaaggaatcccctgggggtgccagggcagaggcgtgggcagcggcctggtgcagggctgttacctggcctaacctgttgtttgaacgtcggtaggactctcccagtgttctccagaggcagagcagtgaagtcacaggagtcctccaaggcgtagagaggcggggcttgggcgtgagaattcctccctgtgtgtatagcagcggactctgcccaccgccggcccggccccaattttttgcacagggaagaaggctagagggaccaagggcaaggtcactgcctccaccctgcccagggtccaaacccacccctcctgatttcttgaaacttctcctcccttctcttgagaggatgttttgggagggaatgagg

SEQ ID NO: 358826 - DNA, 653 bp, Homo Sapiens
gaaaatatacccctcacatcatcggattgagatggcagtcgaaatagcttcattgaagtgtcagcactcatccatcaatcaatcacccacaaggaaaaatagcaacagtacaacggggtggcttttatgggatttactcatgggcatagggaatagcggctcaaatgtagttctgacatgaaaagcaaggtgctgatattattttttatgatgggaggatcataaagtgaattgagaacagtgaggtctgtctttgcttaacctattcaaccagaaatgaatggagctcgactggaaaggaacagtcttcagatgggttaagattgaagggtggactggactctactgagcaccgtccttcaacaaggaaattctattaaaggaaaatcaatgcattagtattggggttcttgtagctgttaaaaattggctgctccaatccagggttattaggccaaagttacataattcagatctcactgcaaccatccaaaagtggattctcgagcccttgctccaatggggggaggagatcaatacaattcccaattccatggaaattggttcccttctaaggaagaaaaaataatcatctgcttcaacataacaaaaacacaccctccctctcccctaccactctctcccctccctcc

SEQ ID NO: 358827 - DNA, 458 bp, Homo Sapiens
cactgctggtttgagacctattctgaccaaactatataaagaaaagggagtgtatatgacaggaaaagaacttcgccagtgtatgctaccaaagtcagcagctttatctgaaaaactcaaagtattccgagaatctctcctgcccaggcatcctcctatctgtcatgagtggtttctgagaacattccctgatcctacatcatggtacagtagtagatcagcttactgccgttccactgcagtaatgtcaatggttggttatattctggggcttggagaccgtcatggtggtcttttcaataagggagaaacctttgaagttccagaaattgtgccatttcgcctgactcataatatggttaatggaatgggtcctatgggaacagagggtctttttcgaagagcatgtgaagttacaatgaggctgatgcgtgatcagcgagagcctttaatgagtg

SEQ ID NO: 358828 - DNA, 1220 bp, Homo Sapiens
atagccatgtccaagcagcaaggtgtcctccaaagcagccccaagaacactgaaggcagcacggtctcctgcactggctccatccgctataaaaccttgacagaccatgagcccagtgggatagtgagggttgaggctcacccagagaacaacaggcccatcatacagatcccgtccactgaaggtgaaggcagtggctcctggaagtggaaagcccctgaaaagggcagccttcgccaaacttacgagctcaacgatctcaacagggactcagaaagctgtgagtctctgaaagacagctttggttctggagatcgcaagagaagcaacattgatagcaatgagcatcaccaccacggaattaccaccatccgcgtcaccccagtagagggcagcgaaattggctcagagacgctgtccatttcttcttcccgcgactccaccctgcggagaaagggcaatatcattctaatccctgaaagaagcaacagccccgaaaacactagaaatatcttctacaaaggaacctcccccacacgggcttataaggattgagtgatgtccattccatcattagggctactcgcaagaagaccatatgttgattctacctgtgttctgttccagcgaattgggaagtctcaccaagctagattgtctaccatcagcccagaactctgtaacttttcagaactgctatactcaaacttgcagatctcacatcaaggagagggaaaagcacaatgcaagaacctaactaacgtgatgatatgaagagttttcttaagacctgtcgtcaaacttaaaaggttttgcagagggcagtatcaaaagaaagtggttttcttcaaatgtatactattttacttcctgaatgtgccaactttggggatctttctttatagtgagctgtgggaacccagaacacacacgttttccctacagcagaggccatgcagtattatatattcattttgcagaatctgcacctacagctcaatacgcgtggtgctgattattatagtacatataccatgttaaactcttcaaactctaattaggctgtgaaatagtggtgtgcaattccttgataaagaaatgctactttattaagaagatgctggctgctttgcgttagaataggacaccctgcagcttctctgtagaggctctgtcacagtcaaaaaatgaaagggtttcgtgcgtttcttactagactt

SEQ ID NO: 358829 - DNA, 701 bp, Homo Sapiens
  misc_feature (25)..(25): n is a, c, g, or t
  misc_feature (38)..(38): n is a, c, g, or t
  misc_feature (44)..(44): n is a, c, g, or t
  misc_feature (52)..(52): n is a, c, g, or t
  misc_feature (68)..(68): n is a, c, g, or t
  misc_feature (619)..(619): n is a, c, g, or t
accccccttttacaaggggcttggngaaaacccgaganttccgnctctctanagtggagtgtatcaanggaccagccactcattaaatggcacacggggttaaatggcagcagtttttataaggtattgagggcagttaagattacatctcacagtgttatttaggattctgcacctatattaaatttcagccaggaagaactattaacgcctggataaaactccacaaaatactagcttatatctaaaactctggacaaatttttagctgacacagatatagtaggcactattctgaaacaattattttctcaagtaatttttctttcaattataatgtagaactgttaagaccaattaactaataattgtgaacagttgataaggaaacaaaaaaagtataaatgtccagatttgttcatgaatatacaaactaaatacttacaaggtatgaactttaaataggagagatttttgtcctaaaactgtgatctagtccttgagtaaaaggataaatttataattattttaatggcaaaaattttaaagctattgttttctgcggtttaaaataaggtgtaactaaactaaatatgctttaaatatccttgaataactntgagatgttatatagtggtaaaccctgtccagtagtcagtaatcctcgtgccgaattcctgcagcccggggatcgcactaga

SEQ ID NO: 358830 - DNA, 1133 bp, Homo Sapiens
  misc_feature (195)..(203): n is a, c, g, or t
acaaagtgaactttttaattaaatccaagtacatcttcagaatgtttctggagttgaaaggcacagtgcaaatagaaattactacaatcaacaaaattgattttaaaaagtatttttagcacaaaaaagttttctttatatcatactaaattcagagcattacatcattcccagaatacctagtttgaagcttannnnnnnnnccattcacttgcaagctggattaagacattaactataataatatggaatgttcagcatttatgtttggtaaccagatgtatatggtttgtataaccatactttagaatttagttcagataaattggttttggtatactttgactacagaaagtgatttcaacataagatgtgatgaaggaagtctcccatgaaaaacttagtaaggatcaactgatgctatggacaaaacctaaaaaaagagatttgtagatgctttcaaggctttgactatgaaatatagaaaactggatgggcattcttactgaccggatgcttacaatttcaaatgaagaaactactagccactctaaaaattggattagggaaaaaagtgattttagaacagtcttccatttaaaaaatttttcactgaaaagaaaatatggaataatttaatatattcaatgtctgtgaaacacaaagtagaaagtaatcttttaaaaacatggaatacatatttatttctactttaaaatctccatttatatcttataagctttgaaatgcaagtacagctttaaagcatcataatgactaattataggtgaataataatacagacagtctatattctaggaggcagctgtaggcgttttaattggaaataagcattctgagataatgataatagcagtgtagaaaaatgaagttaaaaaaattcaaagtgttgagaatcctcctgtccttctgggatttttattttaatcatctcctccacagagaacaagcagtactttcctgtagtctccagatgtgtcacccttgatgaacgagtacagagactttccatagagtctcttgaagtgtgcccggatatccaacatgtcaatttctgctcgagaaaccatcactctgatgagggtgttatcatcggtgactactctggaaag

SEQ ID NO: 358831 - DNA, 897 bp, Homo Sapiens
cgatatttccttatgtaattgacattattttattttgtgtaacagtcatattaacatttatttgtcaatgacaagaattaggactgatgtttatgtatcatcatcaatgaagtcagatgtttacccattccatgtgagtactaaaacgtaaacagattttttacataaaggtgaagaaaaataacttttaacccacacaaaatttattctctggaaaattaaactgccattaaaatctcatcggaataataattttaactttttttacactgttttcacagaggtcagcaatttctgtatgtaatacaattatacaaaaggaaaaaggcaccgagacaatcggtgtatacatagtagaaaagtcgacatgagaataaaatgcaacacacagcacattttcaattatatgaaaacgattacatatatgctcactctataaaacagactgcttcacacacgcatgtttatatttttgaccaaaaatgtaaataaatgtgacaataatacaacactgttgataaccacacagacatgtgtttatactaataagatccattaatggtttagtcactagcaaatatgctggagacaattcaagaccaaggaaaaggttaatcagcagtgtatttcttcagttgtttgataagagttttgctcacggagcatttaaactttatcacactgttatatccattattagaaaaataagtacagaaagctctgtagaaactatattattaaggaagcttcttgcctgaaaaaatgagagaactaggaaggcaggagggagggaaggaagacaggacagcaagaaggaacgagacagagagtacggatattgattaagatcccttatgagctttccctaaaatttccttatttgagaataaatccatg

SEQ ID NO: 358832 - DNA, 380 bp, Homo Sapiens
  misc_feature (255)..(263): n is a, c, g, or t
tctcagaaaaacaaaaacaaagaaggtcctgcacgcacagactggctcataaatggcttcagggtacataaaccagcagaattcacagcaaagggattcacagtttgaaccaagaacatacttacacatgtgggctgctaccaaggtggcgcctctttttagaatagtaggagtagtgaactttgaatgtgattcaatttgagaacgagtgatttattatccactggaactatacagaactatgtgatagcaaannnnnnnnnaataagaaatttagaaaataagaaaaaatagggaactcttcggctaaagggtttctttatgcttgcctacaaggtggactgaatggacgtgctgccaatataaagacactagtgaag

SEQ ID NO: 358833 - DNA, 785 bp, Homo Sapiens
ggccgccgtgtgtaccttccagttagctactaggctggtggaatgcgctagctcacagtcagtgtcggtacgtcttcgtccgcccttaccctccttatcctgctccaggtagcggagagccgcctcccgccgcgcccccgccaccgaggcccgggtcagaggctagaggccgcccgcccctgcgcggccctttcccctgagcccgcggagcccgccgccccgggcctcggggcgacgatgctggagtccattcgcgtgacgggtgagtgccgggaagggctggccgcggcgggggtgcggggcggaccggggtcccgccgcccggggctcaggtaatggtagccaccggctgggcgcgccgctcgggactccaccctgcgccccgaccccttcggggcgcgcaggaggcgctcgcgaaaaacctgtggagggaagagagaaatcggccccttatcctttcgtcacttattatcagtaagtacctgctgtggaatctcgtggaaaagattggaatattagaccggttgctggtcttacaaaggtacaatccaaagattgttaaatcctatttcaataagctaagcgaaagaacacatctggatatttcattattaataccccggatatttgggtgtggatgcctttaatcttaaacagggagaccgcttgagttgtacttataatagggcattttaccagaccggttataccaaggggaaacattggcccttaacagaccccagggcagcagccttgacattacccgccgtcctttaaatcagtcg

SEQ ID NO: 358834 - DNA, 1296 bp, Homo Sapiens
  misc_feature (1036)..(1043): n is a, c, g, or t
  misc_feature (1047)..(1054): n is a, c, g, or t
  misc_feature (1056)..(1058): n is a, c, g, or t
  misc_feature (1060)..(1060): n is a, c, g, or t
  misc_feature (1068)..(1068): n is a, c, g, or t
  misc_feature (1070)..(1070): n is a, c, g, or t
  misc_feature (1074)..(1077): n is a, c, g, or t
  misc_feature (1084)..(1086): n is a, c, g, or t
  misc_feature (1108)..(1108): n is a, c, g, or t
  misc_feature (1113)..(1115): n is a, c, g, or t
  misc_feature (1120)..(1121): n is a, c, g, or t
  misc_feature (1130)..(1133): n is a, c, g, or t
  misc_feature (1151)..(1181): n is a, c, g, or t
aaataactcttctgggaagttggtttataagcctttgccaggtgtaactgttgtgaaatacccaccactaaagttttttaagttccatattttctccattttgccttcttatgtattttcaagattattctgtgcactttaaatttacttaacttaccataaatgcagtgtgacttttcccacacactggattgtgaggctcttaacttcttaaaagtataatggcatcttgtgaatcctataagcagtctttatgtctcttaacattcacacctactttttaaaaacaaatattattactatttttattattgtttgtcctttataaattttcttaaagattaagaaaatttaagaccccattgagttactgtaatgcaattcaactttgagttatcttttaaatatgtcttgtatagttcatattcatggctgaaacttgaccacactattgctgattgtatggctttcacctggacaccgtgtagaatgcttgattacttgtactcttcttatgctaatatgctctgggctggagaaatgaaatcctcaagccatcaggatttgctatttaagtggcttgacaactgggccaccaaagaacttgaacttcaccttttaggatttgagctgttctggaacacattgctgcactttggaaagtcaaaatcaagtgccagtggcgccctttccatagagaatttgcccagctttgctttaaaagatgtcttgttttttatatacacataatcaataggtccaatctgctctcaaggccttggtcctggtgggattccttcaccaattactttaattaaaaatggctgcaactgtaagaacccttgtctgatatatttgcaactatgctcccatttacaaatgtaccttctaatgctcagttgccaggttccaatgcaaaggtggcgtggactccctttgtgtgggtggggtttgtgggtagtggtgaaggaccgatatcagaaaaatgccttcaagtgtactaatttattaataaacattaggtggtttgttacannnnnnnnaaannnnnnnnannnanaaaaaaantnatannnnaaattannncctcccaaaaatttattttaanaaatnnnttttnnaatttgttnnnnccccctcggccccccctnnnnnnnnnnnnnnnnnnnnnnnnnnnnnnnggaaccccggggcccccaaaggggaaaggggaaacatggggcccaaagggggttctccccgggagaaaaccccgggggagtggagatgagggctcggggaaattccccccccttt

SEQ ID NO: 358835 - DNA, 2017 bp, Homo Sapiens
taaggatagtaactacaatcccaaatagactctgtagcagcaatgactctccaaaaccacagaggtctagacctcctcactgctgagaaaggaggactttgcaccttcttaggggaagactgctgcttttacactaaccagtcagggatactaagagatgccacccggtgtttacaggaaaaggcttctgaaatcaggcaacacctttcaaactcttataccaacctctggagtggggcctggcacgggtggcccagccgcgactgagacagcctccggagacgcttcccaccctgagaccaaagcacgggggcaccacagacgtgggggagccgctctggcctgagcccctaggggtggaacacttcttgcgggagatgggacagttttatgaggctgagagctgtcttgtggaggcagggaggctgccggcaggccagaggcgttttgcccacttcccaggcttggcctcggagctgctgctgacagggctgcctctggagctaatcgatgggagcacgctgagcatgcccgtccgctgggtcacagggctcctgaaggagctgcatgtccgactggagagacggtcaaggctggtggttctgtcaaccgtcggggtgccaggcacgggcaagtccacactcctcaacaccatgtttgggctgcggtttgccacagggaagagctgcggtcctcgaggggccttcatgcagctcatcacagtggctgagggcttcagccaggacctgggctgtgaccacatcctggtgatagactccgggggcttgataggtggggccttgacgtcagctggggacagatttgagctggaggcttccttggccactctgctcctgggactgagcaatgtcaccgtgatcagtctagctgaaaccaaggacattccagcagctattctgcatgcatttctgaggttagaaaaaacggggcacatgcccaactaccagtttgtataccagaaccttcatgatgtatctgttcccggccctaggcccagagacaagagacagctcctggatccacctggtgacctgagcagggctgcagcccagatggagaaacagggcgacggcttccgggcactggcaggcctggccttctgcgaccctgagaagcagcacatctggcacatcccaggcctgtggcacggagcacctcccatggccgcagtgagcttggcctacagtgaaaccatatttgaattgaagagatgcctactcgaaaacatcaagaacggcttgtcgaaccaaaacaaaagcatccagcagctcattgagctggtgagacggctgtgagtgtgcagagaaacccagttcaggtgtaggaggctgctgtgggcagccctgtctgatggggcacccgtgtggggctgtgctctggtgcctgagaatggctggtgcccaatcgacatgagaagacgaggaaaagacagggtttggagtctcctcaacagtgttgcccccagggtagggagacaagcagcagtttgttctgtctcagctcctgtcaaggatcctgcggggtgggccctctgtatagctgctctctgtcactggcccctggagtgggagcagcgtccttagtcactgcaggcccaggcgggcaggtggtcccaggacagaggtggggaagttgtcctgaggaagcagaagtaggccttgctcccgcccaacccaagggcctccagtggaccagcattcaagatgtgagtgcccgtggtgtgcaaggcactcccatggcaccgtatttattgactgatctgtgaaggcttccctgacccctgcccaggaagagttcactggtcgctctgttgtgccccacagcactttgttatacctctgccacacacttcacgcagcgcgttgtaactcatgtgtttacatgtctgtccccccagactgtgagctccttgagggcagggactgtacattctccagctctgtgtccccagggcctggcacattgtagacgcttaataaatgtctgttaaatgaaa

SEQ ID NO: 358836 - DNA, 1138 bp, Homo Sapiens
ccatctccgccacgcgcctcgcgtcgagtctctgacaagcgcaccgcagccgctcgctgggtcttcccaccggctcgacaatgggactctgagccgcgcctcgggacgtgtccagggccccgcgacaccctggggacctctgttatccaggccgcatttcctgtagggatagccgcagccactgcacctggaggtacagcgatccgcgatctctgcgtgggcagaatctgtcccaagtatgatctacaggtttggggaagacgctcaacgttttgagccctgggggaaggtaggtagctcgacctcctctgttaacctctttagagcagatctactggcctgctggtctgggaggccctggggttcttgtggcacgccctggtgttcttgtggcacaacctggggatagggtgtagtaggatgaggaatcataaaggtcctggctcctttgaatccccacccatggccatggaggcccttaccgcggcccgctggggttcagtggcaactgatgcctgtgctccaaatgtcatctcttgggtcgggtggccaatgcagaagcgctgagtatgggtggctaacagagctgaggagcggaaaaccatgtcacaggtcccacagggcaggagcgcaggctccccagagtgggagtccatgggatgggacccgtttcctgaaaccagccaagacctgcagaagggatcaagggcaggggaaaggcagaggaggatgaaagagacataaagccagaggcagagaggaaaggccgtgtctattaggtctgtgagatcttcaagtttgtttggggagagccttagctccctggacagcaaccacagggctgggcaggtcaggagaatgggtggggaaacctcggccgtttgggaggagccactggcttgaaaaagtgttacaaagtctgaacgtgggcaagtctctaattgtagcttggtttccctgactattaataaagaggaaaaagcagctgcctcctagactaggctgggcccttatcacttactacatcattggtcatttaatagcctctaaaaggcaagtgtcatctttttcattgctgtactcccaagtggatgtaacagtttgtaccattctccaatccagagaactacctggcctc

SEQ ID NO: 358837 - DNA, 847 bp, Homo Sapiens
  misc_feature (826)..(826): n is a, c, g, or t
gggcatgaaaaggttttatttaccagggacctcacggccaccgataatagtttctgagtttcggaatgagatatatgatgtaagacacagagctgcttatcatccagactttccaacagttctgacagctttagaaatagataatgcggttgtggcaaatagcctaattgacatgagaggcatagagacagtgctactaatcaaaaataattctgtagctcgtgcagtaatgcagtcccaaaagccacccaaaaattgtagagaagcttttactgctgatggtgatcaagtttttgcaggacgttattattcatctgagaatacaagacctaagttcctaagcagagatgtggattctgaaataagtgacttggagaatgaggttgaaaataagacggcccagatattaaatcttcagcaacatttatctgcccttgaaaaagatattaaacacaatgaggaacttcttaaaaggtgccaactacattataaagaactaaagatgaaaataagaaaaaatatttctgaaattcgggaacttgagaacatagaagaacaccagtctgtagatattgcaactttggaagatgaagctcaggaaaataaaagcaaaatgaaaatggttgaggaacatatggagcaacaaaaagaaaatatggagcatcttaaaagtctgaaaatagaagcagaaaataagtatgatgcacttaaattcaaaattaatcaactatcggagctagcagacccacttaaggatgaattaaaccttgctgattctgaagtggataaccaaaaacgagggaaacgacattatgaagaaaaacanaaagaacacttggatacctta

SEQ ID NO: 358838 - DNA, 603 bp, Homo Sapiens
  misc_feature (553)..(553): n is a, c, g, or t
cccccgggctgcaggctttgcacatggaggatacctagtaaagagcaagtagtctagtttcaagtgtagtatcttgtacggaaatgggagtagctaagcctggaaaggttgaatggggcataatcattaagactaggctaaaaattcgagactttattttttaggcattagggagccccttcccaagtgactatcttccttgaaactttgttttctttcaatgacatcacacgatactggttttattctggactatctatcctactcatgggtccaagggaaacttagtagagatgcgacttgcatggggctgtactcagacatgtggtcctaggtattataatgggattgaccccagattaacaggaagcattgttatcaaaggaagagttcaaactgagatagataagagaagcacaaagtaaaagatagaaaggtatgcaatgagagtagaagctgcagaagaggcgaggaaatagaatgtcagaacggtcatgaagagtgcgttaggactgagactgttagtaatgtaaggatagccaaggaatggctnttatgcacagtcagatgtgtatacagggagtaagcagacctgatataaat

SEQ ID NO: 358839 - DNA, 297 bp, Homo Sapiens
gtcaaaaataatggaatggagaggctggaaaattgagaagagcagaaagagaaaattctcgtaggtctattgaaaagaaagttgaataaggagtgatttcaagagctaaggctcacacagcaagcagctaagagggactgcaaaggcttttgacaccaaggtggcctcaagtgaagagcaagtcccatatggatcccactgtcactggagtctctgcatacagtttcggttggaataaactgggaaagaaaaatgttagggatgcatagggaaagtgctaagaggaagaaaggagct

SEQ ID NO: 358840 - DNA, 396 bp, Homo Sapiens
gggacatggctacagatactacattggaaagttgtctttaatcacacaggtgttaaactcaatataaatttacctaaaaacaattgctattaatagtacaaaagtcaagaaataacacaatagtgactataacctgtattcaaatccctactctgtcactacttgatctgggctgatatggtatggctctgtgtcctcacccaaatctaaccttgaattgtagcaatccccacgtgtcaagggtgggaccaggatggaggtaactggatcatgggggcggtttcctccatgctgttcctgtgatagtgagccggtctcatgagatctgaaggttttataagcgtctggcatttccactgcgggcagtcattttcatcctgccgccctgtgaaaaag

SEQ ID NO: 358841 - DNA, 2155 bp, Homo Sapiens
  misc_feature (1761)..(1832): n is a, c, g, or t
agcgggtccggcccggtcctgtcccgcagcgtcccgccagccagctccttgcacccttcgcggccgaggcgctccctggtgctccccgcgcagccatggctcagcacttctccctggccgcctgcgacgtggtcggattcgacctggaccacactctgtgtcgctacaacctgcccgagagcgccccgctcatttataatagctttgcccagttcctagttaaggagaaagggtacgataaggaattgctcaatgtgaccccagaggattgggatttctgttgcaaaggtttggcattggatctagaagatgggaacttccttaaacttgcaaataatggcactgttctcagggcaagccatggcaccaagatgatgactccagaggtgctggcagaggcatatggcaagaaagagtggaagcacttcttgtcggacactggaatggcttgccgctcaggaaagtattacttttacgacaactactttgacctgccaggagctcttctgtgtgccagggtggtggactatttaacaaaactgaacaatggtcaaaaaacatttgatttttggaaggatatagttgctgctatacaacacaattataaaatgtcagcttttaaggaaaactgtggaatatattttccagaaataaaaagagatccaggcagatatttacatagttgtcctgaatctgtgaaaaaatggcttcgacagctaaagaatgctgggaaaattcttctgttaattaccagttctcacagtgattactgtagacttctctgcgaatatattcttgggaatgattttacagacctttttgacattgtgattacaaatgcattgaagcctggtttcttctcccacttaccaagtcagagacctttccggacactcgagaatgatgaggagcaggaggcactgccatctctggataaacctggctggtactcccaagggaacgctgtccacctctatgaacttctgaagaaaatgactggcaaacctgaacccaaggttgtttattttggtgacagcatgcattcagatattttcccagctcgtcactatagtaattgggagacagtcctcatcctggaagaactcagaggggatgaaggcacgaggagtcagaggcctgaggagtcagagcctctagagaagaaaggagaatatgagggaccaaaagcaaaacctttaaatacttcatctaaaaaatggggctctttttttattgattcagttttgggactggaaaatacagaagactccttggtttatacatggtcttgtaagagaatcagtacttacagcactattgcaattccaagtattgaagcaatcgcagaattacctctggactacaaatttacaagattctcttcaagcaattcaaaaacagctggctactatccaaatcctccactggtcttatcaagtgatgagacactgatatccaaataagttgtctttactgaaaaatgaagtgaagacccatatatgcagttaaaaaaaagttaattttcaaaaaatactgtaaaagactttaaggaacaagttttattgaccaataagttgatatttgtccataggtctcctttctataaatcatcttgatgtttaacaactcttattatattaaaatctcagtatcctaaacttagaaccttattgatattttctatacagtagttttgtgattagaattcacctggggacacacactcacacgcacagtcactcttacacatatgcctagtcnnnnnnnnnnnnnnnnnnnnnnnnnnnnnnnnnnnnnnnnnnnnnnnnnnnnnnnnnnnnnnnnnnnnnnnntggcagggcccccacgccaaaccctgcctgaatcagaaagctcctgtagagtaaaggccaaccaatcctggggtttaacaagccccggtccagggggatttcttgaatttacaagtacaaactttgaggaccccactgggcctaggaagcactatcccttccaaaaaaacctggggccttaaaattggggtccgggggataaaatataagggctgcaagccggttgggctattccgtcaggaggaaaactgtttgaacgtgggcgcccgtgcggacaaacgctcccaacctcgacatattctggaaacaacgcgacgcggagg

SEQ ID NO: 358842 - DNA, 778 bp, Homo Sapiens
  misc_feature (107)..(107): n is a, c, g, or t
caaatttaatgtcaaagtaggtaggtcaggttggtgagtggttaagaagtaagaaagatacaggtctttatatcctggttaacaatccttagtatgtggtttgggcntaatggctaaaaggcgtgttccactacaagccccacatatgtgttcaagcctagaagaagctcagaggtccatagaatatgtctggttttatctcatcggcaagaactgtatgacatagctgtcccatgctacatggaagcctgggaaatgtagatctttggctgagttgattgccatttggaagcaatcaagtttctgttaataaggttgaagtggagagtggaccgtgggtggagagctagcagggtcagccacactgctgacggcacctgtgtgcggggtgtctcgtgaaggtggcacttagacccgaaggactgctgctcagaggatttgagtggatttggggtaaagcaatatatacagttactcagagaatcacagtctaaatttaaataacaaaatcctgcaattccaaaagcatgtagtaagcctcgatatgagcactgtcttttattactacctaatgtcagaaaatgtgcttattgaaagaggactaaagaaatgtctttggaattctttgcccaagttactgtttgttgatgttcttataaatctcataaaggattcacgcgtatttcatctaacacaagcaatcaattaacctcccttcctttttcctactcagacatgggcaaagtaagaatatacagttgactcctaaacaatacgg

SEQ ID NO: 358843 - DNA, 1035 bp, Homo Sapiens
  misc_feature (890)..(890): n is a, c, g, or t
  misc_feature (907)..(907): n is a, c, g, or t
gggtccggaattcccgggattggcgagtggatatctccggagcatttggataatgtgacagttggaatgcagtgatgtcgactctttgcccaccgccatctccagctgttgccaagacagagattgctttaagtggcaaatcacctttattagcagctacttttgcttactgggacaatattcttggtcctagagtaaggcacatttgggctccaaagacagaacaggtacttctcagtgatggagaaataacttttcttgccaaccacactctaaatggagaaatccttcgaaatgcagagagtggtgctatagatgtaaagttttttgtcttgtctgaaaagggagtgattattgtttcattaatctttgatggaaactggaatggggatcgcagcacatatggactatcaattatacttccacagacagaacttagtttctacctcccacttcatagagtgtgtgttgatagattaacacatataatccggaaaggaagaatatggatgcataaggaaagacaagaaaatgtccagaagattatcttagaaggcacagagagaatggaagatcagggtcagagtattattccaatgcttactggagaagtgattcctgtaatggaactgctttcatctatgaaatcacacagtgttcctgaagaaatagatatagctgatacagtactcaatgatgatgatattggtgacagctgtcatgaaggctttcttctcaatgccatcagctcacacttgcaaacctgtggctgttccgttgtagtaggtagcagtgcagagaaagtaaataagatagtcagaacattatgcctttttctgactccagcagagagaaaatgctccaggttatgtgaagcagaatcatcattntaatatggagtcagggnctctttgtacaaagccctgctaaagggattcaactgggaaagcctttgtggctggccttttccgggcaagatcatggtatggctcccattattcccacccacaccaccattaaaattgtgggaattgc

SEQ ID NO: 358844 - DNA, 488 bp, Homo Sapiens
  misc_feature (45)..(45): n is a, c, g, or t
ggttgccatggaagttatggcccctgaaaatcgtctccctccccntctcttgctgtaccagccatgcgttctctttttgtggttgctggctgggtactgtatttaatgaagtagagaatagcacttgcaaaaatacagtcttggtacctagagactgtcatgcagatagtataatttggtatatgtgctaatgcattgagtagaggattattttaacacactattttgcttttgtattttagttaaaataatcgatggggatgtgtagcccccccgtgtgaggatgacatcaccacatttctagtttcatggagctcaagatgtcttgtgtctgtgtggctagatggcctctgcttggtaatcttatttttaggcctaaaattcccacttaaatccaaagtaaaaatggttatactgaagcataaaccttgcctgtgtaattttaaaaaattaatagagctgtgcaaaccctgttatttttgtaaaaa

SEQ ID NO: 358845 - DNA, 594 bp, Homo Sapiens
gtgtttacaaaaataacagggtttgcacagctctattaattgttttaaaattacacaggcaaggtttatgcttcagtataaccatttttactttggatttaagtgggaattttaggcctaaaaataagattaccaagcagaggccatctagccacacagacacaagacatcttgagctccatgaaactagaaatgtggtgatgtcatcctcacacgggggggctacacatccccatcgattattttaactgcaagtctaaagtcctctttggtgagaacactgtacatccgctgaggcagagctttggagtagggagcagggcgcggcacagtggtgcgcaaaatgaattcccggccagcagggggtgggaagtctgacacggagttctgccttctttcctctggggagcccattctcttcaattcctcctctggtggagtcatagctgcagccctctgggcattcacaaacagcttgtgaatgatcctgccagcatgtcctcttcctgctccctactccaaagctctgcctcagcggatgtacagtgttctcaccaaagagactttagacttgcaggtgccctttcatcgatc

SEQ ID NO: 358846 - DNA, 1045 bp, Homo Sapiens
  misc_feature (68)..(68): n is a, c, g, or t
  misc_feature (141)..(141): n is a, c, g, or t
  misc_feature (570)..(582): n is a, c, g, or t
  misc_feature (906)..(906): n is a, c, g, or t
aaaattatcattgtttttattctgaaagctgtgcattactaatctatttttatgtaatctgaaatcangtatttatcccatatgtcaatttaaaggaaactctgactgtagtaaattcatgctaattgagaactctggganaggggttaaaacattacccaggtacaagtcgggtggccattataaacgttacccaaataaaagccagaaacaggaagccaaaaaccaggtccctaaggcaggcatgtgtcttaaatgatatcatttgtcaagcttccagcatcttgtggtggtgaacacaaaaagaaggtctgcgttgtactgaggacattacatcctcattagctggaatgttcctcaagtacataatgcaggattttcattttaataagaagcagctacttgtcactgcactttcattagataaacacagaatgtaatactaatgaccatttacagaggctctatcctactcctgaggaacttcatccagatgaaatcatataatgacaagttatagaatatatcatgcaaaacttccttcatttctttgcaaactattccctgaannnnnnnnnnnnnaatgctgaggtcagttaacagcagtagtcatcatcaaaggaacccctaaatgacactgctggtattttctgcctgcaaaacaggcttgaaggaatagcatttggctctttagaagtcataaccaaatggtaacagatcactgggactccttggtttctcaaagaggcaagctccttccaccctgcccggctggtgaccttaagcccgacatgcagagaagtccacgctgagaaataatttactcactgggattgttccaccctggccccttctctaaaaagactgacaattgccctgaattatggatgtactttttgtgatatngtatttacagttcagaagaaaggtgttgagaccatcgtaccgtttcacctcccattagaggctggtcttgaacaataatcccagaagatgaaactgatgctgaactatgaccctcaatttacaaatcatttttcaaaag

SEQ ID NO: 358847 - DNA, 533 bp, Homo Sapiens
  misc_feature (205)..(248): n is a, c, g, or t
  misc_feature (403)..(436): n is a, c, g, or t
ggatttgcaatggatagttgtacaacctggggactgtcagtgactcattggtatcagcatatgctaaagaagctcttgaatccaatcttgaaacctgatctcccttcgtcaacattccccaataccaaactggcccgtttacccatacaaatgcacagtaaagggaagaacagcggtatttttcctagccaactgactctatcannnnnnnnnnnnnnnnnnnnnnnnnnnnnnnnnnnnnnnnnnnnagagcaggggtgggagtggctgtaacttcacaatcctaatacagtaaatgttttgcatcttccatgttttatgcaaaaacagacatttaaatcaataaataattgtgccctagactgaaggttaatgtttaggagaggaaaaaaattgttggaannnnnnnnnnnnnnnnnnnnnnnnnnnnnnnnnnggaaaggaaggatacatatttttgttgtgtaatattttctatttttgaatgcattttattggtacaagactgtttttttggtgaagacattatttaa

SEQ ID NO: 358848 - DNA, 731 bp, Homo Sapiens
  misc_feature (69)..(69): n is a, c, g, or t
caatgtgctctactttaaagggtcatcctttaggcttttagagaaatgacaaagttccaactctgaaancaatgaagtacgccagagattaactcctgaaaatggatgaaaggggggcaaagtggtcattcagaatgtcctcccctctcttgggaagttaactgccactgtgctggtgcctggcaaaggcacctgagtgattctgggttctcaagtgaaagctgggagtcatccaaggaggaaggctacctatgtctctgctctgaagattggctctgaggggtcccgtagacctaagtgcacatggtcttcaggagaacattctttggccattagctgtacaccccaggccagttctggcttcctcttctctccctgcatattcagtaaagctgcaaactctttctagtttcagtgaggcaaattccagtctctcgtcttcaactttattttattccaacttcatttcccaacaatacagactcactgctctgtgtataccagcctagacagctgagtaatcagaatcctttcctatcagctcactgagagttttactgaagtcatagttaaaagggcaacacttatttccaacaggagtcaaatgaaattgtcctaaaatactaacagtcacaggtaatgacataaaatagcagataaattgaggaaaaatatttgtgattcatgaagaattatttaaatagcagtttctctgccaaatttcttcatag

SEQ ID NO: 358849 - DNA, 690 bp, Homo Sapiens
  misc_feature (444)..(444): n is a, c, g, or t
  misc_feature (451)..(558): n is a, c, g, or t
  misc_feature (605)..(605): n is a, c, g, or t
  misc_feature (641)..(641): n is a, c, g, or t
cggcacgagcagggaggcaatctctgaagggcaggctgtttttttccatgttctcatcgggaaggagagaagaaaaagcagtcagcacttcctctctgcagcccttcctctgggggcttctcatcccccttcacagcagcagagccccatggtgcagtttgctgtgcttgcctaatatcagtcagcgaagtagagtttgatgagttcagtcaacaaaaagtagccgataagggcttctgggcacccctccgagaatgcctgaggagccttttcaaggatggactggtatggcaaaaggacggagatttgggaagccttggcacttgttctcaaatatccaaagggctgtcttgaggcaggctagttctatgtggactccatggcgtggaggagggatggcagggactagtctaaggaaatacgcagaaaggcacagaagcttangttccannnnnnnnnnnnnnnnnnnnnnnnnnnnnnnnnnnnnnnnnnnnnnnnnnnnnnnnnnnnnnnnnnnnnnnnnnnnnnnnnnnnnnnnnnnnnnnnnnnnnnnnnnnntgcccagtgtaccatattcaaaggttattgtgaggaacttgagaggngacttatataaagccctaaattgtggctaggacttntgcttataataacattatggggaaagtccacatgctttaaacctatgag

SEQ ID NO: 358850 - DNA, 269 bp, Homo Sapiens
aaaaatttttgaaagttaagtgcagaatacagtacaccgtgagagagatattccagggcgggctgctcataagagtgagacagcgtggattgtcgctggagaaacccccttatgggagttttacattattattagtaaggaggggggaagaggagctgctagtaagcctgttctgagtggtcttctgggtgcacatgtgcagtagctgtacatgcttattcatattttgcatgtctcattagcatcttagacctctagcctgggagact

SEQ ID NO: 358851 - DNA, 497 bp, Homo Sapiens
  misc_feature (24)..(24): n is a, c, g, or t
  misc_feature (34)..(34): n is a, c, g, or t
  misc_feature (82)..(82): n is a, c, g, or t
gaaatctagagagtaagggtaacngatttacatngaataacagcctcagtatttttggttcctctccagtaaagatcacaangaatattgctaaatcgctaaaacacctttgcaataacgtaagggcttacaactatatacccaatgtagctcagttactaaactggagtaaactaatttctcttgtgtagaaaaattggttggctgtggttttatagcagatctgcaattattaatagttatgccaataatcgtttaacagtgcatatgttaatatatatggaaagacaatgtgtatagacagatgtgtaaaattgaaaaataaacatataacaagagagaaacatctatcgaacagacaatatacatacacatcaaacacaacagcagttttagtgaccataatatttatttctcatttttacattgcttactttagtgacaactgaaaatgacagttggcaatgcagctaacagtttcaataaaagtataaaac

SEQ ID NO: 358852 - DNA, 802 bp, Homo Sapiens
ggaatacaaaaaccacattttaccatttgtattaaacacagaaacgagctcgattttttaaaaacagatttatccattttttcaatatccctgagctgaacattaacaaatgacatgagtgaactctcatatacaatattatacattatttgtcatttttctaattaagcacaggggagtttatagttctgatgtctttgacattttccctggaacataccaaaccctagaaatgtttccaagaacacctggaatttggttactccactgccatgtgaccgaccacattcatgctggaatggaaaccacttacaccgttctacaaaatgaagacaccaaatctggctgaatgaaataaattggtgataagtggaaaaaagagaaaaaccaatgattcataacaatgtatgtgaaagtgtaaaatagaatgttactttggaatgactataaacattaaaagaagactggaagcatacaactttgtacatttgtgggggaaaactattaattttttgcaaatggaaagatcaacagactatataatgatacatgactgacacttgtacactaggtaataaaactgattcatacagtctaatgatatcaccgctgttagggttttataaaactgcatttaaaaaaagatctatgaccagatattctcctgggtgctcctcaaaggaacactattaaggttcattgaaatgttttcaatcattgccttcccattgatccttctaacatgctgttgacatcacacctaatattcagagggaatgggcaaggtttgagggaaggaaat

SEQ ID NO: 358853 - DNA, 480 bp, Homo Sapiens
ggttgtggttgtcaggaggctgcctccttagacaatctcccagatgtactgtgatgtgagtttgaaaaagagttccctgaagtacccacatctgggagacatgcccactagctgagcttccccaaaagtccaccaagagctgaggaatggtatcttcatccttaccacaaagcaccttaaaaaaagaatctgcttcttcaatcccaattttgctgttcttctgcaagcccagaactgaagccacaagcaatccaggctgagtctccttcaagtgaagtcgcaagctcagttggaacaatctgtcccttcctctgttgaatcaacagccgaggttccaaaatgaagccacacaccaacttcatctctgaatggcttttcatttcatttctgtacacgtcaagatctcccattttcagtgccactgctgccttgctcagtgtcactaagatggatgaaaacccagaagtatccatcttcttt

SEQ ID NO: 358854 - DNA, 685 bp, Homo Sapiens
  misc_feature (23)..(23): n is a, c, g, or t
  misc_feature (165)..(165): n is a, c, g, or t
  misc_feature (168)..(168): n is a, c, g, or t
  misc_feature (173)..(173): n is a, c, g, or t
  misc_feature (182)..(182): n is a, c, g, or t
  misc_feature (410)..(410): n is a, c, g, or t
ccaaaccctagaaatgtttccangaacacctggaatttggttactccactgccatgtgaccgaccacattcatgctggaatggaaaccacttacaccgttctacaaaatgaagcatcttctgagactcacaggagaatatggaatgtgatctacccaatcacagncanagtgngattatttnattccaaatatctaccaaggaatgaccaggagaataagatcctccgatgttcgcaatggtgtggtgtcaggaggctgcctcttagacaatctccagatgtactgtgatgtgagtttgaaaaagagttcctgaagtaccacatctgggagacatgccactagctgagcttcccaaaagtctaccaagagctgaggaattgtatcttcatccctagcacaaagcaccttnaaaaacagtaaaaggagccctctatattccagataaatatagcactgataaagcgacagctgggctgaatatcacagcatcacatgggccacgcaatcaataatttaccgattagcattagcgccatggcaaaagcaaatttagacatttttaaaaggaaacagattctaggatgtacaaataaagtttctacagatatagtcttttaattagtacttttatcttataaactgattatgtatgtctgttttttcaataaacaaacaaatgaaaaa

SEQ ID NO: 358855 - DNA, 595 bp, Homo Sapiens
cagtggaataaagcagggaatcaactccaaagggaactcctaaagctatacacatacatggaaattagacaatctgctcgtgaatgatttgtggactaagaatgaaatcaagatgagaatgtacaacttcttcaagatgattgactatagtgtcataagttatcaatctctgtggtgtacagcaagagcagtgctaagaggatagttaatagtgctaagtacctacatcagaaagtctgaaaaatcagaaattgaaaacctaatgtcatacctcaaggaactagagaaacatgaacaaacaaaatccaaagtgagactttatatcatttgagattactataaagacttctatgcacataaactagaaagtctaaagaaaatagatacattcttggaaagacacaaccctcctagcttgaatcaggaagaagcaaaaatcctgaacagccagtaacaagcaatgaggttaaatcagtataaaaaatgccaacaataaagaccagggccagatgaattccagccaaattctaccagacattcaaataagaattggtaccaatcctactgaaactattccaaaagactgagaaagagg

SEQ ID NO: 358856 - DNA, 1056 bp, Homo Sapiens
ggctggtaccggtccggaattcccgggatagttgcagcttcaccctcgcagactcggcttagcgagcgagtcggtgcttccgcggatcaaaattattagccgttttattagagcccattaaacgttgcataaacatggttcagagctgcctgggagaagaaaagccaaaggatgccaccctctcgatttatcccaccctcgggagtctgaaagccgacgccaggagaaatcccgcgaaggccgcccgggatcctggtagaggcgacgctgtgtgcgtttatggagcgcttgcggtgcgtggcactaggctgggtgtggtgggtgctgccgaaaaaagggttcctcccatccatttgcacgtcacccttcccacctcctgcccagatggacagaagtgaggacattcatcggccgcattttactaatggcaaggagatagcgactgaagggcaagaacctagggtttcctgtctttgatatttcttcatctttgaggtaagtacacctgggacagtcccttccttcctcctcagggctcatgctttcttgcctatccctgtaattaatatgatctggctatctttgtctttgttccgaaacttcagctgcaaatgaaagtgtaagttaggtctgagtctgcactatagacctagctatcctagggtaaagggggataaaataggaatcaagaaagcctggcccgcttggggctcccagctcaagtgcattctgccaaaccagtttatattaggccttccatgtggggtggctatccttttatcaagatcccccccaaggggggaaggaggattatttaagtcccctttattaaaactcccccttcaaacccccttttctctggcttaaaaggggaatgtggaaatgttggtagttaaaaaagaaccggaatccccccaccccaaaagggccctttacgggctaactcatgggtttttttaaacccttccggggtccttttaacccctaacttccccctaataaagggacccggccattcatttttaatcctaactggccttaaagggggatacctag

SEQ ID NO: 358857 - DNA, 536 bp, Homo Sapiens
gtttaccttctggtaaaatacatcgaaaagtgaaaataatattaggacgaaatagaaaagaaaatctggaaccaaatgctgaatttgataaaagaactgaatttattacacaagaagaaaacagaatttgtagttcaccggtacagtctttactagacttgtttcagactagtgaagagaaatcagaatttttgggtttcacaagctacacagaaaagagtggtatatgcaatgttttagatatttgggaagaggaaaattcagataatctgttaacagcgtttttctcgtccccttcaacttctacatttactggcttttagaatttaaaaaatgcatacttttcagaagtgataaggatcatattcttgaaatttttataaatatgtatggaaattcttaggatttttttaccagctttgtttacagacccaaatgtaaatattaaaaataaatatttgcaattttctacagaattgaatacctgttaaagaaaaattacagaataaacttgtgactggtcttgttttacatta

SEQ ID NO: 358858 - DNA, 759 bp, Homo Sapiens
ggggcagctgtgactgtcgctgcagacggaaactgactggggtcaattcaagtcatgcaggctgtgagaaacgcggggtcgcggttcctgcggtcctggacttggccccagacagccggcaggtcgtggccagaacgccggccgggaccatctgcacaggcgctcgacagctccaagacgctgcggccaagcagaaagttgaacagaacgcggctcccagccacaccaagttcagcatttaccctcccattccaggagaggagagctctctgaggtgggcaggaaagaaatttgaggagatcccaattgcacacattaaagcatcccacaacaacacacagatccaggtagtctctgctagtaatgagccccttgcctttgcttcctgtggcacagagggatttcggaatgccaagaagggcacaggcatcgcagcacagacagcaggcatagccgcagcggcgagagctaaacaaaagggcgtgatccacatccgagttgtggtgaaaggcctggggccaggacgcttgtctgccatgcacggactgatcatgggcggcccggaagtgatctcaatcacagacaacaccccaatcccacacaacggctgccgccccaggaaggctcggaagctgtgatgggaaggaggcctgcacttggacctgacctcaagcctcagctccaggggggaccttgttaaaatgctcccctgtcagagctctccagaaatatgctttggttgggagatccttcaggcaa

SEQ ID NO: 358859 - DNA, 1038 bp, Homo Sapiens
gggggcaaacaaacctacgggctaggtacgaggccgggtggcgaattcggcacgagggagaaacgcggggtcgcggttcctgcggtcctggacttggccccagacagccggcagggtcgtggccagaacgccggccgggaccatctgcacaggcgctcgacagctccaagacgctgcggccaagcagaaagttgaacagaacgcggctcccagccacaccaagttcagcatttaccctcccattccaggagaggagagctctctgaggtgggcaggaaagaaatttgaggagatcccaattgcacacattaaagcatcccacaacaacacacagatccaggtagtctctgctagtaatgagccccttgcctttgcttcctgtggcacagagggatttcggaatgccaagaagggcacaggcatcgcagcacagacagcaggcatagccgcagcggcgagagctaaacaaaagggcgtgatccacatccgagttgtggtgaaaggcctggggccaggacgcttgtctgccatgcacggactgatcatgggcggcctggaagtgatctcaatcacagacaacaccccaatcccacacaacggctgccgccccaggaaggctcggaagctgtgatgggaaggaggcctgcacttggacctgacctcaagcctcagctccagtgggaccttgtaaaatgctccctgtcagagctctccagaatatgcttgttggagatccttcaggcagtaagggagagttttgcctccttacacagtggcctttgcttgcacctccagctggagatgggtgtgccccagaagtaagctttgcatctcttacaagaggggagctacaggggcagccgtggcctaggcccaaactctgctctgagaaaataaatatctgtaccacctgtcataattttgagattttttgctttcagagttacgtaattcctaattcctcttgaaaaagagagtgtgaaatgaggtgaggcctcagatgaaagtaaaatataaatgtgagttgctatttaccag

SEQ ID NO: 358860 - DNA, 577 bp, Homo Sapiens
ggcagcgggtgcagccaggtgtctgcagagcagccacaaaggtggcctaggatgcgggtgtctccccaggtgagtccatccacacacgtttgaaaaacactattagtctttctaacacactgagggaaagattaaaatctgtggaataaaggaggagattttatttacagatttttttaaaagccacctgggttgacaccttcctacttatccactagatgtcatcagaggtgctgttccgtggttctgcattaacccctgcctcatgtctgtaacatgtgacagtaattccagctcggtccctccaggcaaaggagaaacgggacttacttcacaggacagaggattgacagaagtcagtttaagataagtgtttgaatcagatttcagaacatctcattcatttcttagatttgtgttcacaattgtgttctctaaaatgtgtctaaattttaaaaatatgtacatgcataatgtcattttaaaatctgaaggaaagaatttgaagtccacaaaaagtgtttgaggttctttggttttgttagtaaaagccagttctgtggtgatgaccaaaaaa

SEQ ID NO: 358861 - DNA, 637 bp, Homo Sapiens
gtccaagggctgctgatgtcccccggccctttggatcatctcttgtgcagctgaaaccctggcttaggggaagaggaaccgcctgggaggggctgggggagatcctgggttcccctctggcactaaccaatgtggccaccagagggcgcaaggtggcagagcctggacttggccaggatgctctctgctgggttggggccaacaccaggaaggaagcatgggccatagggaagctcccattggtgctggggcaacccgcagcagctctgcgtcttctgctcttctgatgggaactgcaggcctctcccctggccccagagagtcgggcttctgggcccagccgctgtctgtcatgcctgcactcaggcagctggaggggtgggaggggagatggctcctggccttggccatggctgctttgccttccaccattcctgctcctcttccatgtggccccctgacttggttgtgtgagcactccagtcctggcagagcctgacaggcactccctgaggttggggtatcccttggctctgtcctggggttgaggtccaggacctggcacggctgtgagaaggaccttgggctggagctgtggactcggtgctttattcgttctaagatgacagtcattcac

SEQ ID NO: 358862 - DNA, 800 bp, Homo Sapiens
  misc_feature (586)..(586): n is a, c, g, or t
  misc_feature (607)..(607): n is a, c, g, or t
  misc_feature (754)..(754): n is a, c, g, or t
  misc_feature (756)..(756): n is a, c, g, or t
ggaggctacctggaaacatgttctccattggctgtctcaccaatgctacccctataatgtttctgaataactgttttccaggaggtataaaccagtggagtttatcattgaatagagtgcagagaaaggaccgcaagaaagctgatcacctcagcaatgaatgatttcaatacgatttcacccaaatggtctcacacaccagcctagtaaaccagagataaggtgtaatgtcatccttccttccttctccctgcctcaactgtcaaagattgacaacttacatgttgtttactttttggcttctatttctgttcataattattatcagaaggcatagcacccacaagcctaatcatactgccttacaaccttattcctcttcattttgtcttctcacttacctgcagaaacccagtttatttttgttctccctttaccacaccagccttgtaactgttatgaatgaccctcaatctcactggaatctgaatcactcaggaattcaagcaaactggatgttttaaccactgttcagctttcttatggaatgacagagaacttgtaaagataaaacaccagtttgcangaagaaaggaagagaatgganattgcttctggaaaatactagttttacaatatgttttgtttgtctgctctcctaaaataaacttaatcctataaacattttttaagaactaagcatttaagactggttaagttctcaattataaaagaaataaaaatgttttaaggnanggatttattttgccctttgccttatattgacctgcaatattttt

SEQ ID NO: 358863 - DNA, 823 bp, Homo Sapiens
  misc_feature (15)..(15): n is a, c, g, or t
tggaatcaactgaantagggaccctaattaaatacaaaacctgtataggttgcatccaacatgcccagttactcagctaacactagtcctggtttccttaactaacagtatagaaaagtcacattcaacagtggtactttatatgttccttaacaattccatataatgttgaaatggaggaggaaaggcttagtaaaacatcccaggaatcctttctacaaactacattgctataaactcaagcatagttttgcctgtaatatgcataatgttctacctcttgggttttaaagtaggcaagagatcagaaacagaaacaaccttgacaaagaccttcaaatgctcatggtgtgtatattcaggcctttgtgtataaacacacaccatcatgtatgtacaaatatacacatgctcctcaagttacaagagggttatgtctcagtaaacccatcaattgtaagttgaaaatatcataagtcaaaacaattatgggacataaccccattgtaagttgtaggaatgtatcaaatgtatatcactttcatatcatcgtaagtttgaaaactcttaagttgaaccatccaaattcggggatcgtctgtgtatataaacacacggagaaccacctaactgttcactaaacataaccaattccatttagagaacaaggacatacaattatacacggcagcaaagtatacacatcccagcctttggcctagtgcagtggttctcaaacatttttccattatggtacataaggtagatgccacatcacatgtgtaaaacactcccatggtgcagcagattttgatacaactcc

SEQ ID NO: 358864 - DNA, 604 bp, Homo Sapiens
  misc_feature (60)..(60): n is a, c, g, or t
ataaaatcaatttggactcctggggttccctggcaactttctcacatatgggatctattnttaaagacatatggccataaatgtcccaaaaaatacccaggtagagatgaaaacaaacatgtacatatatataaaacacacacacaaacatgttcatgtacatacagtatgcactcccttctctgtgttttttgtctgagttgatgatttggagctcaaagagctagcggagggaaaagctgaagccattcaaacacataatgagaattggagatgtaaaagaaggctgagttctaggagttgcaacaacttaggagataacagaaccaattcggaatgagcaggaattgtaggaatgcaggcgaggactagaagaatcagctacatgctgtttactggcaaagcaggagaaatgtgactgaggacagtatgccactgaaaactgatgaaagaggagggagacaggaggacagggctcttgtgggtagcaggaagacagaatggaaataaaccatgttaacaagatggcttttggcagcagcagcagcaccaggccagctgtctctctcctccaattcaagttaccaccacaaaacccatttgc

SEQ ID NO: 358865 - DNA, 2495 bp, Homo Sapiens
  misc_feature (328)..(355): n is a, c, g, or t
  misc_feature (2034)..(2087): n is a, c, g, or t
gcggccgcggccggggcctccatgatccaccccaacgtgccggccatcatgatcacgcccatctgcccccactcgctgtccttccggcccatcgtggtccccgcaggggtcgagctgaagatcatgctgtcacctgaagcaaggaacacagcatgggtgtcctttgatggacggaagagacaagagatccgccatggagacagcatcagcatcactacctcatgctacccgctcccctccatctgtgtgcgggaccccgtgagcgactggtttgagagcctcgcccagtgcctgcattggaacgtccggaagaagcaagcccacttcnnnnnnnnnnnnnnnnnnnnnnnnnnnngctaggtcaagcccctatccaggcccgaatccttccgctgccctccaagcgccctctggggacagaccaatctgcgtgtgtctgtgaccgcctgtctcagtggcacggccacttcctttctgtagctgggttagagcctgggtctgccttttgtccagatcagctgtttttttaaaatctctgactttttttgcatttctaaagaagcgtgagaaatgggctgggagtgcttctgtcctgctgacaccccgcggtgggtccctggagcgcggcctccagctgccgcaatttccatgccaggatatttttccgcaaatcagtcggttgaaattcagaggagtcagaatgactcgacctgtccttcaatgttgataataaatgtctcagccaaaaaccttccttgagctgccatgcttttccccttgacctgcacctcttcccctaaaatttctgcagggaagcccctggcgcaggcgccatttgaaaagcatggtcttgccagtggctggcaaggcggttttgttctgctcagtttctggagagggttggatgcgtcccctgccatccagccctccccgcttgaggccagcactgagtctgggacactcagcgggaagggggctggcatcgccagcgacccacacattcctcacgtagcttctgctcccaggaaggtagtttaaatcctgtatatactttttagagactcttttaaactttctgaagtgctgatgtacatactttctcgtacacacttttgtgaagatttcaaggggaagggagttgtctgccattcaatgtttacatttatgttctgcaagacgctgtcctcagggaccattaggggaccattctgttcagtgcgatcctgatggtccgggagatgagggtttccggggctagtgatcgtgatcccttttatttgcaactgtaatgagaatttttcacactaacacagcgagggactcaacacgctgattctcctcctgcctctcccgtgagtctccagcctgcccagcaccagcagctgtggagcacgtggatgctgcctaccccggcgcccgcgtcttccacgggcacaggtgtgtggaggccgtggtcggaccctggtgtcctggttactgctgcccgggtgtcttttttttgagtaactgctctctgagttttgcacacgaagttgccctcatctgctggagatcgataaggaaggcacaagacgttctcctctgcccgtgaggagcttcccgcagccgcctggcccagcctgggcacgttctccgaggcatgtgtctccctgctcaccctcgtctgggcacctcagcatctgtggacttgagcgtccaaaaaccctgagtgtgattctgggcagccggcctggcttgaagtccgccatgaccctgggcacaggggaagcccagccgtgggcttaggagagagggaccagcgcccagcgttagggctggaagacggcagtgttcagaattccagccgctcatctgaacacagaaggtgtgaactgacctctaaagcagcgtgagatgggaatgatctagaaaactttggatttttgaagtaaattttaatgtttcatattaatttcttgaaaatgtattaaatgtcattgaaagccttattacgcttttcagatcctttcaataaacaagacttgtagaacaatnnnnnnnnnnnnnnnnnnnnnnnnnnnnnnnnnnnnnnnnnnnnnnnnnnnnnngggggggcacacactagataggaatatactccacatgagggaggcaaccacaaagatataatacgagtcacataccaagagaaatgatgtccggtcaacacaagggcgtgtcccacacaaaataacagtggcgcgcgctcatatatagaacgttgcagcagcaaggtacgacacaaacaaatatactagaagcagtgaggataggagtagatgggcggacaaacagccctcgacgtgacatgatgagaggagcacaactctctcggggaagaaagggagacgcctgtgtatatactctcaggggaggggaggagtgaacaacacacattagtggtgcgagaaaaatacttgcactgacagcgaaggagatagtcaaacgggccctccagagggggggagaataagaag

SEQ ID NO: 358866 - DNA, 598 bp, Homo Sapiens
aatggcaagggaacatgggaactatcatgtggcaatgtagtgagtgttaaactttgtgtttgtccaaatcctgatttatttttcagttcatatctttctgggcttgacatggctgatggtgtagctgaaaccctcctaacactaaaagccatttaatcttttctgtaataggagcagaaaatagttaatcatccacctagtaatataagattactgtgaatattatcttctatacattaaaacagttctagtttgtagaataataccatacaagttttatttttaaattctagttattttcagtgcttacttaaatgtaattctagaattcctccacaacttttaatattttgtatgccagtgattctcaagataaatcatgattgtagtagttgttactgttggcagtttgtagtagtattcaggtattttggggatgggggaaaacaccaaaaatcagtgtcttttatctggtgatcactgtggtatctacagtattctagtctcctgcacaaaaactgaacccactgggcctatgcatccctcacactttttttctagtataaaagcaatacataatggtgtgtagaacaattaa

SEQ ID NO: 358867 - DNA, 637 bp, Homo Sapiens
  misc_feature (23)..(23): n is a, c, g, or t
  misc_feature (61)..(61): n is a, c, g, or t
  misc_feature (82)..(82): n is a, c, g, or t
tctcagactgtccgcaatatgcngacacataaaataatatttaaacatatccttaaaaganggataaaagaatttttttcangtgaccccagattctgttatcagtagatacaaaattaatttcattcctattaggatggaaactggtatgctgctgtggccatagatattctgagaaacctcttaagccagtgaaccaaaaaccatatgaaagaaagtaatactttctatgattggtcaactggctgttcaaaaattcaacaagcaaacaaacatgcaaacatgtgacatatgtcattattttgtaaaaacataatgccactctggccccaggaatcactacagcccagctggtccttaaaggtgcaaacagcctttaattgctactaaacatcttctctggtattttactgcccatcacacttgccacatgattctcagaagcttaggcttccaagatgtttaaggaaaataaacagggtgtgatgtggatcaagttttcagtgattgttttaagtgtcattttaaaaagaacttcctagtaatgaagtatgtaatagtccttgatattaaattttttctagtgaaataaactatgctttaataagacaatgttgctcctcgtgccgaatcctgc

SEQ ID NO: 358868 - DNA, 431 bp, Homo Sapiens
  misc_feature (53)..(53): n is a, c, g, or t
ttccaatcccctattaggatggaaaactgggtatgcctgcctgtggcccatangataatcctgagaaaacctccttaagcccagtgaacccaaaaaacccatatgaaaagaaagtaaatactttcctatgattggtccaactggctgttccaaaaattcaacaagcaaacaaacatgcaaacatgtgacatatgtcattattttgtaaaaacataatgccactctggccccaggaatcactacagcccagctggtccttaaaggtgcaaacagcctttaattgctactaaacatcttctctggtattttactgcccatcacacttgccacatgattctcagaagcttaggcttccaagatgtttaaggaaaataaacagggtgtgatgtggatcaagttttcagtgattgttttaagtgtcattttaaaaa

SEQ ID NO: 358869 - DNA, 994 bp, Homo Sapiens
cggtccggaattcctccgatcacgggccagccccgctgcgcgctctgctcttcgcagctccccggacccgcagccatggccgacatcaagacgggcatcttcgccaagaacgtccagaagcgactcaaccgcgcgcaggaaaaggtcctccaaaagctggggaaagctgatgagacaaaagacgaacagttcgaagaatatgtccagaacttcaaacggcaagaagcagagggtaccagacttcagcgagaactccgaggatatttagcagcaatcaaaggcatgcaggaggcctccatgaagctcacagagtcgctgcatgaagtctatgagcctgactggtatgggcgggaagatgtgaaaatggttggtgagaaatgtgatgtgctgtgggaagacttccatcaaaaactcgtggatgggtccttgctaacactggatacctacctggggcaatttcctgacataaagaatcgcatcgccaagcgcagcaggaagctagtggactatgacagtgcccgccaccatctggaagctctgcagagctccaagaggaaggatgagagtcgaatctctaaggcagaagaagaatttcagaaagcacagaaagtgtttgaagagtttaacgttgacttacaagaagagttaccatcattatggtcaagacgagttggattttatgttaatactttcaaaaacgtctccagccttgaagccaagtttcataaggaaattgcggtgctttgccacaaactgtatggaagtgatgacaaaactgggtgaccaggcacgccgacaaggccttcaccatccaaggagcgcccagtgattcgggtcctctccccattgcaaagacaccatcacccgcctgaggagcccttcacccccttcccgagcccgacagccaagtcccaattcctacctttaccacctggggttttcccgaaccaagaacggccctcgggtcacctttccccgaacaagggaaaggggc

SEQ ID NO: 358870 - DNA, 838 bp, Homo Sapiens
  misc_feature (785)..(785): n is a, c, g, or t
  misc_feature (803)..(803): n is a, c, g, or t
cacgtcaccggcacgggagcgagctgttctgctctcccgctctggactggagcaaagcttcccccaccctggagtgcccacagtagccaacacattgctttgcctgctacagatgctcaagtgatagttgtggagtgaaattatataagctcctcgcatgcagggcctgaggcattgctgagtccttcgtttgaacacactgcaggctcagaagaaaacctttccatgctttacatattgcacagccatgaccaacccctgcacatgctccagcctcacatgttctgccacagacaaggtagagccgagctcggctctaccttgtctaatgaatagagaaaactaaactggaagaggctctcaacttggcaatggagttccacaattctctccaagacttcatcaactggcttactcaggctgaacagaccctaaatctagcttctcggccaacgtctcatcgtggacacagtccttatttcaaattgacgaacacaaggtttttgccaatgaagtaaattctcatcgtgagcagataatagagctggacaaaactggaacccacctaaaatattttagtcagaaacaagatgttgttctaatcaagaatctacttatcagtgtacaaagtcgatgggaaaaagtggttcaacggttggtagagagaggaagatctttggatgatgcaaggaagagagccaagcagttccatgaagcttggagtaaacttatggagtggctagaagagtcagaaaagtctttggattctgaactggaaatcgcanatgatccagacaaaatanaaacacaacttgcacaacataaggagtttcagaaa

SEQ ID NO: 358871 - DNA, 141 bp, Homo Sapiens
atttgcgatttccagttcagaatccaaagacttttctgactcttctagccactccataagtttactccaagcttcatggaactgcttggcgatgcgattctttatgtcaggaaattgcaccaggtaggtatcctgtgttag

SEQ ID NO: 358872 - DNA, 1190 bp, Homo Sapiens
  misc_feature (1110)..(1110): n is a, c, g, or t
cggtccggaattcccgggatgcggccgccatgaagctgacgcggaagatggttctgacccgggccaaggcctcggagctgcacagcgtgcgcaagctcaactgctggggcagccgcctcacagatatctccatttgccaggagatgcccagcctggaggtgatcacgctcagtgtcaacagcatctccaccctggagcctgtgagccggtgccagcgcctgagtgagctgtacctgcggaggaaccgcatccccagcctggctgagctcttctacctgaaggggctgccgcgtctgcgggtgctgtggctggccgagaacccgtgctgcggcaccagcccccaccgctaccgcatgaccgtgctgcgcaccctgccgcgcctacagaagctggacaaccaggctgtgacggaggaggagctgtcccgtgcactgagtgagggagaggagatcactgcggccccagagagagagggcacaggccacggcggccccaagctatgctgcacactgagctccctcagctccgctgctgagactggccgggacccgctggacagcgaggaggaggcaaccggcgcccaggatgaacgtggcctgaagccgccttcccggggccagtttccttccctctcagccagggatgcctcgagcagccacaggggcaggaacgtcctgactgccatcctgctgctgctgcgggagctggatgcagaggggctggaggccgtgcagcagactgtgggcagccggctgcaggccctgcgtggggaagaggtgcaggagcacgccgagtgaccgcaggacctgaacgccgctccagcctccacggggaccccagcgtcttccccagcccccgggagctggagggtggctgccatggccgcagccccggccccacacaaaagcctccccggtttgccacatcggccgagggcaggagtgggtgttaggtactggctaaccggggcggtggagatgcctgtctacaccagtcctgtcccaggactccccttctgtggtctggaggttctaggctggcctgggctcttaaagggaggattttgcaggctgtcctccctataaaagactttcccagcgtaaaaaccanaaaaaaactcgagcggggcccggaccaattcgcctaagtgagcggatacaatcactgcccgcgtttacacggtggactgg

SEQ ID NO: 358873 - DNA, 1707 bp, Homo Sapiens
  misc_feature (321)..(321): n is a, c, g, or t
aggccacggcggccccaagctatgctgcacactgagctccctcagctccgctgctgagactggccgggacccgctggacagcgaggaggaggcaacgtgaggctggagggcagcggggactccgcagcccatccctgtcccccagggtcctcccacggggagtgaatggggcttcccgtgagctgcgtctctgggaagtgagggacagggattatccggggggagtgtctgttctcatccatattctctgggaggtgactcagtgcccaggtagtgatttcagtggcaggtccatgttttgcccaacagcggatgtgccanggagcaggagagggggtgagccaggccccgtgccctggcacagagaaggctcacaggcaccagagctcgtgagtgtgcagggagcccctggtggggggggtggcctagggccacagtgactggaatggtttgtgggcacggccatcagtgcccgtatggccttgggcctgggggccgtggaggggccacagggctgactctgcagtgagacgccggcgcctcccagggcagttggcagcgggtcacgaacgcatttgacagaagctgggcacttctctcctgcttggcagatcacacccgctgctggtgcctgtggtgggggcatcgggatgtgatctctgttagagcatctgccatccggcacagggcctgaccccatggtcaggagctctcccccggcatttgtgtgttcgggtgccccccaccctgcccctgaagcctgggtggaaggtgttacagctggggagccccagggtgccgggagggcgccccacaggtgaagtaagtgccgggctctccaggagctgccatctgtagcccctgacctcccaggagttgcctcccttctcttgcccccgtgtgccaggtgggatttgtatgagcccctcctttgcttggatgcgacccgcagacagggtttgcagaggcccccccggtgccacgagccccctgaccctcacacgcctttgtctccctctcagcagcggcgcccaggatgaacgtggcctgaagccgccttcccggggccagtttccttccctctcagccagggatgcctcgagcagccacaggggcagggtgagtggcgggccgctaggggccgcggctgcctctgcccactgcacccactgcacagaaaccgtggggagggagcatggagcctcacagggccccgtggggagggagcatggagcctcacagggccttgaagagctgtgccccagggggagctgcgtgtgcgggtctgtgaatgcgcacacacgtgtaacacgtgccccgcacggagccgtcctggcccctcagcctctcctgctgtcctggtctgtggaatgtgggcccgggccctgctgggctgagggcaacaggagtcacgtggaagaggtgccacacacgcgtccacaggcggggctcctctgctcagattctccgagtgtgccgaacgtcctgactgccatcctgctgctgctgcgggagctggatgcagaaggggctgggaggccgtgcagcagactgtgggcagccggctgcaggccctgcgtggggaaaaaagggcagggaacacgccgagtgaaccgcaggacctggaagccggtccagccctccacgggggaaccccagggatcttcccagccccccggggaacttggaagggggggttgccattgg

SEQ ID NO: 358874 - DNA, 1437 bp, Homo Sapiens
  misc_feature (20)..(20): n is a, c, g, or t
  misc_feature (50)..(50): n is a, c, g, or t
  misc_feature (61)..(61): n is a, c, g, or t
  misc_feature (1090)..(1098): n is a, c, g, or t
caatccaaacaaacggcaancccccaaattaaaccttccggggaaaaacnaaaaggcccantaatcctggaaaatagtccactgtaatggaagcctataaaacccagtgatgccccccccaagaggtaactgaagggatgtgccagtttacccttcccctgttggggatgccgtttacccccccttgttggttaaatttaccaagactgtgtgttccccatctgtggattcaaccaattgtggatcaaaaatgttcgaggggaaaaaaagatgactgcatctgtactgaatatgtatactttttttccttctcattattccctaatcagcataacaactatttacatagctatttacattgtattcactatttacatagctacttacattgtattcacaattgtgaaagctatttacattgtattcacaattgtgaatactatttacattcacaactataacatataacatagtattcacaatagttatgttcacaactatttacatactattcacaattgtaaatattattttatagctatttacatagctacatatttacataactttaaaatttacatatttacataactaaatacattgtattcacaattgtaaatactatttacattctattcagtataagtaatctaaagatgatttaaagtatatgggaggatgtgcatacataatatgcaaatactacatcattttataaaaggggcttgggcatctgtggactttggtatccaagtaggtgtcctggaaccaatccccaaggaatcaactctaatgtctaagctccagagctccaggcactctgacacctgaagttcttgaatgaagtgcctgtggatgatatttgtagggcatgtctatactgttaactaattttcttcatgaagattccagaatttatattcccaactgaattttgccctcttcaaaggagtaaccctgggaaagagaataaatgcaacttattttgttaaaaacccttctatcacttttctttaggaattgtcagcagtcagaacaatataagacattccttctgtctcattactctccagccatatctaaagcttgnnnnnnnnntcccaaatttaacacctttgtcattcagaaccatctgataacctgctatttaagtaatttccacaaattgagtgcattaaagcacaaagacttgccactctagtgaatactcagcaccactttttaaaagttatagagaaaaaggtttaaaataagcatcatctcctctgaagagaatatgcaattagacatagaatctggcacatctcttatgaggaagagtcacagcactcaatatttggcatatattctaattttttcaaaattatacttactggaaagaaatggcaaggcagagcgcaagcaaatttcacttaaaaaatttacaacacacaatac

SEQ ID NO: 358875 - DNA, 904 bp, Homo Sapiens
aagagggggtggaatttgagtgtgaaacagttaaacgagtcttagattccaagatgaatatttattaaaatggaggccatattatagtggtttaaaattagccacctttaaaataggattagaacccagaggacgaagataatgagagctcctaaggcaggatggaattaatcaattacaattttcctcttgattccatttcatccatataaacagaaatttctccacaaaaaaatctgtgaaatgaatgactgagagttgtgactcctaaagtttttgccccttcacaaaataagactttttaaggctcacaaaaggtacctcaatgcttattgtgagatttcatttgctaggagagtttattcaagttcatctaaaattccctgagaaaaaaatgcactatttaaggtagattatgtctcaaggtgcaaaccctgatttgatagagaggcactagctaccagcttccaagtttccatcctttaaatcagtgaaagaaaggaaatccaggctcttcagtttagcttcagcactatcagtaaactccctggaggctttctgcagtggaagccggggtgggcccattggaatcccagagaccagagtcatgatggctttggtctgtgacactccaaaacctagtttgacaacaaagttgataaatctctggatacaaaactgatagttcagggctaaagagaagtccttttgtcacccactcctctgcaacctggcgacgctctgagacgctcagggacaggccttctcctgttgtgccattcacaaaaatgttcttcactccctgttctttcacaagataatccacatactgaccaattactgaaaagttgatttctccattctcagtcattggcgtgatggttgcagccacaagaccctgaac

SEQ ID NO: 358876 - DNA, 807 bp, Homo Sapiens
gggggagcggctgcacggacaagagcggaggcctggaaggggaaactgaagcagaaagaggttacttaatgggctcaaggtcacctacctgacctaccagcagctcaatggccttcccaaagaagaaacttcagggtcttgtggctgcaaccatcacgccaatgactgagaatggagaaatcaacttttcagtaattggtcagtatgtggattatcttgtgaaagaacagggagtgaagaacatttttgtgaatggcacaacaggagaaggcctgtccctgagcgtctcagagcgtcgccaggttgcagaggagtgggtgacaaaagggaaggacaagctggatcaggtgataattcacgtaggagcactgagcttgaaggagtcacaggaactggcccaacatgcagcagaaataggagctgatggcatcgctgtcattgcaccgttcttcctcaagccatggaccaaagatatcctgattaatttcctaaaggaagtggctgctgccgcccctgccctgccattttattactatcacattcctgccttgacaggggtaaagattcgtgctgaggatttgttggatgggattctggataagatccccaccttccaaagggctgaaaatcagtgatacagatctccttagacttcgggcaatgtggttgatcagaaatcgcccagcaaccagtttcgctttccctttttgggggggtggatgaagcaacctgttggaaggctcctggttgatggggacccaactgggaagccattggggccagtaccctattaacctaccctggggg

SEQ ID NO: 358877 - DNA, 537 bp, Homo Sapiens
agttagaaattacaagtttatttttatattttgaaaaaggcataatagaaaacaaaaataaacaaccaggcatatcaatatttgtgacatacacatacacacaaaaatgaatataggaaataacacgaagaaaaagcatagtatgttttgaaaccaacgtggggtatgaacagatttttgatgaaatacaactaaaggttttaagtgtctatgtaatgttcgagatattacgatcactcttatcctactagcaaaaattagcaaactaggctttaaaacatgattcctgttgttttagcaggatttattttggtaatgatcctgcttccttataaacaactacttatcattgttgaagtcttcttgtgttaaggagtacaatgaggccaggcgcagtggctaacacctgtactcccagcactttcggaggctgagccaccacaccagacgataaacacacatttttaaaaaaagagaatttcccacctgagaaatggttaattcacttatattaataaattgtcatggctatttttt

SEQ ID NO: 358878 - DNA, 695 bp, Homo Sapiens
  misc_feature (288)..(408): n is a, c, g, or t
ggctgccagcccttaccatgcaacaacactgcgctaagtgcatcgaaccacacaaaaccctgtgagaaaatactgcttcccacttcacacgtgaagtaactgagtctagttttagaaatacctaaacgaagagggacaggcacaacaaatttgctggaatgtaaagaaagtagatcagtttctgcgtaagcagtaagaaatggcctcatgaggaagaaagggacatttgccctgacatttctcaaagactgcttaggttttggagacagagatccaagggcaggcaannnnnnnnnnnnnnnnnnnnnnnnnnnnnnnnnnnnnnnnnnnnnnnnnnnnnnnnnnnnnnnnnnnnnnnnnnnnnnnnnnnnnnnnnnnnnnnnnnnnnnnnnnnnnnnnnnnnnnnnngagagagagagatccaaaagcaaaggcatttcagtttgcaaggccagcatgggagagggtcttaaaacagaaacacacaaggtaagattgggggatggtacctagaccagcctaggatcataggatttgataaaatatgcatttggaaaactggtgctaatttatagagacttagaatttcaggctaaggacaaggactaagaaacgaatagcatgaacagtattattgataaacccatcattgcatcttaaaggctctgaagtctttagtattgaattaaaaaaaa

SEQ ID NO: 358879 - DNA, 1815 bp, Homo Sapiens
  misc_feature (1381)..(1394): n is a, c, g, or t
  misc_feature (1459)..(1501): n is a, c, g, or t
  misc_feature (1588)..(1760): n is a, c, g, or t
ggcctgagtggcgaattcggcacgaggggtcgcagtgctgccatggacctgggacccatgcgcaagagttaccgcggggaccgagaggcatttgaggagactcatctgacctcccttgacccagtgaaacagtttgctgcctggtttgaggaggctgttcagtgtcctgacataggggaagccaatgccatgtgtctggctacctgcaccagagatggaaaaccctctgctcgcatgttgctgctgaagggcttcgggaaagatggcttccgcttcttcactaacttcgagagtcgaaaaggaaaagagctggactctaatccctttgcttcccttgtcttctactgggagccacttaaccgtcaggtgcgtgtggaaggccctgtgaagaaactgcctgaggaggaggctgagtgctacttccactcccgccccaagagcagccagattggggctgtggtcagccaccagagttctgtgatccctgatcgggagtatctgagaaagaaaaatgaggaactggaacagctctaccaggatcaagaggtgcccaagccaaaatcctggggtggctatgtcctgtaccctcaggtgatggagttctggcaaggtcaaaccaaccgcctgcatgaccggatagtctttcggcggggcctacccacaggagattcccctttggggcccatgacccaccgcggggaggaagactggctctatgagagacttgcaccttaactctgggacctgctggcccagagtggagctagggctaggtgtcaagagagggtgtgggattgggacccaggcccttctttctaaactcaacccatttccctccctaccccttatcttcaggactcttcagagctaaccctctaaagtctctgtactcagttgggttctcagttagctggtcaagtggagtgtaatggtggcgtagagaaatcacaaatggaaaataattccataattatttttttgaccttgcctatgattgattaggatagctccctctaggggtagcagccggtgtgactccctttctggtgacagacagggccccagcagccctgtctgttaccatgtgagtcatactggccaaagcttagtcctagcatatgcacctgagccaacctggccaatcagattgttttgtcaataatttgaaatttgaactggagagatccagaaccttgggagtcattaaagccaagtcattcatagcagccaggaaacaataggaaccaaaagcctctgcctgctgctattgcaattcccaggatctctccttccctggatccctccctcccaggtctgggctgtgcagttcctccccctgccttaaaacaccccactatctctgtaaagtctctctctctcnnnnnnnnnnnnnnacttaatctagctagaatctatttctgttgattacaacttaactaactcatttacggataggacnnnnnnnnnnnnnnnnnnnnnnnnnnnnnnnnnnnnnnnnnnngagatggagtctcactctgtcacccaggctggagtgcagtggtgtgatcttggctcgctgaaacctctgcctcccaggttcaagcannnnnnnnnnnnnnnnnnnnnnnnnnnnnnnnnnnnnnnnnnnnnnnnnnnnnnnnnnnnnnnnnnnnnnnnnnnnnnnnnnnnnnnnnnnnnnnnnnnnnnnnnnnnnnnnnnnnnnnnnnnnnnnnnnnnnnnnnnnnnnnnnnnnnnnnnnnnnnnnnnnnnnnnnnnnnggcatgagccacacacccaagcgagacgggggtttcattatgttggccaggctgc

SEQ ID NO: 358880 - DNA, 588 bp, Homo Sapiens
gtttatactgcattctcagatctatgaatatttttgtcatcctgcctgagaaagtacatcttccaggcaaaagtagggtatcttgaactcctttcttctgagttgagcagactcactggcttaagcatcccataagcctattatttagtgtgaatttgggacttttatttgtatgttgtcttaacttactaagcctgtgacttgtatttagctgtagtcaagcctcaccagccatatctcatctctgagaggaagactggatagtgagtttggttttggttttggttttaaacccttttaccttttcagtctggcagctcctactgctgctttcctaagttactcaaagcactgcttcttggtccttgttttcttttgccttgtactatcttgtataatgtttactaaaagagcctccccataaatcagagaggcaaaaaggtagcatataaaaagaagaaccaaaagaagagaaaacctgacttctagatgactgtggtgtcatctaatgggttcccttcacctactgctggccattgtcccttctgttggagattcctttctttatggttgctgttcataccccct

SEQ ID NO: 358881 - DNA, 665 bp, Homo Sapiens
  misc_feature (47)..(47): n is a, c, g, or t
ggtggtccggtccgatttcgggacaaaagagctataaaattaacaanccaaaagaagagaaaacctgacttctagatgactgtggtgtcatctaaaaggcagaggtgcctgaccctcaggaatgtgtatgatgcaacagagctgaagaatgggttcccttcacctactgctggccattgtcccttctgttggagattcctttctttatggttgctgttcataaccccttcaacacccccccttgctggtcctgccggtcacagttgaggattttggctgtgatgggctcatactcataatggcctgttgagttgtttttagtgacaggttttgtttgctgcacacctcattggcttgcttaccaacaccagctagaagtggtccctctttcatatccaaaccagaacacatttgggtattcctgagactttatagagcgtgtattgtttgttatacgaacctaacctaccttgttgttttctcatattaagaaatttaaatctactttgttttagtgaagctattttggtaatgtataagcaattttggttctgtttagggagaattcagggtttccatgacttgatttgagctttgcatatttcaaataagtaacacagccattttaatttagctaaataaaaaaatttcttttttctcctcag

SEQ ID NO: 358882 - DNA, 612 bp, Homo Sapiens
acactatcccttgggagttgtagctgctgtcactgactcccggctatacatggcctgtcgaccacgttatagccctcaggcctgttgaacttgctctctaagagaggttgggaccaggctaggttccgggtgactgcccaggagaggtggtggccttcacacatgcacatggagttgaggaccagggagctgcagggaaagcaacagctataggtgccttgctcttctgtcggaggctgctgggggcaagagcagctgcacaaggccagggcaagtgctagggcccctcccccatcacatggtcacactgggacaggcgtgcagctcactgaactccaagcgagccagccctctcttggactagaaggcctactgtcagcccttcgcttacaaactgcaggctcaatccgaaggggacggccggcgggggctctcctagtgcccagagacaggcccagaggtttacaagttttctaagcttttgataatgtgaagctccaggccgagaggatgctgttgagcacattgcagctatgtaatttttggtgtatgtatgtaatatttaaggttggaaaaaaaactcaaaagcaaagatattaactcttattagaa

SEQ ID NO: 358883 - DNA, 590 bp, Homo Sapiens
gtggatcccccgggctgcaggaattcggcaccagggaatgtcctgtagagagagacctagataggtcatgcaagtgagaaagacatctgaggaaaatggaagacctaaggcagacaggaaggaagcacaaaagacaagcattgggtcagacccataaaccacctcccaaaggctgtcatttcattgcactggaattttgctttatcagaagcaaggaagtaagggagtcattgccttgggcctgggaatctaagtgggagacaatattaatttggatccgattaattggagattactaactgtggacaaaagtttatctttgcacaatcaataaaaatggcatttttttagtaaattaagagcataaacaatattgctagaggtggcatgtttagtctaccaaaaacaatacttttcaggcactttagaaatatccttttagaagcagcgagtgcatgggctaattatcatcaatctttatgtatttgttaaagaaacatctacaggatctttattggtgaccttttgtaagacattagtttgaggtactacctatgtacttgaaaataataaagtggcatttctttatg

SEQ ID NO: 358884 - DNA, 1198 bp, Homo Sapiens
  misc_feature (143)..(204): n is a, c, g, or t
  misc_feature (208)..(278): n is a, c, g, or t
  misc_feature (300)..(432): n is a, c, g, or t
ggcattatgtatagaacgttgttaaaaagaggctggtacggccggaatcccgggatatgtcgacccacgcgtcgaaataagaacgcgtgactaaatgctagggggattctaatgcgcattcggttgcctcttccagagcacgnnnnnnnnnnnnnnnnnnnnnnnnnnnnnnnnnnnnnnnnnnnnnnnnnnnnnnnnnnnnnngagnnnnnnnnnnnnnnnnnnnnnnnnnnnnnnnnnnnnnnnnnnnnnnnnnnnnnnnnnnnnnnnnnnnnnnntgggttcaagcgattcttctgnnnnnnnnnnnnnnnnnnnnnnnnnnnnnnnnnnnnnnnnnnnnnnnnnnnnnnnnnnnnnnnnnnnnnnnnnnnnnnnnnnnnnnnnnnnnnnnnnnnnnnnnnnnnnnnnnnnnnnnnnnnnnnnnnnnnntgattggcttggacgtcttaggtggcagggctgttccctccaggcaaattgcccttcaaaccgacgatcattgtgcccacttaccctgggctggagagttggtttcaggttcctacaggagatagctttctttcccttactccctatctaacacttttgctctgcaggcagccttgcccattctctaagcctggcttagaaggcactgggaatgtcctgtagagagagacctagataggtcatgcaagtgagaaagacatctgaggaaaatggaagacctaaggcagacaggaaggaagcacaaaagacaagcattgggtcagacccataaaccacctcccaaaggctgtcatttcattgcactggaattttgctttatcagaagcaaggaagtaagggagtcattgccttgggcctgggaatctaagtgggagacaatattaatttggatccgattaattggagattactaactgtggacaaaagtttatctttgcacaatcaataaaaatggcatttttttagtaaattaagagcataaacaatattgctagaggtggcatgtttagtctaccaaaaacaatacttttcaggcactttagaaatatccttttagaagcagcgagtgcatgggctaattatcatcaatctttatgtatttgttaaagaaacatctacaggatctttattggtgaccttttgtaagacattagtttgaggtactacctatgtacttgaaaataataaagtggcatttctttatgaa

SEQ ID NO: 358885 - DNA, 1097 bp, Homo Sapiens
  misc_feature (1001)..(1001): n is a, c, g, or t
  misc_feature (1007)..(1009): n is a, c, g, or t
ggtccggaattcctgggatctacattgactgaacgttcaccatctaaaaatcactcatgctccttgaaccaaggtgattatcagagacagctcctggtagaagaggttgtagatgttaaaagagtatgatttctatataagaaaatatagaaattgacagaatggttcttatttactgggcctggagaattcctgttctggcattcttagatccctcaaatttattaccaaggggaaaaggaaaaagaggcaagtaggcagtagggtaagctgttgtttgcttgccaaggaactggagagtgcaggtttcaagacaccttgaggaaattctcctgagcccttagccaagagaagagagcagaaaatgcttttctgtagaatcccaagaggcataaaagaggatgagtaactgggtcctgtgccaagttcccaacccctaagccttcccaacatggagaaactacaccagtgtttaaaagtttctaggttggaggaacaaacttgagcatcaagggcagatgatttgttaacacagtcctgtgcagagggctccttcagaaggcatcccctgtgacccaaacacagtgagcaccttctactttctggccttatgccatcaatgcatccagctgcaatctatcctcaaacctggaatccatctcttgacttcccagccagaccaccttccatcccttcactgtgtcccaccctgcccagaatgcatgctgttctcccagagtctcatggaaataaggccttgcactgaaataggctgtgggaaacaaaaggataagcaggtctggaccagtctgtaatggtagcaggtgaaaacaacttatggaaaaacacatgaattcattaggaaataaggtgacagatccccagctgctgaagaactagaatgtctattacactcatacaattgatgttttattttaatacaccagagctaccacacaaaacttccttccatgtgaaaggctccagaataaaattctggncatccnnntctctcttatggtcctcctgctcagaaccaactttcatgcccctaaaaccatctggcatcatgccctggttccgaaaaatcatgggga

SEQ ID NO: 358886 - DNA, 644 bp, Homo Sapiens
  misc_feature (626)..(626): n is a, c, g, or t
gcgccatgccagcccatgagttagggaaggacgtctcaaagaggttgtcctcgtgccgaatttggcacgaggttgataattgttgaaactagatgatggtcataataaaaaagttttaaaagtcctccagtttccaacacactcaagagagagccccaacccccaaacacagagtttcatggaaaccccacaccaaggcaagaggcagagatgatgattccatttcatatatacactcattttctaactttttttaaaggcccactgctttattttcaatagattaaacctgatttctgagaggtcctgaagttgggcttatttccctggctgggttatgggggagggcagggtaaagggatccttaaaaaagtttacacttctatgtatctcacaatcttattgtgaggatgtgacttgttcagtgttctgaacttttcgaaggaatcgtgctctcaatgcaaagtgtcattctctggaattgcacctggctcaggaaaggactgtctttgtacttgaatttaaatccaatggagaactttaacacgggcatttgcatgactgagaattgctgctgtcttttttccgtatgtcactttcttgaatgtgttctaataaaatgattnctaaaggcagaaaaaaaa

SEQ ID NO: 358887 - DNA, 547 bp, Homo Sapiens
  misc_feature (481)..(481): n is a, c, g, or t
ggcctcaagcggcagcatgaaggctaagaggtgctcaagttcgaagacgtggtcaccaacctcggaaaccaatacgaccccaccaccggcaagttcacctgctccatcccgggcatctacttcttcacctaccacgtcctgatgcgcggaggggacggcaccagcatgtgggctgatctctgcaaaaacaaccaggtgcgtgctagtgcaattgcccaagatgctgatcagaattacgactatgccagtaacagtgtggttcttcatttggagccgggagatgaagtctatatcaaattagatggcgggaaagcccatggaggaaacaacaacaaatacagcacgttttctggatttattatttatgctgactgataatgcagaaactaagcttattattctgagtttgaacactggattcgtatggctaacgtcagtgaatcaaggatcccaggggatgccaatggcagggcacctcagntgtgtatatgtggggaaatcaaatgctacctgactcacatctgtatcactcagaaaccatatgtaa

SEQ ID NO: 358888 - DNA, 1638 bp, Homo Sapiens
cggatgtagtcttgtgtggccccggaggaccctcgtgaaagtcacagtgtcaaggtccatagtgttgcaactggacagtctcccccagccaggatgagggaattctccttggggaccagcagcaaagcgttgatctcaggcacttccaggctggtcctgtatggaggctgacgacgccacagctccttacagcccttcttgagcatctccgcccaaaagccaggccttcacctcccccatccccagcactaagcagatgtcgatcggtggaaaccatgctatagacgggcccatcatgggctaaagagaaatgcagaactgagtgagccaatcccacccaaagtcctgaagccagactccacagctatacccaccttggaaagtcaccaccggcttcttactttcctctttggcttctgagctcaaagcagaggacaagctgaagatggcaatctgcccgtaattgttgccagccgccagaaacttcccacatggtgagacgctctgggagaagatggtcatatggagccgctgcaaggcctggaacacctctgtctgacccagaggcaccgcgagcggcacagctcgctccatctccagaactacaagtcccagagtgctccgcgcgcgacgcaacctcacgaggccttacgtgcctagagcggttcctctccgtggcgccctaccgccttcggcgcgaaggtggctggtgcgtaccgtcccgaaccctaggagccgaggtgagcgccgcgaagacccccgacattaagaagtggtgtccaccgcagcccccttaagccggataccctcccccaccccgaggagcaagcctgccttccgccacgcgccgcccgtcttccgcgcccgcgcagaacctcgcggctgtgcccgcctaaagccacgcccatcctctcttggccacgccctcagagactcctcccctgtcgcccagatcccacccgcaggaccccaaaacccaatgatcctgcagcagcccttgcagcgaggcccccagggaggggcccagcgcctcccgcgggccgccttgggggtgacttggggcctggacgccagctcccctctccgaggagctgtgcccatgagcaccaagcggcgcctggaggaggagcaggagcctctgcgcaagcagtttctgtctgaggagaacatggccacccacttctctcaactcagcctgcacaatgaccacccctactgcagcccccccatgaccttctccccagccctgcccccactcaggagcccttgctctgagctgcttctctggcgctatcctggcagcctcatccctgaggccctccgtctgctgaggctgggggacacccccagtcccccctaccctgcaaccccagctggggacataatggagctctgagtgctggtggacagtgccccttccaccttccttcttccccacatcagacgagaccagcgactcccgcaaagggacaaggttcctccctctcctgcagagtagggcattgcgcaccaagaaccttccttaacagaggacactggagccaacggaagtcttggatgggaggcgtgggagaatgggaaggagggaatccaccccaaagaggaccgtataaagaatgctgagccaaaaaaacataa

SEQ ID NO: 358889 - DNA, 1028 bp, Homo Sapiens
  misc_feature (803)..(803): n is a, c, g, or t
  misc_feature (903)..(903): n is a, c, g, or t
  misc_feature (978)..(978): n is a, c, g, or t
tggctttaggcgggcacagccgcgaggttctgcgcgggcgcggaagacgggcggcgcgtggcggaagggttcgggacggtacgcaccagccaccttcgcgccgaaggcggtagggcgccacggagaggaaccgctctaggcacgtaaggcctcgtgaggttgcgtcgcgcgcggagcactctgggacttgtagttctggagatggagcgagctgtgccgctcgcggtgcctctgggtcagacagaggtgttccaggccttgcagcggctccatatgaccatcttctcccagagcgtctcaccatgtgggaagtttctggcggctggcaacaattacgggcagattgccatcttcagcttgtcctctgctttgagctcagaagccaaagaggaaagtaagaagccggtggtgactttccaagcccatgatgggcccgtctatagcatggtttccaccgatcgacatctgcttagtgctggggatggggaggtgaaggcctggctttgggcggagatgctcaagaagggctgtaaggagctgtggcgtcgtcagcctccatacaggaccagcctggaagtgcctgagatcaacgctttgctgctggtccccaaggagaattccctcatcctggctgggggagactgtcagttgcacactatggaccttgaaactgggactttcacgagagtcctcccggggccacacagactacatccactgcctggcactgcgggaaaggagcccagaggtgctgtcaggtggcgaggatggagctgttcgactttgggacctgcgcacagccnaggaggtccagacgatcgaggtctataagcacgaggagtgctcgaggccccacaatgggcgctggattgggatgtttggcactgattccgactggatggncctgtggagggggccccaccctcaccctctgggacctccgatcctccacaccaacaccatcttccccatccgggnggccacagaagcacgtcacccttctacagggactgattctggtcgctggc

SEQ ID NO: 358890 - DNA, 779 bp, Homo Sapiens
aatgatcctgcagcagcccttgcagcgaggcccccagggaggggcccagcgcctcccgcgggccgccttgggggtgacttggggcctggacgccagctcccctctccgaggagctgtgcccatgagcaccaagcggcgcctggaggaggagcagtgagtttgggggcagggagggactcccaacaagatctctgtcacctctggtccccaacaggctgcctcctgtgtcagtatcccagcctgcctctctgccatctctccccagggagcctctgcgcaagcagtttctgtctgaggagaacatggccacccacttctctcaactcagcctgcacaatgaccacccctactgcagcccccccatgaccttctccccagccctgcccccactcaggagcccttgctctgagctgcttctctggcgctatcctggcagcctcatccctgaggccctccgtctgctgaggctgggggacacccccagtcccccctaccctgcaaccccagctggggacataatggagctctgagtgctggtggacagtgcccctcccaccttccttcttccccacaacagaagagaccagcgactcccgcaaagggacaaggttcctccctctcctgcagagtaggcatctgggcaccaagaccttccctcaacagaggacactgagcccaacggagttctgggatgggaggggtgggagcatgggaagggaggcatcccacccccaagaagaactgaataaagattgctgagctaaacgatagcaaaacgg

SEQ ID NO: 358891 - DNA, 1233 bp, Homo Sapiens
  misc_feature (445)..(445): n is a, c, g, or t
ggggatgatcctgcagcagcccttgcagcgaggcccccagggaggggcccagcgcctcccgcgggccgccttgggggtgacttggggcctggacgccaggctgcctcctgtgtcagtatcccagcctgcctctctgccatctctccccagggagcctctgcgcaagcagtttctgtctgaggagaacatggccacccacttctctcaactcagcctgctacaatgaccaccccatactgcagcccccccgatgaccttctcccctagccctgccccatactcgaggagcccttgctctgaggctgcgttctctggcagctatccgtggcagcctcatcccgtgaggccctccgtctgctgaggctggtgggacaacgcccagtcccacgcctacgcgctgtcgaaaccccagtcgttggggagcataaatggacggctcgtgagntgctggatgagatcgagtgccctcgtccgcagcgttccttcttcccccacatacgagaatgagaggcagacgagctcccgacataagggacaaggttacctccctctcctgcagagtaggacatctgggcaccaagaccttccctcaacagaggacactgagacccaacggagttctgggatgggaggggtgggagcattgggaagggaggaattcgcaagccaaagaagaattgattactgattgtgagaaaagaagtatataataaacaccaatgcaggcgcatatcccatgggacgcgcaagtgtgaaccaaacgcgggctcagtgagactggccagcattggggcaaggaaacggaagttccggacacacccacgtttggtgtgttcaccagggttgccagaaaacacgcgagcggaccacaccttatggatgcccccgactggagtaaaccgaaaagcgcgtgactaacatccgtgcaaatggttcgatagcaagaagaaggaacgacacagacgaagagagggaacaacgcgcaaacggagacaagggggagtcgaggacggggagccgagacacaattttgggcaagccaccaaaaggcttcggggccccagagaaaacgggacagctcagcgcaacagtgcgcaaggccacaagcagaagacaagcagacgaagaacggaccagaaggaaccgcacggaaggaagcaaccaggaaaatacccagtagaagaaactacgagaagacagcaagctatcaagggagcagagagagcaacatag

SEQ ID NO: 358892 - DNA, 748 bp, Homo Sapiens
gtctcccccagccaggatgagggattctccttgggaccagcagcaaagcgttgatctcaggcacttccaggctgggtcctgtatggaggctgacgacgccacagctccttacagcccgttcttgagcatctccgcccaaagccaggccttcaccgtccccatccccagcactaagcagatgtcgatcggtggaaaccatgctatagacgggcccatcatgggcttggaaagtcaccaccggcttcttactttcctctttggcttctgagctcaaagcagaggacaagctgaagatggcaatctgcccgtaattgttgccagccgccagaaacttcccacatggtgagacgctctgggagaagatggtcatatggagccgctgcaaggcctggaacacctctgtctgacccagaggcaccgcgagcggcacagctcgctccatctccagaactacaagtcccagagtgctccgcgcgcgacgcaacctcacgaggccttacgtgcctagagcggttcctctccgtggcgccctaccgccttcggcgcgaaggtggctggtgcgtaccgtcccgaaccctaggagccgaggtgagcgccgcgaagacccccgacattaagaagtggtgtccaccgcagcccccttaagccggataccctcccccaccccgaggagcaagcctgccttccgccacgcgccgcccgtcttccgcgcccgcgcagaaccctcgtgccgaattcgccacccagc

SEQ ID NO: 358893 - DNA, 929 bp, Homo Sapiens
  misc_feature (419)..(419): n is a, c, g, or t
  misc_feature (426)..(426): n is a, c, g, or t
  misc_feature (915)..(915): n is a, c, g, or t
gttcttgacttacaaatagccatcgaaaacattactgcctcttatgacaatgagactgtgacacttcaagacatctgcttggcccctctttcaccgtataacacgaactgcaccattttgagtgtgttaaattacttccagaacagccattccgtgctggaccacaagaaaggggacgacttctttgtgtatgccgattaccacacgcactttctgtactgcgtacgggctcctgcctctctgaatgatacaagtttgctccatgacccttgtctgggtacgtttggtggaccagtgttcccgtggcttgtgttgggaggctatgatgatcaaaactacaataacgccactgcccttgtgattaccttccctgtcaataattactataatgatacagagaagctccagaggggcccagngcctggngaaaaagagtttattaattttgtgaaaaactacaagaatcccaatctgaccatttccttcactgctgaacgaagtattgaagatgaactaaatcgtgaaagtgacagtgatgtcttcaccgttgtaattagctatgccatcatgtttctatatatttccctagccttggggcacatcaaaagctgtcgcaggcttctggtggattcgaaggtctcactaggcatcgcgggcatcttgatcgtgctgagctcggtggcttgctccttgggtgtcttcagctacattgggttgcccttgaccctcattgtgattgaagtcatcccgttcctggtgctggctgttggagtggacaacatcttcattctggtgcaggcctaccagagagatgaacgtcttcaaggggaaaccctggatcagcagctgggcagggtcctaggagaagtggctcccagtatgttcctgtcatccttttctgagactgtagcattnttcttaggagcatt

SEQ ID NO: 358894 - DNA, 1024 bp, Homo Sapiens
  misc_feature (15)..(15): n is a, c, g, or t
  misc_feature (23)..(23): n is a, c, g, or t
  misc_feature (38)..(38): n is a, c, g, or t
  misc_feature (43)..(43): n is a, c, g, or t
  misc_feature (66)..(66): n is a, c, g, or t
  misc_feature (99)..(99): n is a, c, g, or t
  misc_feature (106)..(106): n is a, c, g, or t
  misc_feature (130)..(130): n is a, c, g, or t
  misc_feature (135)..(135): n is a, c, g, or t
  misc_feature (142)..(142): n is a, c, g, or t
tccgtcgctggcctntatacctncaaaattctggaacnccagntgtgagcaacacgccggccaggnatgtggtttataaacttgaacaactctccatgnatgtggntctggtaattcattctctcatagntaatnaaaccanaaaacaggaaaacaaatccaacaacaggcataagattatatggagctttattaactaaatgccctaggttatattcaaagcagattcacccagcactcctcaggagactgcagcatggggtagatttggtgtactttgaggacatttgggatatactaatgaaacatggaccttcctgtgtttcttagtgcaatctaaatcctctttgccaatcatagatttttcttaggactttagagaatcttgacgagctgttgatatattttaggagacctgtttcagatccttcaatgtccctgaccctggtcccaaaagaagctaaaacacaagtatagttcactgtcagttatggccacacctagcatggctttccagggaagaccactgagcctgatgtctcctcagtgctcctgggccccatttgtagcccagctcagagcaggcacagtgtctgttggggcttcaacacagtttccccaggcctctctagcctgggagccactcaggctcacaatgaccatctctttgtgggcaagtggtcagtcaatagatataattgtttccaaaggtaccttcatccccctaggaactttgtcagatgtgaagtgacagctctgaaatatctcctatcttaaaacttaaatacaaactactactatctaggtagatatgggactagttttcagatgtaacagggtacctgacacttggcatctatagagatgaggtcagagagtgaccacatctcaagtccgatgggctctgggcctctaagcatcaggaggaaaaggtgggatcagccacatatgagaaaccaccacaacaaaggactgctttctctctcgctctcgacgaattcgagctcggccgatttggcctgat

SEQ ID NO: 358895 - DNA, 608 bp, Homo Sapiens
  misc_feature (57)..(57): n is a, c, g, or t
  misc_feature (143)..(391): n is a, c, g, or t
cgcctttacggtgagtcacgtcttaaagggactttgtccaactgaacaccttcaccnaattcgtcaattctttgattataaggatttgccaattggcatatggttaaaaagaactgattacaaaatttaacgcgatttttacnnnnnnnnnnnnnnnnnnnnnnnnnnnnnnnnnnnnnnnnnnnnnnnnnnnnnnnnnnnnnnnnnnnnnnnnnnnnnnnnnnnnnnnnnnnnnnnnnnnnnnnnnnnnnnnnnnnnnnnnnnnnnnnnnnnnnnnnnnnnnnnnnnnnnnnnnnnnnnnnnnnnnnnnnnnnnnnnnnnnnnnnnnnnnnnnnnnnnnnnnnnnnnnnnnnnnnnnnnnnnnnnnnnnnnnnnnnnnnnnnnnnnnnnnaagctgggtgaataggggaagagaacactacagaaaatccagattcatgtttaaaagtatgggagagttcagggagagcagacatttatttagtagaactggtattttcctttgtttgccacacattcttttttaagtatcttattacaaagacaagtaatgagaatcatcagaggtctctattacttcattattccccttttcttacatttacaga

SEQ ID NO: 358896 - DNA, 575 bp, Homo Sapiens
atcaaagaagtgtgatgaggatcggaatgcattgggtagctcagcagttagatttgatagattcaaaggctggtctggtgagttacctgatttggtctatagcccttctagaactgtccagtggaaacctaagttcctgaggctcccagggttggtccgggctccctgagaacattagaaccagggaaggtatgggctgagtctgtgtgcccattcatcaggcttgccctctgttccagttacctgttctggatttatggggcagttctcacttgggatgtatcatgcggtatcagtcatatgtaagtggagtcaagaatcacctgaaggcttcttctctctcatgttgtggtgactgggcttgtgatggcttgaaagctggggctggtcaggcactgtccacgtgactgcttgggcttcctcacagcagggcagtctcaggataggcagacatatcttatagctattaaattatttgcgatggagtcgcggtcctgtcgacccaggcgggagtgcagtggccaagaacgctagctcattgcaaccttgcacctcccaggttcaattgtaactcc

SEQ ID NO: 358897 - DNA, 297 bp, Homo Sapiens
cctaagtggacgcccgcagttagatttgatagattccaaggctggtctggtgagttacctgatttggtctatagcccttctagaactgtccagtggaaacctaagttcctgaggctcccagggttggtccgggctccctgagaacattagaaccagggaaggtatgggctgagtctgtgtgcccattcatcaggcttgccctctgttccagttacctgttgctgtggaacaaataagccccaaacttagggacttaagatagcaatgtggttttctggatctacggagcagttccac

SEQ ID NO: 358898 - DNA, 865 bp, Homo Sapiens
cccaaagtgagactttcccagatcattcatgtcttctcattctcttggtccctctagttctttttcccttctcatccccaccaagaagtggaacttgaacctgccattcctaaaggtctgtgcagtgtctgtgatccagaggacaggactgtgaaagtgtccctaatatatcacaatgtatatctcttgttttctttttctctctacaacttgatccttcctgtccccatttgtccccgagttgtaaggtgcagattaaaggttttgtcatagcagaaggaaatcagagggagatgccccgtctccagaggaaagaagttgagtttcccaagcaaaacctaagcagagagtgcacattcttgtctgaaagcttggagaagcagcagaatttccaggacacttgaaagcacgctctggcaaagccccggatgaaagtgttttccaaccattaatggcccaccagcatggcttggtttgtgattccagaattcagaccacttcacaatctcacacagttacagcaagcagctttgaattcctgctgcttggtctgagagtgcatcccatccatcgatcggatggctctggggtggccatggtcccaaggcaaggaggcacccagcagaggatccctgaggcctggcatgtttgcagattgagctacagagaacaccttgaggtgtcgcaagtgtccagagagccgaagtgtgtagggtccaaagcaaggtccttcctggatgtgcccgggagctccggggacctcaagcgtgggcctcagtctccatcttggtggctggcttgtaaatgactcccttgttatcaccttttttgatactcttccttctgaaaaggtgataacaagaga

SEQ ID NO: 358899 - DNA, 879 bp, Homo Sapiens
ttccgggggcgcgtggctgcagcggggcccgcgtggtgcctcctgaggcggcccccggatgaagagatctgggaacccgggagccgaggtaacgaacagctcggtggcagggcctgactgctgcggaggcctcggcaatattgattttagacaggcagacttctgcgttatgacccggctgctgggctacgtggaccccctggatcccagctttgtggctgccgtcatcaccatcaccttcaatccgctctactggaatgtggttgcacgatgggaacacaagacccgcaagctgagcagggccttcggatccccctacctggcctgctactctctaagcgtcaccatcctgctcctgaacttcctgcgctcgcactgcttcacgcaggccatgctgagccagcccaggatggagagcctggacacccccgcggcctacagcctgggcctcgcgctcctgggactgggcgtcgtgctcgtgctctccagcttctttgcactggggttcgctggaactttcctaggtgattacttcgggatcctcaaggaggcgagagtgaccgtgttccccttcaacatcctggacaaccccatgtactggggaagcacagccaactacctgggctgggccatcatgcacgccagccccacgggcctgctcctgacggtgctggtggccctcacctacatagtggctctcctatacgaagagcccttcaccgctgaaatctaccggcagaaagcctccgggtcccacaagaggagctgattgagctgcaacagcttttgctgaaagcctggccagcctcctggccctcccccaggtggcagggccctgcgcagggcgaaaaaggtggcctgctggctcagggctccccc

SEQ ID NO: 358900 - DNA, 1050 bp, Homo Sapiens; identical to SEQ ID NO: 172481
  misc_feature (93)..(152): n is a, c, g, or t
  misc_feature (982)..(995): n is a, c, g, or t

SEQ ID NO: 358901 - DNA, 1578 bp, Homo Sapiens
  misc_feature (1017)..(1153): n is a, c, g, or t
  misc_feature (1215)..(1296): n is a, c, g, or t
  misc_feature (1400)..(1409): n is a, c, g, or t
agcggggctttataggtccggttccgggggcgcgtggctgcagcggggcccgcgtggtgcctcctgaggcggcccccggatgaagagatctgggaacccgggagccgaggtaacgaacagctcggtggcagggcctgactgctgcggaggcctcggcaatattgattttagacaggcagacttctgcgttatgacccggctgctgggctacgtggaccccctggatcccagctttgtggctgccgtcatcaccatcaccttcaatccgctctactggaatgtggttgcacgatgggaacacaagacccgcaagctgagcagggccttcggatccccctacctggcctgctactctctaagcgtcaccatcctgctcctgaacttcctgcgctcgcactgcttcacgcaggccatgctgagccagcccaggatggagagcctggacacccccgcggcctacagcctgggcctcgcgctcctgggactgggcgtcgtgctcgtgctctccagcttctttgcactggggttcgctggaactttcctaggtgattacttcgggatcctcaaggaggcgagagtgaccgtgttccccttcaacatcctggacaaccccatgtactggggaagcacagccaactacctgggctgggccatcatgcacgccagccccacgggcctgctcctgacggtgctggtggccctcacctacataatggctctcctatacgaagagcccttcaccgctgagatctaccggcagaaagcctccgggtcccacaagaggagctgattgagctgcaacagctttgctgaaggcctggccagcctcctggcctgccccaagtggcaggccctgcgcagggcgagaatggtgcctgctgctcagggctcgcccccggcgtgggctgccccagtgccttggaacctgctgccttggggaccctggacgtgccgacatatggccattgagctccaacccacacattcccattcaccaataaaggcaccctgaccccnnnnnnnnnnnnnnnnnnnnnnnnnnnnnnnnnnnnnnnnnnnnnnnnnnnnnnnnnnnnnnnnnnnnnnnnnnnnnnnnnnnnnnnnnnnnnnnnnnnnnnnnnnnnnnnnnnnnnnnnnnnnnnnnnnnnnnnnntctttgcgcccccccccccccccaaaaaattttttaaaccttttttttgggccccgggcccnnnnnnnnnnnnnnnnnnnnnnnnnnnnnnnnnnnnnnnnnnnnnnnnnnnnnnnnnnnnnnnnnnnnnnnnnnnnnnnnnnccccggggtgaaccagaggttttaaaaaaatcccaaaggggtttctgggggccttacggggtttttccacgggggctcccagccggccccaatataaaaatagnnnnnnnnnngggccattttatggaaaaattggtttgaaatttcataaaacctttccccccccacgggaaaccccctcccaagcgggcttggaaaaaacctaaaaatccccgggggaataaacaccctttggcccccttgggaaaaaaattttccccccgggggaaaaaacgggggggc

SEQ ID NO: 358902 - DNA, 911 bp, Homo Sapiens
  misc_feature (78)..(124): n is a, c, g, or t
  misc_feature (139)..(181): n is a, c, g, or t
  misc_feature (801)..(801): n is a, c, g, or t
  misc_feature (846)..(846): n is a, c, g, or t
  misc_feature (872)..(872): n is a, c, g, or t
  misc_feature (882)..(882): n is a, c, g, or t
  misc_feature (900)..(900): n is a, c, g, or t
ggatcatatggaaattgatgctttagtgagggtgttggctatcctattgttaatttcctgcatccttttttcttcttnnnnnnnnnnnnnnnnnnnnnnnnnnnnnnnnnnnnnnnnnnnnnnntgttcctgggctcannnnnnnnnnnnnnnnnnnnnnnnnnnnnnnnnnnnnnnnnnngtgtgagccactgtgcccagcttatccttttttcattacacaaaaagactgaatttggttagttctaagttggaagataaagatggtatgcacaggaggcccttgggagccctcagataactgtctcattcttccaagaataaggcaaggaagatgtcagcaagtaaacctctggtttacctgctagctagcatggatacctaaggaataaggtaaggaagatgtcagcaagtcagcctctggtttacctgctagctggcatggatccttaaggaagcaggagggagttgggaagagaggaaggggtgaagttggtatcttttaaagcgagagtgattttacctcagaattttgaagaatactaaggaatccagttgttggggtacatgctattattagaaggatctagataatttgtcctctgagtcatacttgacattgtacctgtggcacatcaatccgcactgtttgatactctggctgaatctccagctttcaccaacattgtcaaaggaccttttttagtgcccagccatgcctaagagtgtgtccatctgaagagggaaagccatctgcatactgctggcctggattgctcagtcctcactacctacccagancccggttggtaagggtccaaaagtacatgccttggaaaagcagtnctgcaccaccagtgataagcctgtgncagagtggancagcccccaatggaatgnaaggaaggaat

SEQ ID NO: 358903 - DNA, 786 bp, Homo Sapiens
  misc_feature (43)..(43): n is a, c, g, or t
  misc_feature (124)..(166): n is a, c, g, or t
  misc_feature (181)..(227): n is a, c, g, or t
tcctgagggctccccaagggcctcctgtgccataccatctttnatcttcccaacttagaactaaccaaattccagtctttttgtgtaatgaaaaaaggataagctgggcacagtggctcacacnnnnnnnnnnnnnnnnnnnnnnnnnnnnnnnnnnnnnnnnnnntgagcccaggaacannnnnnnnnnnnnnnnnnnnnnnnnnnnnnnnnnnnnnnnnnnnnnnaagaagaaaaaaggatgcaggaaattgacaataggatagccaacaccctcactaaagcatcaatttccatatgatgttaagtaccaggtagaaatctctctgactttaaggagctttggacacaaaaacttttccttaaacaagccatttattttctaaacatggacttccactagttgtgtaactctcctagaattctagccaatatttaataattgttgccacacttttgtatttcaacttaagtattttatattattaaaaactaccaattatcttaacaaacctgcacatggagggagaggtatatgaaactcagcccactaactagaccaaaatcctcctcaatgacactaaggttgtaatactaaaaagtcccaatcaccctccccaggattctattaaagcaagctgtggttaacagacaagatgcctttttcgtcatcattttcaaaagcattgtcactttttttccaagacacaacttctttgaacctgtttcataacctatcatataaataccagcctcaatactgctatcaagattaaacaatgaaca

SEQ ID NO: 358904 - DNA, 908 bp, Homo Sapiens
gggggggagcgccggggcagggaggcgggcaccaggcgcgggtccctccgggcaggggaggtaggcctgggcctgacgccgaacacgcagcggcgggagagtgagcactcgggcggcggcgtcctggagacccgcgagagatggaagcggcggcgacgccggcggctgccggggcggcgaggcgcgaggagctagatatggatgtaatgaggcccttgataaatgaccagaattttgatgggacatcagatgaagaacatgagcaagagccttctgcctggtcagaagcattaccaacttgatgatcaagagggcatttcatctgtacaaactcttatgcacccttctgaaaggaaagattggaaaccgggccttttaggactgccattgccaataaaaaaatgcacgcatagtggcttggcaccaatcagcgcctgccggcgataggaaattatctctcgttcacccggtatggccataattgggttgataagagagcccacttctaggtccgtcggctggacctcttgtgtaccctgtcgctattgcgaagtggacgcacttgagaaatttggccttccaccaatgctagccgccctaggggggcgcgccaacgtgttgtctgggttgttgttttcccgggcgacaacacccgcgccgcggcgcatttctgcgtaatgggcggaataacggcgtcttcacttccgcgaggaaacaaggttataaacttaggtggagcgactgttctttcttcccgccgcacgggcgagatcggagggattcggtgctgagaggtcgccccacaggcgggcgcgggctcgcaacaataaattgccgacgcgacggggaacagctcccacagaatccgaaatgtatcgggaacacgtacccgttccccgtgatgcatt

SEQ ID NO: 358905 - DNA, 850 bp, Homo Sapiens
  misc_feature (186)..(186): n is a, c, g, or t
  misc_feature (223)..(252): n is a, c, g, or t
accaaatgcatgtttttatttataagtaccagctaaataataagaacacacaaccacaaagaggagaccaccagacgctgcggcctagttgagggtggagggtggaagactaagagaatcagaaaacatacctgtttggtgctatgcttaatacctcagtgacaaaataatctgcacgcaaaaccnccatgcaccaaagcaaacccatgtgtacgccgaagcnnnnnnnnnnnnnnnnnnnnnnnnnnnnnnccctgggtgggagagattgcaatgtaggtgagaggactgatttttgctacagatagttgtcctggtgcagctgtactctgatttattactgtgtgcatgcagacatatgagattatgaacagctgattcaaaatgctaggttggtggagaaaacaggttgctgctgcagatttagtgtctgggggtggggatacgccaggagacttgtagagacttgtgggttcttggcaagaaacactaggatcaaaaacgccgtggtgaaggtcctgagggtggtgcctactcctgggaggagggtggacatgtcaatgtctagtgtgtgtgtttgtgagtgggtgggaatcctgtggtggcagctgtgggaaaagggggtctgtcatcagagctcctttcttctaagttttcagtcctctgtcaccctgggagaatacctggaatcacaggacaatgggcagtgtgacagcctgtgaccagacagcatagctcccattcccaaacacctagagttttattccaggccagacttctgtgatatctttttcctggcacccgaatctgtagagtttgctgaacattaaacaattctccaacaccaact

SEQ ID NO: 358906 - DNA, 608 bp, Homo Sapiens
  misc_feature (72)..(72): n is a, c, g, or t
tataataatgctgtggccatttctatagaaagattacttgcaagtgtgtgtctgaaaataacctcttgaatntgtgtgtttatgtgagttctgtctaagagatcagataagctctggaagcttcatcatctgtacctacatgtaactgtatctgggttacatgggcaggcggtaccaagtcctgctcttcgatggggtggctgagagataaaggttcctgaactctccttgctgtgtatgcaccacatctgtacttcagagaggtggaaaatcatctacaacactgcgtttcttgtggttgtcttaaactgatttcatgtcctatgcaagtgttttctacaacctgcataaccagtactttgtaaaacttgtttacgcttcaattgtacatagtgatttttaaagaaatatatagtatttttatttaggtacctccaaacttgaattcgtctgtgtgaagcattgtaaaacgatacatttctcttttgagtaccattacagttgtacagaggttttcactgcttctatttttctactgttactgataagcatgtaacactgactttatcctacatatagttggcatttcaaataaatggcttgtatag

SEQ ID NO: 358907 - DNA, 1180 bp, Homo Sapiens
  misc_feature (623)..(651): n is a, c, g, or t
  misc_feature (790)..(835): n is a, c, g, or t
  misc_feature (944)..(972): n is a, c, g, or t
taagaaaagatatttattatttacaccactgaaattagtcctgtaagaacaatatacaccatgtttctttaaaaggatcaattcctttcaaatacaagaactgtataaagcaatattgtcaacacaaaacagtggtcacattacgtatctgcaggcttaagcattgcaaataatatatttttttaatcttatggctagatattttcactgaaacagtgttagcacttagacaagatatagctggaacagaacaaaaactttttgttcatgctttttaggaatgaatcagtgatatgtcccttttaaaaatttattgcctttaactgcttttatgacaatggttttaggaagattctacttagccaccaaaaagagactcattcttgttccttagtttttattcttcagtcttctgtttctcatactaagacacagctgtgtcaagactgacattttccagctttacttggacatgtacacacatacaggcctaactgagaccgctcagaatttagaaatgtaactagtggcatacagaagagaaattgtgtctatgacaaagaaataaaaaattcttggtaattttaagcatagcaaactaggttctttaattaaaaagttannnnnnnnnnnnnnnnnnnnnnnnnnnnnaaagggaaaagtactagtttcaacatgggtatggttttagatttagtcagacaataacacaatgagacaaaaacacaaaacataacttgtttccaaagtcacaaaatgacattgttgagtatacatttttctccacttnnnnnnnnnnnnnnnnnnnnnnnnnnnnnnnnnnnnnnnnnnnnnngtgggagggtggggtggtcagtaaccaacgctggagaaaatatttttcaagcgtaacagaatattcatataggggacaagcatttcatagcatattgctatcatcttcnnnnnnnnnnnnnnnnnnnnnnnnnnnnnctggaagaccaagtataagcagtatggtatttgcttcagtgtccagcactatcataatgatttctagcataaaagcaagaagttcttggatcttaagtatcttcaataactgccagtataacttgtaactactgtccttgcttctttgagagatatctttcccacatatttgatccggaagaattccggaaccaggtaccaagccttc

SEQ ID NO: 358908 - DNA, 816 bp, Homo Sapiens
caaacaaacaacaactttgaaacctaggaacaattttggacctgttggagcaaaaatgtgtagttgtcattgaaggtgtgaacataccctacctctactctacatgtggaagacctgacccacagaggacatgaacccatgaagaagagtgatgtgacatgttttgcattttattagtaccatgatctaaccaactgagctaactggccacaccattttatcctttataatgatcactatgagggctgagtgcagaatggagtgtatgtggtcaagagtggaagctgtgaggctattgcagtaatccagaaagaaaggtgacaatggcttagacttcagtggtagtgttggaaatggacataaatagacatattcaggaaatatattgatcttagatctaataagacacgtaatagattagaagtagggaaattaatgaaaaagcagaattaaggatgacttctcactggcttgaaatgctaaatggatgacggtgctgtttagtgagttggggaagactgggcgtggtgatgggtgtagaaattgagaaaggaaaatcaagaatttccagaactttcagagcaatgttaaatactttccttgatagtgggtcagtcatcatttataagtgcatttctaaaaatattgcttaattttgcttttgagctttgtataagtggaattttgcgtgtactgattattttgctcaatactatgtctttaagattctctgtattggtgcatgtggctgagtttatttttgatgctgtgtagtgttttactaattaataaatcataattcagcttttactgttc

SEQ ID NO: 358909 - DNA, 1355 bp, Homo Sapiens
  misc_feature (47)..(47): n is a, c, g, or t
  misc_feature (180)..(180): n is a, c, g, or t
aaaatgcatgataagcaacgcagaaggcttttatactagccaagcanaatctgagctttcaatcacaatttctttcaacgaaggtgtgagcatgaaaaaaatccagaagcacagatggtattttacatctgcacatgcatgttctttgttctccatttttatataaacctctctcttttnttaagaatgatagaatttaccagtaagatgcagaactacttaattgcctctagaaatgttcacacctccatttcacatttttagcagcaatttaactgcctttaagtatatgtagaaagatggaagggtggaccttttaagctcccctgtattacaaagtgaataatttcagaagattcaattcctccagagagctacaatttttccagcacttaaaataactgcactccaccatccttatctctaactattttcctaggattaatgctaacttttcactggatcttaaggctaaaatgaacttcagagatcatgttacttcagtcctctcctcaaaatatgagtaatcatgatccagtagggctggcagcttgttcaaggtcactttgctgcatagcacaggggaaagaagcaaagtccacctgcatcataatccacaatcacagagacaaatgtaggaagaccaatacatagctgtgtctccaagaatctatttccaggactccatcagaatgccaagcccttcttcttataaagtaagtcagattcatttgagcacatagagaagcctgacttttaaaatctaaaagcgtttctttaaaaattgaatacaaataacaggtttcactgtcatattacattcaaaccaaagataaataaggcatgaaaataatattggatagaatgaaattccaggtaaccaaacatggtacaggggactgaatttgtacatttaggtaacggggaaaataaaaatactacaacataaactaagagaaactttcaaaagcaatgttcaacttacctttagaaaaatgctctactgaaataaaatcaattgacatatcctctgtttttcatactaattcctctggcccaaacctctctcttgagctctagaattgaacaaagtacctccatgacatctccattggactatgtcaaaatctcctcgtctttatcacgtctaacaccacactcaccgccaaagcaacttgcattgtctcttgtttcaggcaacgcccccaacatgaagatatttgtgcatccagaaatctaaacattcctctgagacctcctaatcccttcagcaaatcctgaccctctacctcaatcactcctgaaacctgctaaatttcctccatctctgtgccactcctgcctgtggaaaagta

SEQ ID NO: 358910 - DNA, 463 bp, Homo Sapiens
ggaaaacaatgagatagaggtagaagaccagttaggaagttacttcagtcatacagatcagttgagagattacggtggcctagatgatggtagtagctctggaagtagaattaaaggatttgaacagtagtgtaaataatgattctaaaattatatgaagatgttttcccacccatagtctgatgtattatagtttatgatacttgaacaatgttctaagatctgcatgagataagaatactgtagaataacataagaatttaaggcagtggctttgagacttctaaatatttttcactctcaatatataccattataggcaggtttaagaaaaagtcataagcattaaaatcagattaactctgaaatgatgagagaatagaggaatattctagaccagcatcattccaagagatctaacataagccacatatgtaattttaattttttagtagctactttt

SEQ ID NO: 358911 - DNA, 1599 bp, Homo Sapiens
  misc_feature (118)..(132): n is a, c, g, or t
tattgtcacttttaattacaaaaatcgtattgtgaaatagcgcactctatactgagatgaatgaggggaaaaaagtcaaaactcctttcaaaactatattcaaagcatcagaaaaaannnnnnnnnnnnnnnacaaagttatgtataagtcatagggaccaccaaatactgaaatatgaagactctatgaccaaagcaaaactgataaggaactgtgtgaagcaagacaggaaaattttgtatttaacactctatagaacttcacagtaaagctggaatttagagactaatggcttaacaggagtactgccaacaaggcctttcctttctcagaatcatctcctaatattcgtataccattgacaagttgtaacagcagacttagacttgtgttttcttaagatggggcttaataaggtgcacaaatatgctgatatcctgtattatgagcatgtaaattattctcagggtttaaagaaatacagaaaaagaatgttaagtattctcagtccaacgtgctttgcatcatcaacaaaatgacaagtcaaagtattttgcagggatcagatatcaatcaacctccataacaagttaggtatatcaaatactgctgtaaaacccatccagcaaaaactgattattgtggatttcagtacaaatttccaagttgtcacacattactgatgatgatcagggcaggcatggaattctgctgacttgtttcaaacactgtaacttggtccgataacttggcaaataccctaggagttccaaggttataaacacctgtatgaacaaagcatgctttcagctgcagactgtgaatctcctggcttttaagttgaagtttatactgtgtttgtccaagccatgtgaatgatccatggatttccagtgcttctggacttgttgttttatgccgaagatcaactatgacatctacatcagccttagaacaattggaaagtaaaagagtgactggtactaaacaaaggcttttttgatgaaatggatgattaaatgattctgggtagtgaagactcgttttaatgagactagaaagctgctctactgatggccttgaggaaactgtaatgttttctggcctgaaaaatttcaatagttccatttctggtggctcctgtttctgaggatatgaaaaggcttcttttcctatagtgcgaagaataacatgatgttgaccttccaaaataagctgtttactgtcttccacaacgtatgccttccataatatgacatattcaaatctacctcactgcatttttggaaccaacctcacagcaccctctgttgactgtttttcctgtatgcacaggcaagtgagcttgtggttttttcaattccagaagataaacttcgataaaagaagtctgcacatgggcttgctgaacttattatctgttcatttccaaagatgatatctgcaaaggtatatttttcagaggactgtgtggccgcttcttctttctcacatcttattgccttaaagcaaaactttcccttctccctactggcaagtttggtatctttgttttcagaaagatttacagatttctgtaacttccagtgtttgctact

SEQ ID NO: 358912 - DNA, 625 bp, Homo Sapiens
cgctgggtctaagttgagagtttatactgtgtttgtccaagccatgtgaatgatccatggatttccagtgcttctggacttgttgttttatgccgaagatcaactatgacatctacatcagccttagaacaattggaaagtaaaagagtgactggtactaaacaaaggctatggaagaaaaataaacaaaaaagttatatatttttttcttcttaaaagcaattttcctgaaaataacacttaagactatgtaacagagcataagctccttaaaaacaatcagattcaagaaggaaaaagctcaagttccaaaatcactcaagacaaattatattgtaaataaaaaatatattaatacaatgacaatattaaatatcagaatatatacattcacagaactattttattttcatttattaatcttctaaaaacaactaaaatgtttctagatatttcacaaaatgaaaaacaaaatctcaacttagatcaatgaagaaaaagtaaaccatgaaaatgccacaactaatactgttgtctttgtgcttattaaaaattacttaattttgagacttggcctagactgacatttgtttttctagccaagattactcatcggtccgaccga

SEQ ID NO: 358913 - DNA, 429 bp, Homo Sapiens
gacagtataaaaagaggtttaatttgagaaaaaggattaagttaaatagtaaacttagtgtgagattttaatcacaagtacaaaagagtgaagagcagccttcatgacaaggaatcatgtgaccagcccccaccccaaacataggttatcacatgtggattttgtttcattccgacaaaggaaaaggcccatacagttatcttaagtgttcattatatagagaccttatttaaccatgctcgattatcttacggaaaagaaaaacattacgataaatgtggtttccacatatcctagttctgtaaaaggtcaggtgtctcataaagtttgggttttggtgaaaatgtttgtacatgctgatgttaactactgcaataattataggattgtaaacggtaaaataacctgtatgactttgacctcgtgccg

SEQ ID NO: 358914 - DNA, 1538 bp, Homo Sapiens
ggagatctggtctccctggtgttccaggattcccaggcatgaaaggacccagtggagtacctggatcagctggccctgagggggaaccgggacttattggtcctccaggtcctcctggattacctggtccttcaggacagagtatcataattaaaggagatgctggtcctccaggaatccctggccagcctgggctaaagggtctaccaggaccccaaggacctcaaggcttaccaggtccaactggccctccaggagatcctggacgcaatggactccctggctttgatggtgcaggagggcgcaaaggagacccaggtctgccaggacagccaggtacccgtggtttggatggtccccctggtccagatggattgcaaggtcccccaggtccccctggaacctcctctgttgcacatggatttcttattacacgccacagccagacaacggatgcaccacaatgcccacagggaacacttcaggtctatgaaggcttttctctcctgtatgtacaaggaaataaaagagcccacggtcaagacttggggacggctggcagctgccttcgtcgctttagtaccatgcctttcatgttctgcaacatcaataatgtttgcaactttgcttcaagaaatgactattcttactggctctctaccccagagcccatgccaatgagcatgcaacccctaaagggccagagcatccagccattcattagtcgatgtgcagtatgtgaagctccagctgtggtgatcgcagttcacagtcagacgatccagattccccattgtcctcagggatgggattctctgtggattggttattccttcatgatgcatacaagtgcaggggcagaaggctcaggtcaagccctagcctcccctggttcctgcttggaagagtttcgttcagctcccttcatcgaatgtcatgggaggggtacctgtaactactatgccaactcctacagcttttggctggcaactgtagatgtgtcagacatgttcagtaaacctcagtcagaaacgctgaaagcaggagacttgaggacacgaattagccgatgtcaagtgtgcatgaagaggacataacattttgaagaattccttttgtgttttaaaatgtgatatatatatctataaaattcctaggatgcagtgtctcattgtccccaactttactactgctgccgtcaatggtgctactatatatgatcaagataacctgctgactagtcaaccatgaagattcagatggtcctcagccaatgcgccaaagcaaagtctctattatttttcctactgaagaaataaggaagtggaattccttttttggggtcagaaaggactttctcccaggaatttttagatggaaaaatatttgatttgtgccccagttaactaaaaatgggtccattgaaaaagttcattttagaagaaggattcctcctttgggttaaaataaaaaggctggcggttttgggggggaaagaatatattttttcccggggggcgacctaattcttgggcgga

SEQ ID NO: 358915 - DNA, 826 bp, Homo Sapiens
gaagtttgtgttatttgcaacttgttgaggaaacagaagagtagattgtaaccataagacactgctaagactagaacccgaactgaacactaaaataaaaatgaaatgttttaaagaaggcaaggcttaaataagcctcatgaatttttatagccctctgcattcttcccaaagcacaaactcatggttacctgaatatagggaaccagatatggttcttgagaaaccctcatggtaccattcacagcccataaagtttattttctaggactgtggtagatcttgaaatcatatttatatttggccctcaaggctatttttgttgcattatagcatataggcagcagctctgaagcttcagtaacactaagaaatttatgtgtaaatatagcagtcagggaagagaattttaaaaaaggtcattattgaagaagctgaggggacagggtagagctgctgcaatatggagatttagggtaatatggcaaggtcctgctgcttgaagcctgtgagtgggttgtggatatgggactggtggagagtgagactgttaggaaagttgtatctatgaataagggcagttgaagtagaatttttaccagtccacttgaccttcttcttccctaaccactggctcttgagccagcttgggatttccctggccattgccaatacctggccatctggcttccaatagtacagtggctactcaagttcaagcgaagaacttccagactctggtgactgttacttcccagagccaaccactagtgcatatgttagggaatctgggcttccaacatgaatggattccttaagaaaaagg

SEQ ID NO: 358916 - DNA, 512 bp, Homo Sapiens
gggcttgtattttacttgaataattgatatcttcctgtgtaatgatttgtgagatgagaattaatatttgactagttagaattaattaaatggtaagggaacacagggtactcttatgttaaataatgtatgcaaatagagtctattttcaactaatatggccacaggagccttttgagattcattgatattaaacacaattaatgaaattttaaattgttaacagaattgagaacttgaacaacacttttagtactgcagcatttttgtgccctaaagtatgtaatgatttataaatgtgccatacatacactacaacataacatttgctttgttatgcattttatttctctggggacaccattgcactgcagtgcacacatatttataaacatttgttatatttttggaaacttgctaatatttattaagtcatagacttttctggaggacttaaaaattcactaaaaatctgattatgtcttaaatgttcagtttatctttggtttatt

SEQ ID NO: 358917 - DNA, 1176 bp, Homo Sapiens
atctgagatgaggggctcccagaggcttgggcaagtccagcggggggcatcgggaagaccctctctggtgctggtgttctgggacatgacactgaccgccccttatttgttaaaatttgcaatatctctcaagtaaataatagccaacatttgttgaatgctttcatgactcccgggctaaggcctttatgagcgttgtctcaaggggccccaacagccatcccacagggagggggataacagcccccatttatagataagggagctgaccggatgctctgagaagtggcaggtgttgaaggaaggataaagcagtgatgggccagaatccccaaggttcccttttttgttcatcaggcccttcctgagatgtgatttttaatcttttaactttttttaattaatagcaatgcgtggcctcatatttctatgaaccatttagtgatactcccgcttcctgcatgccacacactgtgctgggaattgctcatgggttgtcctgtttcatcttctccgtagccctgtgagatcggcaatattagtccccctacagccaaggaaactgcccagagccacacaactcttgaggggcgaggagggcttgaacctgagtctgcccagctccagaactgagcttgcagccattagccacagctgtctcctgcatgtctgagcaaagaaaggcctttacacagcatcaccctgtgccatcccatgcaccgtgggactcagctaaaggactgtgcaaagagggggctcctgagttggatttaggcaaaaggggcagaattcgtttgatttttagagaaaatctctggagagtttcttttgattcatagaattccttttagatttctttccagcataccaactagctttagtagtgctgctacaaccagctcttataagtaagagtgaaaaagtattcttttcttctttaaaaaataagtttttcttgcttatagttaattctagaaaggcaatactaaaggtatatatttttttcaaaatgctattttttactgcacttgataattatcctgacagctctgatctctgtaatagattcactcttcagctctgggcagaaccagaggcagggttcacaccaaatttgtaaataccatatgtgggtctggtgtccaggaacttttttctttctgttaaaaaaaagaa

SEQ ID NO: 358918 - DNA, 507 bp, Homo Sapiens
ggtgaaacaggatttaaatgcaaaaaaaacctattggaggcttttggcaccgtggctcactagagggacccagcatagtagaggtttctcttgttgcagcttctgaaaagttcaaaaaagaactccaggccgttcttccctcaaacccagtgagagtttgcagagaagtgccccctgcagggctcccgtcccagaacaccagcaccagagagggtcttcccgatgccccccgctggacttgcccaagcctctgggagcccctcatctcagatccctgtgttgaacatgacactgactgtcccttatttgttaaaatttgcaatatctcttcaagtaaataataggccaacatttgttgaatgcttttcatggactcccgggcttaagggcttttatggaggcgttgttttcaagggggccccaacaggccatcccacaggggagggggggttaacagcccccatttttggttaggggagttgaccggtggtttgaggagtgggcggt

SEQ ID NO: 358919 - DNA, 694 bp, Homo Sapiens
  misc_feature (56)..(56): n is a, c, g, or t
  misc_feature (58)..(58): n is a, c, g, or t
  misc_feature (133)..(133): n is a, c, g, or t
taaaataccataaccaatatgattctaccaaggtcaagatttcctagaagcgaagncncagtctttcaaaggtagtatgctaggaatgccaagagctctgctgcatatgaaaaaggtcaccaatgagcaaagnagcttccagctcaaggtattctcaagccttccaggaacaccacaagggctttccacagtcccctaggccttcttccttactgaggcatatgcagccaggattcaactgagaccaacctgatcaaattcccaccaaaggaggactcaatgtatatgggaaccaaatagaataaaaactgtatttccacagttattgcaccatagatagctctccatacacttctatagcaaaaatactaagtccttactgctacaagagcctatcctgaaggatccttaaaagcagcattaccttattgcatttatcatcaaagcagtaaacacaaggcttggtacactggaagtgctcaataacatttgtggaatgaaagaacatggcaaaagaaataaggaaaccaaacagaattcggcagaagatttaggtcttaattattctgaaaagcaataaaaacagaattaacctagggactctaataataaatatcaaacaaagtgacaataaattaacttcacaattaaaaaaatgtttttaaagagttaccttttctacctagtattcctg

SEQ ID NO: 358920 - DNA, 945 bp, Homo Sapiens
  misc_feature (123)..(123): n is a, c, g, or t
  misc_feature (156)..(156): n is a, c, g, or t
  misc_feature (244)..(244): n is a, c, g, or t
  misc_feature (269)..(269): n is a, c, g, or t
aaaccctttcggttgttaaaaatggttcctttcttcgctaagggctactttccacatcattataatctccaaggctgatctgtacacttcaagggccaattctgacaaagcatcagactggcntgtaaactagtgggtgaataatgtttccctctnggcattttaagctgtgaacataggtacttacatcaaggatttccagtcactctcaaaaagcaatgtctgagcctttcattttcacccnactggaatcaagcttgcttgttggnacagtatgacttgtgaagaagtttctagtggaaaaatccagtattcccttctcattccacagacaatgctccactgggacagaagcccagccaatctgcttccacttttctgtaacaaacagggtgaagtacccaagatgtgatgtctacacttgagtctgatgctgagtctccacaaagggaatgtgaaggctggcgaggctgagctctcccacgctctcgtagtcactcatggctacttcggaatcgtcaaagccgcagttggcagacacatccgaggatgaggtgcctctggaattgtgcaaggacagagacacgctgtctgctgggcctgtgggctctgtgccctgattcatgctcacagcaaaagtactaaattcacagctggcaggcgggcccaccaaatccgtttcgttggggaatgggtgaggagggagatactggctaggatgaaactggggccttctcctgcagtctgggctcagtgtgctggccagggagacaggctgggagggtggcagggcctcatattggtctgggaagtcctccgggagaggaggaggcagctggtcctgactcaagaactcctcttcatgagggggtgggtattcactgtcaatgtcataaccacccggtagtaatcgctctccagctacctgtgaaaagtaggtaccga

SEQ ID NO: 358921 - DNA, 1424 bp, Homo Sapiens
agcgggccttttcgcgcgcggcagcaggagccggcgcgggagccgcgagcggcggcgagccagcacccgggccggctaagccttgtccggagcccggagccccgcgcggggcagccccccggggaggagcctcgtgctctgggacgcgtgccgcgcactggcacggctggggcgcgagccaggctgcacgattcactgcgtgctgtcctcacttgttctacaatgagtgccaaatctgctatcagcaaggaaatttttgcacctcttgatgaaaggatgctgggagctgtccaagtcaagaggaggacaaagaaaaagattcctttcttggcaactggaggtcaaggcgaatatttaacttatatctgcctgtcagtgacaaacaagaaacccacacaggcgtccatcacaaaggtcaaacagtttgaaggctccacatcatttgttcggagatcacagtggatgctcgagcagcttcgccaggttaatggtatcgatcctaatggggattcggcagagtttgatttgttgtttgaaaatgcttttgaccagtgggtagccagcacagcgtcagaaaaatgcaccttcttccagatcctccaccatacctgccagaggtacctcacggacaggaagccagagtttattaactgccaatccaaaattatgggaggaaacagcatcctccattcagctgctgacagcgtgaccagcgcagtgcagaaggcaagccaggccttgaatgagcgtggagagcgattaggccgagcagaggagaagacagaagacctgaagaacagcgcccagcagtttgcagaaactgcgcacaagcttgccatgaagcacaaatgttgagaaactgcctatcctggtgactcttcttaagagaaactgaagagtttggtcagcagcttttacaagaattcaggacctccgcttgcttctctttttccaatatttggacacttagagtggtttttgttcttcttttccagatgttaatgtgaaagaaagggtgttgcatttttacatttccctaatgatcttgctaataaatgctacaatagcatcagcttcattttgggtttttgcctcctcccactgtgtgtatgtgtgtatatgtatgttttgaatatgttttctttattaaaaaatattttttgtagtttgaatatgaaatttggaccaaatgataaactgcgctgagtctaaactggcaacatgtatttttttctctgatattaagcaggaaggcattttaatgtggtgacatcagatgttatttttcctagatgaaaataaaagtcaagcagtgattagtttccactcactggtcctagctacacttaatttgaagattaaaattctacattgtgggaaaacaattgaatttattgggaaaaaacagcaggtccttagatttt

SEQ ID NO: 358922 - DNA, 954 bp, Homo Sapiens
  misc_feature (412)..(704): n is a, c, g, or t
tttaattaagggtggaaacattttctttggttcccacaatggccactacaaaggctttttttccataaagaaccagaggcccaagcaaaagtaggctactaagtactggaattgaaaatccaactaaattttccggagtcatttaacatcaaatttgggctttgtaatctatttgtattcaattctcagtcattactgaaggtcatttgacatcaaccatagagagcagtgagatttaaagttgcatggaagtaccgctgaaaacttctaacaacagaaagatgagtttggagtgtttaattttactacatagtgacatatattcagaaagttgtcatacaaggaatgatgaggagttacaaatccaacttggaaacccttaatgctcactatcaatttgttgaaagtcaannnnnnnnnnnnnnnnnnnnnnnnnnnnnnnnnnnnnnnnnnnnnnnnnnnnnnnnnnnnnnnnnnnnnnnnnnnnnnnnnnnnnnnnnnnnnnnnnnnnnnnnnnnnnnnnnnnnnnnnnnnnnnnnnnnnnnnnnnnnnnnnnnnnnnnnnnnnnnnnnnnnnnnnnnnnnnnnnnnnnnnnnnnnnnnnnnnnnnnnnnnnnnnnnnnnnnnnnnnnnnnnnnnnnnnnnnnnnnnnnnnnnnnnnnnnnnnnnnnnnnnnnnnnnnnnnnnnnnnnnnnnnnnnnnnnncaagctgtttcttaactaagcttctgaagcaggaactcctaaagtgtcaataggcagttttacttacagtagtagttatatactaatgctgcttgcagaattttttttccctttagagttcacagaagtactaccacatggagacaaaacaaaacagtaaaaatagtataggtagtaaaaaggccaaaactaagaaatttggggccataacattagaaaagtttgaaaatatactttgcccacactagca

SEQ ID NO: 358923 - DNA, 1115 bp, Homo Sapiens
  misc_feature (396)..(407): n is a, c, g, or t
  misc_feature (1003)..(1003): n is a, c, g, or t
  misc_feature (1070)..(1070): n is a, c, g, or t
agcggcctggaactgtaattgactctttactgcagtaaatgttacagacttaaagtcacaataaaaattagtgatattctcatgcctggacaaaatctttaattaaaacagtgaagacttctctataatttcaattaatggaagttgtagatcaatgaataagactggaaataataatttgcttaagaacttttagtctacatatattaatataacattaaaattgtacaactggtgattgttcaaattgttgtactactactcttcaattgtactgtgcagggaagttgggggaacagttcatactatagagagttactgtttagatgtatgtgtaaatcgattagctatttatccaactactgtatatttaggtaactagaatttcaaagtagnnnnnnnnnnnnctgtgtcctgtttggcacatagaaagaagcagatcagatggtcctatgttgcgctgttatatatgaatgttgggactgtacatctaaagaatgattccgtcctaacacccacccagcctgtttgaacacattctaatggtctaacattggttgcatttaaagtatgagatgactgatcttatgaatgttctgtagaaaatgttatcaactttaacagtcttttgcgagtatacatgtttttttaacaagttgaaaactgtttcatctgaacctttcctaactttttttggccagtttgagttcaaatcaaatacaccttaagtactggtttcatgttctcttgaaacattgaattgtacgtaaatataaaggatctactgttgcggaaaattaagaagctaaatactgctcagttatctttgcctgcgtgtatatttttaaaaattcactctgaagtgttatggatgcttttctttgagttctaaattttggtgggaattactttatgtctcccagttaagaagagtctccattttccagaaaatacagctaagcaagaaaaatatcttttaaatactttgcctttaaaacacttnttattttgtttttctattttaaaaataaaatattattttcttgaattcttctattgcgtaatccagntagaccatatttctctacaaattaaaactatgttgatttcatagt

SEQ ID NO: 358924 - DNA, 794 bp, Homo Sapiens
  misc_feature (202)..(202): n is a, c, g, or t
  misc_feature (224)..(258): n is a, c, g, or t
tttaggccctacacacgtggaatgaatgagaagtatgaaagattataatatatcaatgcaagtaaagatatcacaatccttaagaactctttaagaagcactgaatcccatagggataaaagtgattaaattgtgcatagtaaccctcgcacagagcattcagtaggatttgcaccattaccaaccctccatgcatttgctngtgggcattcaacatctgtcannnnnnnnnnnnnnnnnnnnnnnnnnnnnnnnnnncctctaaactctggataattattattcattcttatgacagcaactgtgtaatcagctgtcgaaacactgtgaagggcaaaagaaagaaagccacaaaatattgtgtttctgtgccaagattttacagcgagcaagggagagttagaaaaggaattctgagatttcagagtcttggtctcttcacctttgcttggaagaaaatatcctttcccttcattagccaacactttcttgatcctgagagtaggaaagggaacactgagtcttttcagttgaaggccgtccttgcctgctggactttgatctattgaagtggtgatgggtgttgcggtttcagccataaaggcatctggcatagtaggcaagaagggccagagacccgaggagagttatctgtctctgttaacttcagtgtatccctctagttccccagatgcacctgtttctgattcttttgaacttaaaggatgtaagaaggcttttggtagcttccatctgattcaaggctttggcagctgctggcaggaacaaatttc

SEQ ID NO: 358925 - DNA, 1311 bp, Homo Sapiens
  misc_feature (747)..(763): n is a, c, g, or t
  misc_feature (864)..(897): n is a, c, g, or t
ggaagtttctgcctcttacaatggagtcgatggatgcttgagctccacattggagcatcaggtagcgtctcaccaccagtcctcaaataaggaagaagagccatctgccaagaggacctgtccttccctatctcccacatcaccactaaataataaaggcattttaagtcttccacatcaagcatctccagtatcccgcaccccaagccttcctgctgtagacacaagctacattaatacctccctcatccaagactataggcatcctttccacatgacacccatgccttacgacttacaaggattagatttctttcctttcttatcaggagacaatcagcattacaacacctccttgcttgccgctgcagcagcagcagtttcagatgatcaagacctcctacactcgtctcggtttttcccgtatacctcctcacagatgtttcttgatcagttaagtgcaggaggcagtacttctctgccaaccaccaatggaagcagtagtggcagtaacagcagcctggtttcttccaacagcctaagggaaagccatagccacaccgtcacaaacaggagcagcacggacacggcatccatctttggcatcataccagacattatttcattggactgattcccaggccctgctgctcccatccccaccccagatcgaatgaacttggcagaaagaagagaactttgtgctctgttttaccttactctgtttagaaaagtatacaagcgtgnnnnnnnnnnnnnnnnnagggaaaaaattaaaagaaatgtacagagaacaaaactatattttcagttttacttttgtatataaatctaagactgcctgtgtgataaaacacttgtttnnnnnnnnnnnnnnnnnnnnnnnnnnnnnnnnnncaagcacccacaaaccaccttcagttcatttttttctggattctgaagatttttcattatttgtcctatggttttggttttatttgacttcgatggcattattttatttgcaataacagaaaaggaattgcatgtatgaagttttcaatcgtgggcttttctttgttgtggggagggggtcgggggatagtttgatttccattttctgaaaacgacagacttggattctgtttgtgtgtgcatattttatccagccttaagttataaagctcatctgtcccgctgcattccctgtgtattttcaggacatggctcgtgggtgtgtgtgttcattgtgtgcgtctgtatgtatttttctgtcatcactgttccctctcctcccgagtgtgcattcagttaatataatcagttgct

SEQ ID NO: 358926 - DNA, 774 bp, Homo Sapiens
ggggaaggttggtttgtaaattgcgggattggttctccctggattaagggaaagggaaagggaaattctaaattccttgttaaagtccgtaaaggccatggggggttcatgtggaaaaaggatggcctatagttctgggaggagggagggtattaaatgtagcttgtgtctacagcaggaaggcttggggtgcgggattctggagatgcttgatgtggaagacttaaaatgcctttattatttagtggtgatgtgggagatagggaaggacagggccctcttggcagatgggctccttccttccctcttcatcagatgaactgtcctatggttaggtcaatcacttcctactttcttgtttttatttgaggactggtggtgagacgctacctgatgctccaatgtggagctcaagcatccatcgactccattgtaagaggcagaaacttcctgtacttccttttttgatctcatcggtgcccaagtgccatcctccttaaattgtatttcatcacagtctgtacagtactttaggatttccataaacaagccatcaataataaggtgttcatatggagccttcttatcacagacaggacaaacccaggttggttttttctcattcatctgaatgtaaagagttgcgtcaaaacattgtagatgagaacatgtaagggcccgacacggaattgtcagccgcattttaccaagtggacatagtagagaaacccttaggctggttgtagctatttcactgtctggatccgcagtccc

SEQ ID NO: 358927 - DNA, 421 bp, Homo Sapiens
  misc_feature (21)..(21): n is a, c, g, or t
  misc_feature (28)..(28): n is a, c, g, or t
  misc_feature (36)..(36): n is a, c, g, or t
  misc_feature (118)..(118): n is a, c, g, or t
ggggaaaaggaacaggccccncctgggnaagaaggncccctccctcccctccttccatcaagatgaaactgtcctatggttaaggtcaaatcaacttcctactttccttgtttttatntgaaggactggtggtgagacgcctaccctgaatgctcccaatgtggagctcaagcatcccatcgactcccattgtaagaggcagaaacttcctgtacttccttttttgatctcatcggtgcccaagtgccatcctccttaaattgtatttcatcacagtctgtacagtactttaggatttccataaacaagccatcaataataaggtgttcatatggagccttcttatcacagacaggacaaacccaggttggttttttctcattcatctgaatgtaaagagttgcgtcaaaacattgtagat

SEQ ID NO: 358928 - DNA, 774 bp, Homo Sapiens
  misc_feature (599)..(599): n is a, c, g, or t
ctttggggaaggatgcaatggacagatttgaggtctgttctggagcatgagccaacaggatgcaatagggctactgggggtggtaatagaaagagaggtggtggtttctcactgggtgtgttgggaggaagatctttggggaagcagggattgggggatggatgaagagtgatggctctgtcctccttcctcctttggggattctccgatggttctgcacaaacataggtgccatgcacaacgcctcaagcttggaagtggtagagctgggatctctacctggagagtccttctctaaatctgtgcggattctgcagaaaccagccactgctgacgggatggagtggaaggtggcttgtgccatggccaagctgggcatggatgtggactggcaagtccagtacacacatgtgtgcatgccccagatgccatcacactgacatggtcagaaagcgatgtttctgcctcttggccccaaagtctctgcccagaacttggctttttgcaaatgtcctgaagtcttccagagcctcttaggtgagcctcttccaagcactcagggggaagcctcactggcttactaggaagctaagcttggncctgcccaggaggcaaggggatgggtctaggacaaggaccctccagctccccaggaccctgatagtgagaaacacacatatgggctcaccgccctttgcctagcctttccttggagatcatttcatcctgacttcagaggtcaaaaaagcttacaccagtgagcctgataaagcc

SEQ ID NO: 358929 - DNA, 866 bp, Homo Sapiens
  misc_feature (685)..(685): n is a, c, g, or t
gtccagccttggtccagggccgtttgccatccagtgagaacagccggcacgtgacagctactcacttcctcagtctcttgtctcaccttgcgcatctctacatgtattcctagagtccagaggggaggtgaggttaaaacctgagtaatggaaaagcttttagagtagaaacacatttacgttgcagttagctatagacatcccattgtgttatcttttaaaaggcccttgacattttgcgttttaatatttctcttaaccctattctcagggaagatggaatttagttttaaggaaaagaggagaacttcatactcacaatgaaatagtgattatgaaaatacagtgttctgtaattaagctatgtctctttcttcttagtttagaggctctgctactttatccattgatttttaacatggttcccaccatgtaagactggtgctttagcatctatgccacatgcgttgatggaaggtcatagcacccactcacttagatgctaaaggtgattctagttaatctgggattagggtcaggaaaatgatagcaagacacattgaaagctctctttatactcaaaagagatatccattgaaaaagggatgtctagagggatttaaacagctcctttggcacgtgcctctctgaatccagcctgccattccatcaaatggagcagganaagtggggaggagctttctaaagaagtgactgggtattttggtagcatttccttgtcaagttctccctttgcagaatacctgtctccccatttcctagaagaggacccaggttcctagtagtttccggttctaggctttccctttcaggaacaggtcagatcaccaaagtggtcttttgga

SEQ ID NO: 358930 - DNA, 336 bp, Homo Sapiens
tcctactactaccacccttcagcctacaattcagtggcatccctcaactgctgacatcgaggatctagcaacagaacctaaaaaattgcccttcccattgtcaactttggcaacaattaaggatgacacaattgccacgatcattgctagtgtagtgggtggggctctcttcatagtacttgtaagtgttttggctggaatattctgctataggagaagacggacgtttcgtggagactactttgccaagaactacattccaccatcagatatgcaaaaagaatcacaaatagatgttcttcaacaagatgagcttgattcttacccagacagtgt

SEQ ID NO: 358931 - DNA, 615 bp, Homo Sapiens
tgttcatcaacagtgagagactccatagtttgggcttgtaccacttttgcaaataagtgtattttgaaattgtttgacggcaaggtttaagttattaagaggtaagacttagtactatctgtgcgtagaagttctagtgttttcaattttaaacatatccaagtttgaattcctaaaattatggaaacagatgaaaagcctctgttttgatatgggtagtattttttacattttacacactgtacacataagccaaaactgagcataagtcctctagtgaatgtaggctggctttcagagtaggctattcctgagagctgcatgtgtccgcccccgatggaggactccaggcagcagacacatgccagggccatgtcagacacagattggccagaaaccttcctgctgagcctcacagcagtgagactggggccactacatttgctccatcctcctgggattggctgtgaactgatcatgtttatgagaaactggcaaagcagaatgtgatatcctaggaggtaatgaccatgaaagacttctctacccatcttacatctagtagttggtctgaaatgtcaggtctgatatggaagcacccattatgcgctgtgg

SEQ ID NO: 358932 - DNA, 845 bp, Homo Sapiens
  misc_feature (716)..(716): n is a, c, g, or t
  misc_feature (721)..(721): n is a, c, g, or t
  misc_feature (737)..(737): n is a, c, g, or t
  misc_feature (743)..(743): n is a, c, g, or t
  misc_feature (752)..(752): n is a, c, g, or t
  misc_feature (756)..(756): n is a, c, g, or t
  misc_feature (765)..(765): n is a, c, g, or t
  misc_feature (790)..(790): n is a, c, g, or t
  misc_feature (794)..(794): n is a, c, g, or t
  misc_feature (798)..(798): n is a, c, g, or t
ctgctcttttaaataaacatttgccttgcaactttctattttgtttaaaatgctaccattttttcgtaagataagagatatgtttcaacctaatttccaaattactttgggaattccatggaagaatttcaatactggatacctaaggaggttaaaaaatgcttttaaagtctcattaagtcttaagtaaatggaaattatagaataattttcctagatttcaatgtcaattctattttcttctggtatttctaagcagactgacatgattgattcttaaaagaaaacctgatttgagcaatctattgagcaaaacatttgtaaagaaatagtgcccaattaaatcagaacttattttaaaaaatatatgtcctgtactgcattgttttcattaagttataaccacaagaaatagtaacccaaatgttcaaacttctttagctgacaggccttgtttgtgtgaaacatatttattacacatacatcacactctatgcatgatctactttgctcttgagggcaggtctctgtcttattccactctgtaaactcagcacctattggagtggccacagcgcataatggggtgcttccaaatcagaactgacatttcagaacaactactagaagtgtttacaaccaatggatgggcatccagaaggtccatgccttctttcgttgtttttaagatgggtagagaagtctttcctggtcantaccncctaggatatcacatnctgctntgccagttntcanaaacatgancagttcacagccaatcccaggaggntggngcanatgtagtggcccagctcatgctgtgggtcaacagaaagttctggcca

SEQ ID NO: 358933 - DNA, 438 bp, Homo Sapiens
  misc_feature (42)..(42): n is a, c, g, or t
acagagcattttatttttctagaagagcaataacagagaccncagggtgtggtgtggcaggacgaggagcatccattttgctggtggggattgtggctaaaataatgtggctctggagccagcaatgggcagcatcttcatgactttccagcttccaggctgtaagcagagatagcatctcttctggacagccagttatgtgatagtgttctgagagtcattcctggaagtcagactaaaggctgctccttcagcctttccattcatcttgtaagcaggaggcttctgtgcatggccagaaactaacaaaagcacattgtgtctaaactaggttgcagtggtttctgttatcagcaagtaaatcctgattgataaagatactacaatatatgcacatatatatgttatagaatcaataaaaattggatactttgcttt

SEQ ID NO: 358934 - DNA, 468 bp, Homo Sapiens
  misc_feature (31)..(31): n is a, c, g, or t
cccgaaaagatgattggaaaatggaatgganggttaaataatgaaatgcagcctaacatttcggaaaagtttcctaaaagttgtacaacatgcccctacagcctactctttaaatctcccaaatcaaatgagtttcaggtggagccctctgggaggtgatgaggtcatgagagtggagccctcatgaatgggatgagcactcctacaaaaaggattccagagagctcgcttgctccttcccacagtgtgaggacacagagggaaggctctgtctatgaatgagaaagtgggtccccaccagacattgaatctgccgcatcttgatactggacttccagtctccagaactgtgggcaataaatgtctgttgtttattacctgtccagtatctttggtattttgctatagcaacccaaatggactaagaaaacaccagaggccatacctaataaaaatattgacatcaca

SEQ ID NO: 358935 - DNA, 1290 bp, Homo Sapiens
  misc_feature (508)..(516): n is a, c, g, or t
  misc_feature (1157)..(1157): n is a, c, g, or t
gtcattgccaagagcttggaaataaaaacaaaatttaaaaattaagacaatctggtagcaaaattacagctactgtaacaacagccccaagcaaaaaatcaattcagagcttgaatgcaatttgtgctttgtttctataagaatgcagtgttactctcagacatttctaaatgattagattcataaataagcagttaatttcttttcatcacaatttatttctaattcatcctacggagattatagatagaactaaaaattacttagcttttttccagtactttatataaattgagatcttttttaaacagtgatttattgtgtttcttaaggtaaaacaacaaaaacaaattctaaaattgtaactttaaattaagtggttaaaatttcagatgacagagccgataactggtaacagcttcttgaagttcatattaagagtccaattagaaacactaacaactacctggcaatagtttgaaagaatcagaagggttcggtgaagggnnnnnnnnntccgaacatgcaaaataccccccaaaacacatgaccttctttttcattttataatctaaacttgtaaaatatttataaatacatgatcattctacacaatacagatcttctagagcatttctaaaggatattacagtttttggtcttaaggaataaagactaagatggaaaaggagatgaaaacagtgaaatctgaggaagcaatacactctctacacacaagcaaactagttcatccagtcaagttagcggttacagttcagtacatgattttcaaggcaactaagaaatcaagacacagatatttccccttcctagagtttacaattctttcaaaagctccaatgtatccataaaggagtgctgatttttgtggggttttttcccagaaggaaacaaagaataaataggggaaaaaaagtttccatccctaaattcacatacacaacaagttaagctaaactataagctagttttagactacccagtgaaacagaattgttggtactatctgaggcaggtgctaccctccctagtcagttcaaaacatgatccagtaaaacaaatacacattgttatgcctcaaacaactataaagcatttcattattcttcaaatatcatgtttaattaactcctaanggaatagacttctagaatgttgtatcttaatggtgtacctgaatcaatactagcaatagaatgcaaaattcaaaattgctataaaggtaaaatcatcataaaaaggaactcaatccttatgtaaaaaaagcga

SEQ ID NO: 358936 - DNA, 1058 bp, Homo Sapiens
  misc_feature (872)..(872): n is a, c, g, or t
cagtacttagcgttactaaggtagcgaggcctgggtggcgaattcggcacgagggaaagaaatctgtctcacataatatgacagatccaaataagctttttagaattatgagaaatggtactattttatacacaatgagactcaccataagtgcggagtgtcccatgagattggtggattttcccatggatggtcatgcatgccctttgaaattcgggagttatgcctatccaatagagtgagatgatctatacctggacaaaaggtcctgagaaatcagttgaagttccgaaggagtcttccagcttagttcacatatgatttgatcgggcaaaccgtatcaagtgaaaccatcaaatcaattacgggtgaatatatggttatgacggtttacttccacctcagacggaagatgggtaattgtatgattcagacctatattccgtgcattatgacagtgattctttctcaacgtttcattctggatcaaacaaaagaatcagttcccgctaggactgtatttggaataacaagtgtgcctcaccaatgaacagactaagacatcaggcacggacaatgctttgcccaaaggtgtcctatgaataacagcaggactggttcattgctgttctgtttgctttgtattttcggcccttatcgaggttgctgctgtcaaatattttcaccaatattcatatggaaaagccacatcgagaatcaagcccctccggaagtacccggtgccacagtccagagacgagaaggatccctgaaggccctatggagaatcacaactggcgcttgacctgggaacagaaccatgctgggggaaccgactctgatgtgggccagaactgaggggaaccatcaangcaaatctcccgaggggtcaaaaaaggtaaggacgcagagtatgtcagtcagcaagccatagccgtgaatggggacaatcggcagagcacacggtcccgtaagacacggatcggaggagagccgcacccgggcacgagacacaccacggggagagccaagccagggagaaagcccagagagagaaa

SEQ ID NO: 358937 - DNA, 773 bp, Homo Sapiens
agcggggctggctgagcgcgggcgagtgtgagcgcgagtgtgcgcacgccgcgggagcctctctgccctctcctcgcaccctgctcagggcatctgaagagcctggaaacgtgaacaggcttgaagtatggcatgttgcaaagatggtttctgccaagaaggtacccgcgatcgctctgtccgccggggtcagtttcgccctcctgcgcttcctgtgcctggcggtttgtttaaacgaatccccaggacagaaccaaaaggaggagaaattgtgcacagaaaatttcacccgcatcctggacagtttgctcgatggttatgacaacaggctgcgtcctggatttgggggtcctgttacagaagtgaaaactgacatatatgtcaccagctttggacctgtttctgatgttgaaatggaatacacaatggatgtgttcttcaggcagacatggattgacaaaagattaaaatatgacggccccattgaaattttgagattgaacaatatgatggtaacgaaagtgtggacccctgatactttcttcaggaatggaaagaaatctgtctcacataatatgacagctccaaataagctttttagaattatgagaaatggtactattttatacacaatgagactcaccataagtgcggagtgtcccatgagattggtggattttcccatggatggtcatgcatgccctttgaaattcgggagttatgcctatccaagagtgagatgatctatacctggacaaaaggtcctgagaaac

SEQ ID NO: 358938 - DNA, 1414 bp, Homo Sapiens
ccagaatttttggtggttttaatttaattttaacagattagaaaggaggtcaaagataaagaggggttttactcagaggtataccccacctcacaggtgaaatttaattgtggacataaaaagtgatagttgtacccagaggctcctaatccaagctggtcttaatattgtccttgctccaagtgtcattccataagatttcctttttaggcagggagaacaaattttttctctggaaatagccaaatatgtccttttatatggaatgcctcaattacacagaaaattattagattctctgagtagttcttaaagcctccacatggtcttcacgaatgatttatacccaagtgctttcctgaaggagcacgtgaaactcacatggggctgtgcttggaggagcagaggcgaggccagagtccggacataagcatgctgaacaggtcaaacaaaacaagggcgatgtaatgttgtacttaaatacttaaagaaacccacatctgttttctcgatttcaaatggcatgaataggtttgcctttcagatactaaaggaaaatgtggccttttacagaacgtatgttcagttggaggtatcatcttgacttctcttctggtcatggcttgttacagatttggcacttttcacttgacatggtgtagtcatttttgtgaagataggagtcacaatatcttccagttgttgtctctgctcaaaaagctcattaatggaagcttctgtatgggtttccaaccactcattttttgcacggcatgcactgaggatggtattcttgtcttccttaaggagtttccctgatcccttttctgtgtcagtaacagctaaagagacttttgcaatatattttttcagagtcagccttgcatctgcccagtccaggaattcaacacactcagtctgagaatatctagcagcaacatctcgagccctttcttcccggaagttcaaagcttctatatcaacatccagttctaccagtgctttcaaagtttccaaacgaccccaggctgcagcacaatgtaagagtgtgtaccctctggtggtttttttcattcagattcacaccatattttgccaaagctctaatcacgtcactttgcccagccatgcaagctgcatacaacaaatttctcccaacgatgtcttcttctaagagaagctgcatggcctgttcatgatgaggattctcaggatcctcaaatatcttctgcaaccctctacatcccctgtgagagcaggttgtaaaagggggttcttagggcctgtttcctctggttcttgggcttcttcttcttcattttcctcttcttgctgtgagaaaaattctgaactctctgactctggaggtccttctgactccattaactccaaaataccacacccgggccccggc

SEQ ID NO: 358939 - DNA, 200 bp, Homo Sapiens
ggtcaacatttaatagttaaccattgctatttgttctatcaaggacatatcaaaactactagaagtttgctgccaccaccttgattcatgccacagtgccaacagttgacctcacagatcctccctgaaagggtcttgggactcccaggatctgcaggccgcattcttcgagaaccactattctaggtacagccccactg

SEQ ID NO: 358940 - DNA, 791 bp, Homo Sapiens
  misc_feature (16)..(16): n is a, c, g, or t
tcataaaagacttgtngatgtctctacaaaaagggtctttaaagctaacggtctcaaacgttgttcatcatcacacactaagtgcttctttacaaggaccactatatacaagactctaagtgtagacttcagaagaaacttagaaggaacacatttttcacttaacatgccacgaaagattctttaagtagcaagtattctgatgggcaggagctcatcagaatggagtgactagccagtattaagccattatatatgacttgtaactttttcactgaaaatttaaagtaatgggtcccccaccctcatatttatttagactcagtctccgtaatgtgaagaaaaatagaattttactatgtaattacctcaactgctaagccattattgtcttcttatttataagaatttgaataattcatagggctagtcacatgcctattcctttaatgatctaacagtttggaatttgaactgtcttcatgaagactgccctggatgaggaaacctttgagtttctgttttgttctgtgttctcttctgtctgtgcagccatagtctcaggcttactctagggttcacccagcatgtttgcttatctctccagctctactagtggaacccatggtaacttatcaataagaagtatacccttgtattttaaacatttgctaagttggtgtcagaaaatctgaatgttttggctttgaatggaatttaggagaaattgcattttttccctttaaattcagttgatttgaatgtattctctgatgtcagttctatttctc

SEQ ID NO: 358941 - DNA, 948 bp, Homo Sapiens
ggatcccccgggctgcaggattcggcacgagtatctgctctaggtattgtattcgtattcaattggttttgtatacattttactgggattgacatgcactagtggattaggccctgcagtaacattttgtgcaaagaatccagttcggacctatggttatgcgttccttttttccctcactggatattttggaatctcctttgttctggctttgattaaaatttttggtgcacttattgctgtaacagtgacaacaggaagaaaagcaatgaccattgtactttcgtttatattctttgctaaaccattcacgtttcagtatgtatggtctggtttgttagttgtccttggtatatttcttaatgtttacagcaaaaatatggataaaataagactaccatcactgtatgatttgataaacaaatcagtggaagcaagaaagtcaaggacgctggcacagactgtatagacagtgattgtcctatttaaaatagaattttaagggaacaatcatcaattaattaactttccaaagggactgataaaaaccaaaggatctgaaggcattgctatcccatttgtggacagatttcatatgaagttgttttgcggtgtcagccttttcttcagagcatttgtttgactgacttccaaagcaatcaagagagccacgtctagcagactttacaataaaatgtcaatatgaaggactgtaattcctagcagtttattgagaatttcactggaaatggaccatgtgttgcaagactaattggctataattatatcctatcaaagaaatcgatacgtaatagcagattgttttatattcattccattttgatggtgttatttaaattgattctctgttataagagtaaactgatgagttgaagtctggagagaataacattcattataaataaaattattctgtgatcttttttc

SEQ ID NO: 358942 - DNA, 466 bp, Homo Sapiens
ctgctgagaagcatgggggccttgggatagttccagaatgaggatgtgcgtttctagctgctttgcgccctcctcccccaaaaatctgctaccacaattccaacccggcggcacgcccccaagactcctttgtcgccccaggggcgggacctgagctgtcgatttcaggagcccttcgtgacttcaaaagtcctgggcactgttgctcatgagtgctgcacaactgtcgccctctaaagccacctccatccctcactgggctggcctcctgagccttcggtgaggaaacggggttccgagttgcccgcctgagagcttaacagtctgactagaaaagggctaattcgctttctgtgcaaatctcttgagctaattatttaatctgaaacatggacaggtaaaggaccattggcgggcgtggggagggaggtgtggaatctttcccacactttttgtcaccttaaag

SEQ ID NO: 358943 - DNA, 1059 bp, Homo Sapiens
ggggcggcggcggcttccgcccttcttagctgcgctgccggaggaaacggaagaaggagcaagctatggaggggaacaggcatgaggctgagaaatgtgtcgagatcgcccgggaggccctgaacgccggcaaccgcgagaaggcccagcgcttcctgcagaaggccgagaagctctacccactgccctcggcccgcgcactattggaaataattatgaaaaatggaagcacggctggaaatagccctcattgccgaaaaccatcaggtagtggcgatcaaagcaagcctaattgcacaaaggacagcacatctggtagtggtgaaggtggaaaaggctataccaaagaccaagtagatggagttctcagcataaacaaatgtaaaaattactatgaagtacttggagttacgaaagatgctggtgatgaagatttgaaaaaagcttatagaaagcttgctttgaagtttcatccagacaaaaaccatgcacctggagcaacagatgcttttaaaagtaaagtaacaccttttaaagcaattttactaagctgtctttagaattcactttacggcgtttcagaatattaagttctgcttcctggactggtgcatttagagaccagcacaagcaagagtctggaaaatcctttaacaacttcagtattaactggttatacccgaaggcaaacaaatgcagtttggcttcacaaaaagcaacattccagttctgatacagtctcaagtaacttttctaggcacatatgcattgcttactttgtttaccaggaacaaatagggtgatgattatggcatgagcttcttagcgtattgtcatctggttctaaatggaacttaaagcaacatatagtttaagagtattaaggtacaagagactgtgtggaattggatcatcacagaaatagatccccagtgctcattaattctattaaccttgcccaggttatacataacgatatggaagatagagcataatgatatttatagctttgtaacaattaaactttaccatggcaacaaaaatttacaatttacatca

SEQ ID NO: 358944 - DNA, 1082 bp, Homo Sapiens
  misc_feature (400)..(416): n is a, c, g, or t
  misc_feature (866)..(866): n is a, c, g, or t
  misc_feature (869)..(913): n is a, c, g, or t
  misc_feature (1052)..(1052): n is a, c, g, or t
  misc_feature (1063)..(1063): n is a, c, g, or t
ttaaagggagagtccatctggaagctggagtatatcctgacccagacctacgacattgaagatttgcagccggaaagtttatatggattagctaaacaatttacaatcctagacagtaagcagtttataaaatactacaattacttctttgtgagttatgacagcagtgtaacatgtgataagacatgtaaggcctttcagatttgtgcaattatgaatcttgataatatttcctatgcagattgcctcaaacagctttatataaagcacaattactagtatttcacagtttttgctaatagaaaatgctgattctgattctgagatcaatttgtgggaattttacataaatctttgttaattactgagtgggcaagtagacttcctgtctttgctttcnnnnnnnnnnnnnnnnngatgccttaatgtagatatctttatcattctgaattgtattatatatttaaagtgctcattaatagaatgatggatgtaaattggatgtaaatattcagtttatataattatatctaatttgtacccttgttgaaattgtcatttatacaataaagcgaattctttatctctaaatatgatgaagttttcttaacatgataatttttagttaaaatctgtgtattaactgaggtccaaattgtttacctctcatatgtaaacagatgttaccactgtttacatgcactatctactcttgggaaaataccatggtcattaggagcatgctgaaacatcacagggcatgtattgcctagctttcttcattctgagtctttggcattgctaacttttaaggatgagaatgtcacacatacttattgtatctgcagtactagcacaaggcctgngtnnnnnnnnnnnnnnnnnnnnnnnnnnnnnnnnnnnnnnnnnnnnntgaaagctgtgaatatttttcaaagaaacgtcctagattacagtggtggcattttctttgtcacagtattccaggataggatatgtttctgctttcaggttaagtaggagaattaaagtagaaatggaaagagaagtgngaaggactggnggatttaaaggaagagaaa

SEQ ID NO: 358945 - DNA, 1187 bp, Homo Sapiens
  misc_feature (1115)..(1115): n is a, c, g, or t
ggaagccagaaacaatctcagcattcacttctgatccagcacttctgtcatttgctgaatatttctgcaagccaactgtgaacatgggtcagaaacaggaaattctggatctcttttcttcagtactctatgaatgtgttacccaggagaccccagagatgttgcctgcatacatagcaatggatcaggctataagaagacttgggagaagagaaatgtctgagacttctgaactttggcagataaagttggtgttagagtttttcagctcccgaagccatcaggagcggctgcagaacaaccctaagcgggggctctttatgaactcggaattcctccctgttgtgaagtgcaccattgataataccctggaccagtggctacaagtcgggggtgatatgtgtgtgcacgcctacctcagcgggcagcccttggaggaatcacagctgagcatgctggcctgcttcctcgtctaccactctgtgccagctccacagcacctgccacctataggactagaagggagcacaagctttgctgaactgctcttcaaatttaagcagctaaaaatgccagtgcgagctttgctgagattggctcctttgcttcttggaaatccacagccaatggtgatgtgaccgtgtctggcggtgaacctaccctgaaacgtgacttctgcacaacaaacgtgaccaaacatcaaagctaaagcaatgtttataaagttttatggtataactagggggaaatgagctgcacaaacctcaatgtattttaaatctgttgctgtcatcattaacggtatatgacatataaaagcaagttaaaatttacttttgtaaataaagtttttggtttgtttccaaaactcttgatgattgctttagttttggacttagagaatagagcaggggttgctggagtgaatattgatttttaaagtctttgaactgtggtgggtataggtgaagtgactatgcccaaaaatgccaagttttaaaagaagctatgtcataaagttttactttctgtgggcaaaagagcgctttagccatttcctcagatgtcacagttgtccccgtctaaaataagtttgtacttctgggtgacaatgnccagacactcttatgatgtgatcaccttaaacaggagaaggagatttttgccctcagttgctcaacatgaag

SEQ ID NO: 358946 - DNA, 865 bp, Homo Sapiens
gaacctggcatccccgactccctgcaggcagcgatccgcccggcccggagctccgcaaagccttccaggaccccgtgccagtgtcttggaagtgtcaacgtgtttttggatgatcctgtattgggctgtacttactgtgatactgaaaagctgtcctgctgaagcagctatatttgaaatattaagtatgaaaggagtaattaaaaacaagcaaaacaaaacaagacttagtttttaaatgaccaaacttgtccttaaagatgttgttattaactcgagttagttcttatttcctctgtttattttttattctaagtacactgattctgtgaatgtaccttttttattaacagggaaagaaatgaattaatttgatatgctctaaatacataaaggtgcttcaaaatatgtagaaacattactatgaaatcagtttttaaaagatatactttctctttgtcctgaggtttttcggtcttgttcaaaaggaagaattcttgcctgccatacagaaactctctagcactccctgaccttaagcttttctaaaaattctgtttgtgtgaaaagtacaagaataacaatacttacaacttccatttttgtaacctacgttcacttatgatctggatttataaacattacttggtataacgtttttcatttcctttaatgtctctgttttttggctctaccatctgttttgtttttgcttttatctatatcttggtagatgtatttcatccctagagcaggtcagcctccttcccctaatgcgaatgcttgttttgttagggaagggcttcctccaacttcgtgtgaaattgtgatgttgaagtgaataaatgtctattgtgtaactctc

SEQ ID NO: 358947 - DNA, 1065 bp, Homo Sapiens
  misc_feature (37)..(37): n is a, c, g, or t
  misc_feature (60)..(60): n is a, c, g, or t
  misc_feature (148)..(148): n is a, c, g, or t
tacattctacatattcgtagccatgaacgctattttntgatattccctcaatgtacatcnttaaaggttaagtgtggacataggaatttaggtggacatatacaactctttatataaaaggaatgttaatgtaagtcttaatgggtanagatgattgtaactgaaactgacaaagaaacaactattgcctcaaggagttttcctgattggtttaccttaatgatatcaaaatacctacattctgtaaaaattctgtgtacttcttcaaaaaattaataaaagcgggatcagttgcatattggcagtgcaggagacaaaatccgcagctactttgaggtatagcctctaaaaacttaaagcagcatcatagatgtgttatgtagcctcgtaagaggggggagaacacacactgggtatattcccaattcaaagcactcaggggacagctgctttccctgctaaaagcaaagttccagagcaaaagcagcaaaaagaaaatatgggagggatatgggcaacgtatactcgaacgtacgcagagaagagagtacggttagctctaatatttctcattgaacttggtggtatgtgccttccctgcatataaggcccatagtgccttttttgggagcgcctagaatatcccatcccacttgacagtgaccacaaaataggctgtttccagctgcaagaacctcctccctggagaaaagcgtatgaaggtgctggagtgaaaagtaacaaggttgtgtgtatttgaaggggttgggtgtggaacggtagaaaattctgattctgtggtgagattattctagttttgaaaacaaaattaatgaaaggtccaaattacatttgcagccatctttttggtaatgtgatattgaaaaagggactttgttggaacttttaggtataatttggtctgagttatagcctagaaattaaagtatgaattgtaaaaatatgtaaatgtatacagaagtacatgtgtttgtatgtattatatatgtacacatacctatacttttttcctttaaagcaatgcctttcaaaactctgttcact

SEQ ID NO: 358948 - DNA, 678 bp, Homo Sapiens
cctattagacatctatttgaatactgcaaggaaatagattcattctgcttagatgagtccatcttttaccaactaagttaaagatattcttctgggctcttcctaacacatgcgatctgactttagactttcctgagtcaatccaccctttcagacactctacctctgattcagtgacaagttttattttgtgtcctaattccaaaagtatttcacttattcaaagactttaaagatcaacctcttgggttaacctttcttctagtgaagaatgacaatgtccttctgacccagtccggtgctgggtgctctgtgagtcgcatcacgtcctcccctgccctcaatggtggtgcccccatcacttttgacgtcatatccaagttggttattatggatggctaccgctctctaagagcaggaatgtcccttcctttccatcaagcccagcaaagggccttacacctaggaaatgcttaaaagacaaataataaaagagcaacaaattagagggatatacttaaaatgttttttaatcattcaagtgttgaccacactgtgtgtgaattatttatgcctttttttcttctctactttgatttcatctttagtcacttcatggctcataactctcctttctaaaagtgaggaaaaataaaaagatttcgatttcaagtcaat

SEQ ID NO: 358949 - DNA, 1066 bp, Homo Sapiens
  misc_feature (220)..(442): n is a, c, g, or t
  misc_feature (974)..(974): n is a, c, g, or t
  misc_feature (986)..(986): n is a, c, g, or t
  misc_feature (1002)..(1002): n is a, c, g, or t
  misc_feature (1028)..(1028): n is a, c, g, or t
ggcaaagagggttttaactatgctggtgtaaattttaagaatagatacattcaaagaagaattcaacattcatgtgacattcatactttggaactttgggaaagtataggaatgaccatagattggcttagggatagtcaatttacctgtctgtaaatggatccaatttagtattgttcctgtatttttctaagaccaacacttgtgtcattcacagttnnnnnnnnnnnnnnnnnnnnnnnnnnnnnnnnnnnnnnnnnnnnnnnnnnnnnnnnnnnnnnnnnnnnnnnnnnnnnnnnnnnnnnnnnnnnnnnnnnnnnnnnnnnnnnnnnnnnnnnnnnnnnnnnnnnnnnnnnnnnnnnnnnnnnnnnnnnnnnnnnnnnnnnnnnnnnnnnnnnnnnnnnnnnnnnnnnnnnnnnnnnnnnnnnnnnnnnnnnnnnnnatatgctctaatatattttaaaatacatattttaaatatattttgagtggtaaaatgtagcagataatgttacataaaagaagccatggtaatgacatgacattactggttttgagttgtttgtgtagtagttagctattaatactcaggtataatgatttgctatttaaactacacaaatgctcaaagtccagcgataccctgcacccaaattcagtggctagattaccttcttaggaaagcacaacacttcaatggagtgacactggcatgagtccactagagggtgtgtatacatggcctgagttcaaattgttcctgctgtgagtactgcttttcagcttcaagttattcttatcggccacagtactgtttattccacttagtaacagttctgtttacagagcactttaacataaattctgatttttaacatgaaagctgtctgatgttggtatttttattttaatctttagagatcaagaaatttttttagtgacagaatagggactttattgatccttaaatccgnccctcaccacantaaaggaaaaaagcanaaacatccttgactcatgtattgaanggtcttttttgagaaagggtcagttttgaaaaattatc

SEQ ID NO: 358950 - DNA, 1226 bp, Homo Sapiens
tggaatcagagagggtgctttccatcaatctgacaggggtcctgaggagagtcagaatctttttctatcttcatttgtagcaatattggctactcgttgttgcaagtcccacctgtcgagctacgttgttaattgttaacctgtttcttctccttaagcaagattgtttatgactttcccgcttcttctcttcctcttttttggctaaaacagatgccatacgcctttcttcttccgtgattctcttcatatctagctggcgcagctgcatcatattctgaaggacagtgtgtttgtaccctgactccttgagcctatgggattgccatcaaaggtgatgtcccgagagggaagaagagtcagcaaggcaggaaacactgtcaaaactagatatattgttaaagctgagaaagagatgttggaggcagggcaaattatccacatctctcacgaaagtgatttgattgtgtcgcaagttaagttcagttagtgaatccagcccattaagattatcaacatgacttaaaaagttcctggcaagatttaaaactctcaactcacacaaatgattaatattttcaattttggtaatctgatttccatgaagatccaagacatctaagctttttagattctccagatttgagattttcttgattctgtttttccccaacagaaggacacgaagacatctcagagtcgaaagcccactaatttcttcaatctggttatcatataaatccaacgatattaacttctgtagattagaaatattttgtatccgagttataaaattgtgttgaaagttcaacaaacgaaggtggtcttccccattgatgataggacatacggtcagcttttgtctttctaggctcaacctgtctgagtaaagaattttctcttcagaagaacgttgaagaataggaaatgatgacaatgatgagctcaccaaattaatatgatcaccttgcctacttgagtagtttctttcaaggtcatgttgtaaaagtctaccggggaatgacgatgtgtctttatttagcttgaattcaactttgtttttttcaggaagcgatgatgtttgaataaccagatgaagcccgcagttcacgttgttcgcagcccggccagaaacagagcgatatttcccgggaatcatgataggagacagtccaggttctctgttagatctgcctcccaggtgacgctacagcggagattcaaag

SEQ ID NO: 358951 - DNA, 1928 bp, Homo Sapiens
  misc_feature (1597)..(1602): n is a, c, g, or t
  misc_feature (1607)..(1607): n is a, c, g, or t
  misc_feature (1609)..(1610): n is a, c, g, or t
  misc_feature (1617)..(1617): n is a, c, g, or t
  misc_feature (1847)..(1856): n is a, c, g, or t
agtgctttttaccttgcgagtggtgcagcttgttctgcggatgtactgaaaccctcccatttaatctgcagtggaggagagtggagctcactgtccagtagaaatcagtgatgtagcaatgttgcagtaaatagaaatgattatatatttcaatagcttagcaagaagacatttataatatttttttctttcatctgattaagttttgctgtctattttcttccagagagatgtggataatttgccctgcctccaacatctctttctcagctttaacaatatatctagttttgacagtgtttcctgccttgctgactcttcttccctctcggacatcacctttgatggcaatcccatagctcaagagtcatggtacaaacacactgtccttcagaatatgatgcagctgcgccagctagatatgaagagaatcacggaagaagaaaggcgtatggcatctgttttagccaaaaaagaggaagagaagaagcgggaaagtcataaacaatctttgcttaaggagaagaaaaggttaacaattaacaacgtagctcgacagtgggacttgcaacaacgagtagccaatattgctacaaatgaagatagaaaagattctgactctcctcaggacccctgtcagattgatggaagcaccctctctgcattcccagaggaaacaggggcctctagactcaggactcaacaatgctttacaaggtttatctgtcatagacacataccttgttgaagtggacggggatacactttccctatatggctcaggagcactgggaatctctggataggaattcggagtgttcaaacagcaggaatgatcacaacagtctccttcactttcatagaatttgatgaaatcgtccaagtgcttccctaaactggagattaagtttcctaattctctggcccttaaattcaaggaaacaaatcttgtaatgctgcagcaatttaacgcactagcccaactccgtcgtattgaccagttgacaattgatcctcaaggaaatccagttgtcaattttacactctggaaatactatgtactgtttaggctaagccatttcagtatgcagaaaataaatggaacagaggtgacacagaatgatatgataatggctgaaaggctctttggaatcctagcacatgtagcatcttctgagttaccccagtatcgtctgatttccattctgggtgatgccaggaaaaagcaatttcggtatctactagaatccaaaggaaaaaaacctggtattatcaacgaagaaaataatgacagcaaaagacttgtaggagaaaacacaaatcgtgctacattaaattatactacaagagacttttataatgaaaagctagaggaaataaaggaaaagaagaaattctgtaaaacatatatagaagaccttgtgaaggaagccacagaaatcaacatgaaaaatgaggctttgcagaagctttggccacagatgttcattgagcttgttatgggatgcagtcatagaaattcgcaataaaaattcctatatgaagctctgcctacagcagataacagaccaaaaataaaaatggcctttaattaccnnnnnnaaaanannaaaaaanaaaactcgaggcatctatgtcgggtgcggaaaaaaaaggtaatgaaatggcacatgggccatacctgtttccctgacccagctttttcttggacaaagtgggaaaatctgcccggtctcccctaaaggggagcccgtattaatttccaaaaagcccgggtaaccctgcctttaataaatccggctgccagtacccgggggaatttaacccccccctaatgaaacgggccnnnnnnnnnngggatcccaaagggatctttcctgaaaatcccttttttttcccgccaaaaaactctggccggcttggacaac

SEQ ID NO: 358952 - DNA, 812 bp, Homo Sapiens
  misc_feature (78)..(78): n is a, c, g, or t
tttgggaacccctggcaacttgtagccatcctcctgagttacccccagtatccgtcctgatttcccattccgggtgantccccgggaaaaagcaatttcggtatctacctagaatcccaaaggaaaaaaaccctggtattatccaacgaagaaaataatgacagcaaaagacttgtaggagaaaacacaaatcgtgctacattaaattatactacaagagacttttataatgaaaagctagaggaaataaaggaaaagaagaaattctgtaaaacatatatagaagaccttgtgaaggaagccacagaaatcaacatgaaaaatgaggctttgcagaagctttggccacagatgttcattgagcttgttagggatgcagtcatagaaattcgcaataaaaattcctatatgaagctctgcctacagcagataacagaccaaaaataaaaatggcctttagttacagttgattttggcagttttattttttgaaggttgaaaatatgcaggttatacatgttaaaacaacaacaacactatcctataaactagaaagactagtataaaagcattattgcccactgttctcatagctaaaagttaagaaggaaagaaggaaagcaggagaaaggaaggattaattgcctgtatgtcaggaccaaacaacctttgggaactaaacagttttcagagatggcgtggcactgcatccttggttcttgctttgattggtgccctgctatagcccaaagcacgtagtatttgctgatgattcagcatgagctgcatctacctacttttagctgataatt

SEQ ID NO: 358953 - DNA, 678 bp, Homo Sapiens
aaggaggaacccccttctgaagcagatccctgtataaagaaagaagaaaatagaagctgtgaatcagagcgcacagaacacagccattccccgggtgacagtagtgcacccatccagaacactgatggctgtaattcaagtgaaagggatggagctcaaaaagggtcaatagaaagcagctcagtatttgatgcagatactctgctctacaggggaactttgaaatgtaatcatagttccaaaaccacttccctagaacagtgtaatatagttcagcctcctcctccttgtaaaatagaaaattccatacctaatcccaatgggactgaaagtgggacttatttcacaagtttccagctgcctttaccaaggatcaaagaatcagaaactaggcagcatagttcagggcaagaaaacactgtaaaaaatccaacccatgtcccaaaagagaattttaggaaacattcacagccccggtcatttgatttgaagacttacaaacctatgggatttgaatcttccatttctgaaattttattccaggaaagtgaagagaaagaagatgattttgatgattgggagccttcagagcacttaacattaagtaattcttcacagtccagtaatgatttaacagggaatgttgtggcaaataatatggtgaatgacagtgaacct

SEQ ID NO: 358954 - DNA, 1110 bp, Homo Sapiens
  misc_feature (674)..(674): n is a, c, g, or t
  misc_feature (740)..(751): n is a, c, g, or t
  misc_feature (804)..(822): n is a, c, g, or t
gtaatttcgacctgtcctttcccgggagttagcgatccctcaacccctgcactgcgctagtcctaaagaggaaatgtctctacgctgcggggatgcagcccgcaccctggggccccgggtatttgggagatatttttgcagcccagtcagaccgttaagctccttgccagataaaaaaaaggaactcctacagaatggaccagaccttcaagattttgtatctggtgatcttgcagacaggagcacctgggatgaatataaaggaaacctaaaacgccagaaaggagaaaggtatgtgaggaagctcgatgtcccaatattggagagtgttggggaggtggagaatatgccaccgccacagccacgatcatggtagggccaccctccacctctatggctttagtccacaaactgaaagggactatttttgtgtcttcctccctaaaaatgtgcattaatgaaatctctggggccacattttttcattaccatttcgccatttattgaaaaaactatttaaggaaaaaaacccttgaatgggaaataaatccccaacccctgtgtggtaaatcctccaacccctttcctcctggaaaataaaaaatccccactttactggggggttcccttttcccctcccttaaacacagacccaagccatcgcacgcgcggancacaactgatccccccacccgctcctcccctttgtctctccggggacaccgcgtcctctctcgggnnnnnnnnnnnntaaacaaaacgcccttttttctctggagaaacaccctcttcctccactttttnnnnnnnnnnnnnnnnnnntcccccccggataaaccggacgaagacgggcgaacaccgtggggcccgctcaacagcgcgggcttttctccccaacaggagaaataccctggggggcacctcggaacccttacgcggggcccctgtgcaatagttgccccgcccctaattcataataaaacagccccaccccggggggggcgccacaccccaagccggtctctttgtgaaacaaaacttccccctaaacggcgagcctcccccgcagggccgcccattcccggggcgtgctctcttcaaacggggggg

SEQ ID NO: 358955 - DNA, 906 bp, Homo Sapiens
  misc_feature (26)..(26): n is a, c, g, or t
  misc_feature (110)..(110): n is a, c, g, or t
ctaaaaatccaatttctaataagctntcagtagggattaaaaagcaattataagctctcttggggacaaacgtattaagatagcatgtctacactatctatataggtacntgtccctttaagcactagacaaagaaactgaggtttgacagagaatgaagtataggcttggtgagagagcattctgagctccgtaattcacttagcctctgggctcctgcacccctcatcctttttattctcagtgtttcagggcattgttccttcagtttgcactgggttggttggaggtaggcaccacaggtttgattgatacagcaatttgcatctcaaggcatcgctcgataaatacagtgcaatgaaaggctactctctcaccagccaatttcccccgctgggctgactttagaagctcattgatgtcacttccttcctcagtcagcaagtgaattttctttaattctcaagaccagctgtccatgctgtcaacagaaagttattaaaattcctttaaagtgaataaaaatagcctaaaagcaaatgtacttggaaacaggaaagaatcagtatgcaaagtccacaaacctctgagcaaaataatgttgatccaaccagagttttcaaacattgtatattcaagttgctagaaaaaaataattaaaagatgctaagccacatacttcttaatcttttattagcaaaggcttatatagttaaaacatatccccctaaatttcattccgccttttcaagtatgatttgaataaatttgagaatgacttaagttttcgttaagtgggattccctcctcttttcttgcataggccagagaatattgtcatctccaccaggctaaggctatccataagcaagagacaaacattatcattagcagaatcataaccac

SEQ ID NO: 358956 - DNA, 511 bp, Homo Sapiens
  misc_feature (101)..(101): n is a, c, g, or t
  misc_feature (268)..(268): n is a, c, g, or t
ccattgcactgtatttatcggagcgatgcccttgagatgccaaattgcctgtatcaattcaaacctgtggtgccctaccctccaacccaacccccagtgcnaaactggaagggaaccaatgcccctgaaaacactggaggaataaaaaaggatgaggggtgcaggacccccagaggctaagtgaattacgggagctcagaatgctctctcaccaagcctatacttcattctctgtcaaaccctcagtttctttggcctagaaaaagangttttatggaaactgttggttgaagtcagtctgtttctttgacagatggctaagaggaccaggtactaatatagatagtgtagacatgctatctcagtacgtttgtcccaaagagagctatcaattgctttttatcccctactgagagctatttagaaataggaatttttagctgtcatacttagctactaccttgatcctttgttttaaaaccctgtattcattgtttataactacactgca

SEQ ID NO: 358957 - DNA, 984 bp, Homo Sapiens
  misc_feature (528)..(761): n is a, c, g, or t
ggtccggaattcctgcgatcgagagactataagccctggtctgcgactggcaatcacagtgggcagcccgattttctgctgagtaggcgctgtgatttcagaatgtctgggcgaggtaaaggtggcaaggggctgggtaagggaggcgccaagcgccaccggaaggtgctgcgggacaatatccaaggcattacaaagccggcgattcgccgtctcgcccgacgtgggggcgtcaagcgcatttctggtctcatctacgaggagacccggggagtcctcaaagtcttcctggagaacgtgatccgtgacgcggtgacttacacggagcacgccaagcgcaagaccgtcacggccatggatgtggtgtacgcgctgaaacgccagggtcgcaccctttatggtttcggcggttgagctgtccccacagcttctctacagactccaaaaggcccttttcagggcccccaaactgtcacagaaagagctgttaacacttcctagataacggaccaagtctagctctgccannnnnnnnnnnnnnnnnnnnnnnnnnnnnnnnnnnnnnnnnnnnnnnnnnnnnnnnnnnnnnnnnnnnnnnnnnnnnnnnnnnnnnnnnnnnnnnnnnnnnnnnnnnnnnnnnnnnnnnnnnnnnnnnnnnnnnnnnnnnnnnnnnnnnnnnnnnnnnnnnnnnnnnnnnnnnnnnnnnnnnnnnnnnnnnnnnnnnnnnnnnnnnnnnnnnnnnnnnnnnnnnnnnnnnnnnntccaggcgtgagccaccaccgcttgggtcttgctctaacctattctaaaacatgaacgaaggtcatagccttcccttggcggccggtggcgcttgaaaccccccttcccaagggcgaagttttccccagccccccccggggggtttcaaaagcacacactgggcagtccccacacaaattggcggaaaccccctccgctttgggccccaaaaggggccatttc

SEQ ID NO: 358958 - DNA, 836 bp, Homo Sapiens
  misc_feature (36)..(36): n is a, c, g, or t
  misc_feature (431)..(493): n is a, c, g, or t
  misc_feature (495)..(662): n is a, c, g, or t
caacatttctgccatttaagagctcattaaatatcnccgcagggcagttagtatggaagtgtggctaacactgaatgtgccatgtgggggaccgtgctagataccctggatgagaaaatgcagggaagtgcagtaatgtgattatacagcaaggagactcaaaaccccagtcagcacgtgccatactgctagaatggaccagggtgtctcgtaggtagggagcctcaagcctttcacacgtcactctatggcatagagtctatgccacagagtagagagaaaaacgcagtgattctgctgtcatgataactcaccctggtagaatcactaccacctcaacaaaatggttacttactattgagtcccaactctggcaatctgagagccaataaaaggctagaaatcaagaagaatatagggtacagccattnnnnnnnnnnnnnnnnnnnnnnnnnnnnnnnnnnnnnnnnnnnnnnnnnnnnnnnnnnnnnnncnnnnnnnnnnnnnnnnnnnnnnnnnnnnnnnnnnnnnnnnnnnnnnnnnnnnnnnnnnnnnnnnnnnnnnnnnnnnnnnnnnnnnnnnnnnnnnnnnnnnnnnnnnnnnnnnnnnnnnnnnnnnnnnnnnnnnnnnnnnnnnnnnnnnnnnnnnnnnnnnnnnnnnnnaagaaagtttgttttatgagaatcaaatgaaaatcagagttccattttttttccccaaaatacagcatttttgaggcttccctgacaaaatagcctttcccatctatcttagtcctggccttcaactgtcttgtattttaaaccacagcctataattaaagaacttgttcttcc

SEQ ID NO: 358959 - DNA, 167 bp, Homo Sapiens
aaagttttactaactgatttaatgagaaaacacaaccttttaaacttttgaccactgcttaaagagtacttacagaattatctcacttccaagacttcttggaaaagtagttaagttacaattcatagtccagagatgtacttgaagaatgagccagtgataaaaaa

SEQ ID NO: 358960 - DNA, 543 bp, Homo Sapiens
gaggaacagaagcagggtcggggtggagggagaatactaaacttagcttgagacattttgcaataaggaagctatatctagagtgcttatgtgactcacctaaggccactcaacaagtttgtggcagaactggattagaactgcacagaaaacagccaagctgggatttgaacccatgtagtccaactccaaggcctctgcccctaaccactgtgccataccacctcccaataatcaacagcaaaattataggtctaacaatgttttatagacacccctccatttatgtgatgggtttgcatcctgataaacccatcataagttgaaaatatgatcataagttgaaaatatgatcataagtcaaaaatgtatttaatatacctaacctaccaaacatcatagcttagcctagcctgccttaaacatgctcagaacacttacattagcctacagtgggcaaaactatccaacacaaaatctatattgtaataaagttataaagaattttgaataaaaattcaatatttgaagtacagttaaaaa

SEQ ID NO: 358961 - DNA, 1938 bp, Homo Sapiens
atttaatcgtggacgaggactaaatgtgggtgcccgagcttgggacaagggagaggtcttgatgtttttctgtgatgttgatatctatttctcagccgaattccttaacagctgccggttaaatgctgagccaggtaagaaggtgttttaccctgtggtgttcagtctttacaatcctgccattgtttatgccaaccaggaagtgccaccacctgtggagcagcagctggttcacaaaaaggattctggcttttggcgagattttggctttggaatgacttgtcagtatcgttcagatttcctgaccattggtggatttgacatggaagtgaaaggttggggtggagaagatgttcatctttatcgaaaatacttacatggtgacctcattgtgattcggactccggttcctggtcttttccacctctggcatgaaaagcgctgtgctgatgagctgacccccgagcagtaccgcatgtgcatccagtctaaagccatgaatgaggcctctcactcccacctgggaatgctggtcttcagggaggaaatagagacgcatcttcataaacaggcatacaggacaaacagtgaagctgttggttgaaatcataattaatgcgttactgtatgaaccacaaaacagcactatttatttagccttacttctacttccagatgcagtgcctcttttggagaagacatgtttatttttcatgttctttctgacattactttagcaattcaacttgatgtgagaagaaaaaacaaatgtttcaacacaaaatctctgttttgtgagaatactgcactatggaataattgacaaattgaaatctcatatttgtcccaaaagttgttttgagttagttctacctggtgcccatgttctgattgtgtgtgggattgcatggtgtcctgattgcatctaggtggagcggatggaatgtgctgggccactgttgggtggagagcagcacattcttacagaggagatggagcgttatgagcatagtatgtggataggtatcttcacctgcccgcccctgagtcagcctccttgacttgatagcttgaagaatccttttccactgaaatagaggataattaattgacacatctgaaatccccaatcaatcaatcaagagaaaggtagaactaaaaactccttaacttactgttgcttacacccctgaaagtctgtttttaagcaaatgggtaatagtagaaaataggttagaatctatggcttgattaaaaatatgttattacattatcatgttcaggattaggattagtagtcagttgctgttaaactattttgaacaaacagaaaagaacacggaaacatttttaacagagcatttaattatgttggaatacaggatcctagctctgtctgggaacattagtttatgtgagccagctctatcagggtcttcccatggtggttcagaatagatgagcatagcatggttttgtttgtttttgctttcaattttctaatttggcatggatccatatgtatttactatcctttttctaatatattaatatatgctacattttgtatttgcattactataatactttgagttgaaaaaaagtttcattgtcggagagaaaaagcaaagggtatgccacaagaatcacttctgatttgagaaaagggaggaggggaagatagtctgaatggaaatctgaaatacggaatgttttagagaaatatgtcacttgcatatagaatgttttaattgaggtataaattaatgagacaaagtgaaaaagaaattatattcagataggactgcactacattattttgtcacacatgggatctgtttaccatccaggtcaatttcctagtaatgcataaaatttttttaaccccttttaaaaagagaacctattgttgaaaaaccccctgaaaaattcccctgg

SEQ ID NO: 358962 - DNA, 531 bp, Homo Sapiens
ggttttttgagcgcgttggagcggcactcggagcttcaacagaaggtggagccccaacagaagggttctccaaaaaatgtggaatcctttgcatctatgatgagacattatcctataacaaagatgggacctgcaaaggataaactggtcattggacggatctttcatattgtggagaatgatctgtacatagattttggtggaaagtttcattgtgtatgtagaagaccagaagtggatggagagaaataccagaaaggaaccagggtccggttgcggctattagatcttgaacttacgtctaggttcctgggagcaacaacagatacaactgtactagaggctaatgcagttctcttgggaatccaggagagtaaagacacaagatcgaaagaagaacatcatgaaaaataaatgaactttgcttagtggattgactcctttgctgaagtcagttattcatcaagaatgcaattagactaattgtgaataaatgattgaatgaagatataataaataaaagctataatg

SEQ ID NO: 358963 - DNA, 839 bp, Homo Sapiens; identical to SEQ ID NO: 3590

SEQ ID NO: 358964 - DNA, 1049 bp, Homo Sapiens
aatacagcagtatcaggatccaacaagaggttctgcggtttaatatcccgatggcagattccaaaggaatggatataggctaaacttcggaacagctgatacatatacaacttgacataaatcacagggagcgtctgtttggctcgactatagtgtctggcaactctgtatactgtttccggaacatagtccagcaccagattaagatagacctcatctttcttctcaccactggagtagaagaaataacgcaatcggactatgttacagtgatctagctttctcatgatctggagctctcgattcttaaatctcttgtcctgcaatactttcttgatggcgaccagttctcctgaatcacaaagtttggcttgatataccacaccaaatgatccatttccaatcactttagtgtctgtatagctgacttcttgtggcctgtctggaccctgcccaggagttgccaccactgttgtcaccttgctgccgtccttgtctctgctaactttcatgctgccaaaagctgaaggctgctgcaccggcttgcagctctccgcaaaggaggtggttctgggccgccctgacatgatcactctcttcgcgaatcaccttttccttccttcctccttttcttccttttgtctttatgttggggtgttaggttaacgataaatgcagcattaagttctcccacagaagaaaaagaaaaagacttcgtcctcttggcttttcactccttttgtatactataaaaacaaacaagcgatatatttctccttcaagacagatcggcacggatatttaacatatagatgatttaggacttgggaaaaaatacgattctttcccctccctttcctgggaggagagaaaagagagggcaatcctaaaaaaatatgtatcacgtgaaacgggggcaatacttgattgaaaatgagtacttcgaatattatattttcctcggggattttttttccgagtcatgaagaagggaagcggcggaaggatcacgagtctcacgcttgaagagaaagggggatgggtaggag

SEQ ID NO: 358965 - DNA, 341 bp, Homo Sapiens
ccctctgcacttatcactaatattccctatattttcacttgttcccccacctggaatgtgctgcatcaggtgaagtttttgtttactgctgactgccagcaactagaactgtgtggcatatagctggcactcaaatattaaggaaagtagtcttctgctactcttgatgttcattttaacctatttctcctaaaaccctgatgttctagaagctatcaggagtgtgaccgaactacatgaccagaagtctgtattcagagagtgaacaagtcatttgctggatgcttattttattaggtgttttacatccgttatctcaaatcaacctaattaggcagatc

SEQ ID NO: 358966 - DNA, 1216 bp, Homo Sapiens
  misc_feature (31)..(31): n is a, c, g, or t
ggtagctgatcatttgattacacctatcagnctactggagggcttcaacgcagagtaggtggaattcatggttcaaatcagagtattaatgggatctgtttgcacaccaatacctgatctccttggcacaaatacagagctgattcttaaagcatgtccccacaataaagcttttcttaatcattcgtcacctgcttccaataattctggcacttacacaaacttatcaagggttatgtctttatttctgtggtgagtttcctgttgctgtttctagacttttatttcatttgtattttatttttcttcacatgaaacaaaatctgttagcactgggaaagaaaagttcatttgactaatgagtgtagaatgtaaatgtttcttagtacccaaaacttattatatatctaatttttcctagttaacgtaaattgttacacaaagtataatttaaaaagtaaaactatgacaaaccctaaagcttaaatatttttagagaaaaaggtattttagcacagtaagtgaccactactgccttttctctgaatcattttataaagagattttatattaatatacagctgtgaatgaacaacttccctaattttttaattaaataaataggagtgagggaaaaaaactcatatttcaatgattcccaagatcgttaagatataactacaatttactaatgccaaactgctcacagttttctaaacaactacaaaataaataaattgtagcaggtatttaatgagaactgatacccatcaaaattgtgtatggagtccatgatggcctatcctccccaggagtcagagctcacagtgcccaacaccctcattatccagaggagaatctgaggacccatcatgccagtggagaaggctggagcccagcactggcgccactttcctgagatgcccacactgattcttgtcccttctccctctctgaactctacttccagccagtttgggtcataacacaaaacatttaattgtattctctacatgaaaactttagttcaggaaaataaacatattaagaggttatttccctcaaataactgaaacaataaacttcacaacagaataggaaaaaaaatgacaaagaacactctctgtagtctaggaaaaatgcaagaacagtgcttttaaaatgattctaatgagactacagcataaaagtttaacaaattagtttcagaaatctc

SEQ ID NO: 358967 - DNA, 1116 bp, Homo Sapiens
  misc_feature (447)..(447): n is a, c, g, or t
  misc_feature (453)..(453): n is a, c, g, or t
  misc_feature (464)..(464): n is a, c, g, or t
gagttctcttaaacaaattttaaaattcagaatgtaaaaattgcgtaaatttactactgaggggagtgcacttatttatttaacttacttatctggtcaaagccccaggaaacctaccaaagctagaattaatgacaactggtgggaaacctagcatttcctctcctgaagaataaatgtataaatgttatttttgatgtttatatataaactctatatcctaatttactaatactcatcagatgtcagcctttgctctccattttgacgttaaaaaacaacaacagatctagagatacctcaaggatatcatttttgattttgtgttacagtacacttgtagccaaaactggaagacaaaaccaatatataatttggctgctgattggcttacttttagatttaaagttactttgggtatcctgtaatttagttgtaacatagaanatgaanaaacacgtaanaaaagtgaagtagttgcaaagtgttttgcactgttgaactaagtaactgtgtaaatctgtgcaaaggtacgtatgtttatcttactcttcctataaactaaaataacattacagtttccgaatttagcatgggacatagtcagtgtttgaagtgccaacttcatcaagtaatgcatgctttattataaataaaattctagctttgaaaggcgttatgtgttgaacagtatgcttcaggggtaaatttaaaatagtctcttgaagccctagtcatggaagtaacttttattttaattgacattctcttattaaatgccctatccatcattaaaaggattattatcagtggggcaaaacatgaaataatatgatcgaatgggcaatcttgctagttgcgctacctaacagtaccatcttggaatccttcaaaaccaaaggacttgcccccagcactgctgtggggaaccacctgggcttatgaccccctaagggatgatcttttaggaaaaagccgccccctttactttttaaaaccaggcttttaaatgaacctataccctggttaaatttcccaaaggggcaaaaaggggagaggcattttgccgggcctaaatttttccaaaccttataaaagggggaacttgcctttttt

SEQ ID NO: 358968 - DNA, 1306 bp, Homo Sapiens
  misc_feature (1187)..(1187): n is a, c, g, or t
  misc_feature (1236)..(1236): n is a, c, g, or t
  misc_feature (1239)..(1259): n is a, c, g, or t
gtgaatccaagtctgatggtagggaaagatccaagaaatcttcagtgtcagatgctccagttcatatcacggcaagtggtgaaccagttcccatttctgaagaatctgaagagctggatcagaagacattcagcatttgtaaagaaagaatgaggcctgttaaagcagctttgaaacaacttgataggcctgagaaaggcctttcagaaagagaacaactagagcatactagacaatgtttaataaaaattggagaccatatcacagaatgtctaaaagagtatacaaatcctgaacaaattaagcaatggagaaaaaacctgtggatttttgatctaagtttactgaatttgatgcaagaaaattacataaattatataagcatgctattaaaaaacggcaggagtctcagcaaaacagtgatcaaaacagcaacttgaatcctcacgtgattagaaatccagatgtggaaagattaaaagagaatacaaatcacgatgatagcagcagggacagttattcctctgatagacacttaactcagtaccatgatcatcataaagaccgacatcagggagattcttacaaaaaaagtgattccaggaaaagaccctattcttcttttagtaatggtaaagaccatcgtgattgggatcactacaagcaagacagcagatattacagtgacagagagaaacacagaaaactggatgatcacaggagtagagatcacaggtcaaatttggaaggaagtttaaaagatagatctcattctgatcatcgttctcactcagatcatcggttacattcagaccaccggtcaagttctgaatatacgcaccataaatcttccagggattataggtatcactcagactggcaaatggaccacagagcttccagcagtggccctaggtcaccactagatcagagatctccttatggctccagatctccatttgaacattcagttgaacacaaaagtacaccggagcatacctggagtagtcggaaaacataacaaaaactgatacttcgtctttctggacttttcttttagccatatatcataaaccaacacagtaattgccttacatgacttgaaagatataaacagatcttctatcagtagcagtattgttacttctttccaggatgcaaggtctattatcccaacagaagagaanatatttttatatttaaggattatgctgcactgtactacaaaattgtagnacnnnnnnnnnnnnnnnnnnnnnaaagaaatggaaaatgtttactattacaggggactcaacactgccct

SEQ ID NO: 358969 - DNA, 965 bp, Homo Sapiens
cgttactcaggtttatcaagtgagtacgctttttcaaggccatgaacttctactgcaggagtacttcataaagtgaaggggacgtaaaaaatcatttagtattaattctcatctccttaaattcatagatgatacaagtaagcttcagagatattaagtaaaattgcatctgtcttgaaaaaggcagttttataagctactggaagaagagttgctagtaattcttgattcttcagtcattttcatccataagaagaatgtgttattatcttccagtgtgaaggaaaacatgatataacacctgtattacctatgtgctgttactaaaaataatgaacagcacagttactaatgttcgtaaggacaggttaggataaaactattgtttcttgtttcctatgttgtaattaatcacaatcaagtgatgattctcctccttctttccaagaagaaatactcaaccatctccataaagttatatgagactccaaggaaattgaattccacaacatttttggttttaacacctccataatgggtgcaaggtaagtagcctagaataggcctttacttagcgggtgaaggcagtacttaactgctttttcacagcttaaaatccattaccattactctggagaaggaaagaatctgagtagtagagcttaaggggcattagaaataatctactccaatcatacatctgtatatgcatcagatgtggtgtctgaaaacaagacattcaatgtgtttccctgaggaacagagcaatcaccatgcccttttttgttccacaagatacaataacggttattattctggccatatagctttgttttgtctgtatgttttaacacaaaagaattatttccactcatcacatcagagattgtgtttaaacttaagttttaagtaaggccttgggattaaaggctatttcttaagtacctaagtatctagtactccag

SEQ ID NO: 358970 - DNA, 930 bp, Homo Sapiens
  misc_feature (308)..(326): n is a, c, g, or t
  misc_feature (813)..(856): n is a, c, g, or t
  misc_feature (869)..(869): n is a, c, g, or t
ggctgcagtttgattgtgctttatctttaggatcatactggtaaagccatgttttgtctcctgttaaaattcttcaagaaattgctacaggatcttgatcctacttgttaaaatttccattgaaagctcagctcttgtctgcagctgatctgggcacaacagttttggtacccattgagtggaaagtttgctcaactttaatttttcagtcagaatagtgtaagctaagccaatttagatatctatggtgttgactattgtttgtgctgttaattcttgttcttcttcaattaaggcatggacataannnnnnnnnnnnnnnnnnncaaacgatgtggaaggcttgctgctatgtgcttcatcttcagcatcatctcatcccttcttaaaatgagttatctgtttgcaaactgctgatttcttttggagaatcatccccataaacttctcataaagcatcaatgattttaccattcttccacccaagcttcacactaaatttgatgtttggttttgcttcaattttagtagaatttatgttgctctgacaggtgctcttttcaaacttacgtcttacctttttagtgcctcaaactacatcctgttcaggcatgttataacaagttagtatgagcttattttggtataaaaaatttggactccataattgtttcataatatgcatttttcattaccttttggaagacaactcatatcaccttgagcttcttttcatatgcctattttccatatgtatatcttctttggtgaggtgtccttttcagatgttggtacatttaaaaatcagttatnnnnnnnnnnnnnnnnnnnnnnnnnnnnnnnnnnnnnnnnnnnnatcaagagagagncattagacaagaaaaagaaatttaagatatctaaattggaaaggaagaagtaaaatgatct

SEQ ID NO: 358971 - DNA, 827 bp, Homo Sapiens
agttcgacggagactctcagcatttcccacgaggccagaggttgccaggctgcctgaggtctcctattctactctgaaccataaacccagagaagaattactcattaaccagcataaatactgcctgaggatcaaaactcagaggcaaagagggagttcctgactgctagaggtgccaccaccacaaacactttttattcaggagatactttttgagaatctctgctctgttcctaggttcagtgctgggtcctgggaatacagcaggacagacctcagcttatctcttcatagaaattatacaaagagaattggggagacagctaagaagaaaacaaagaaataaagcagttacaaattgtgataagtgctttgaaggaaagaaggggtctgagacaacaacagggaaggggcctctcttgaaacagtagttgggaaggaggcagacatgcaccagtgatgtggtgacaggtgctctgaaggaggtcaccaggacctgacctctttgaaggatcagaaaatacttccctgaaggactgacatttgagcctagacctgaagggtgagccatcaagctaagacaattggggaagagcattccagggaaagggaggaattgtgcaaaggccccggggctccttctaactggaggaatgcaaggctagcttggctggagcactgaaaggatggtctgaactgaagggagagagaccgtaccagacccaaccatgcacaggttaaggccccattcacctttttagagtgactcaatcaaatttggaagtttgaaaaagctttttaacaggctttgcgtaaaagggcaaatg

SEQ ID NO: 358972 - DNA, 610 bp, Homo Sapiens
gcgagtgtgcgacaaggaaaaaaagccacaagattagacttggctcacagcccacaaaataaactacttagaactacctttacttctcctcttttgggaatttggaaaaaatctcagttcttccacaaacccaatggaagccagctactgcagaaggggttttcaggcagacctttccttaatgtccatgttgaacaggaccctaggtgctgttactttcccatggcatctcctcttccacagtagaacagaggcatgcccagggagccccccaccatcctcctggacccaaacactaagtcaggtactttgctcccaatcttaggaaggggcttcagagaccaaaatgtggccttctttcagacgtcatgaacatcagctagactcacagacattttgacagacatatcagggtcaacagatccaaaacagtctcatcccactcccctgaatctagttctttcttgcctggttactcttccctataaaagaaaattcctttatgcctgacctttgctatgcttgcagatcttatggctggagtattctcccaattacaacacctcctcccttactgcagtgttcctgtgaataaagtcgattccttacc

SEQ ID NO: 358973 - DNA, 706 bp, Homo Sapiens
ctcataaggtatttgtatagcaaagacatgaggacactacaaactcttccggttttctgctgatccacatgggctctcaggtgtgttaggttagtgctctgtaaatgagactctttaatagctactttcccagcttctactttctgcaagaattttaattctgcctcaaatgtgctgcacagctttgcaccaccttctatgccaccttttcttgatctagaaagtgattctgctctcttgatcagttccttggctatggcgattcgttcacagagcatggaatgtgcagacatgctgtcagcattattcctttcctagggaaagaaacaaggcaaacttcagtagtctcctaaaattatgacaatcaattcttcactggtgattaaaaacttcaatctagcaacacagcttatggagggtgagtctatgaacctgggcttgtgtatgtctcattctggagtgactgcttcctctgatagctaaggaaaggatggcagctacacttttgaactcttctttaggtacgtctgacacactttagaccttcatttcttcagcttgaaagccatggggacacagcatggtcctaggttaggatacaatgcaagagttgggcaatctgctatataaataattcctttatgtctatcagcggcctgtttaactgctgagaaattttaataaaggcgacaaaaatgtcgaaaac

SEQ ID NO: 358974 - DNA, 447 bp, Homo Sapiens
catcaataacaccatcagattggagaccttcctcctcatcttgatcataaaagtgacacagagctcggatcaataaatttgttgcttcatattccgacgtggcttgcagcacaccagggtgagcacttgttactggaattgacagaagcaaggtaaccaactccaagaagtgatgactgtgaagatatctaaagagaacagggtacggatcatccctctctggaggtccagtaattcgtgccatcgttgggaaagacttaacaggttgttggatcattgtatgaggggcagtttccattaaatgaaaaacttcttctaggaggttaataagcctttctatttccccttcacttatatttgaggattccaaaagatccatatccatagaagcttccacctcattttcatattctgggtttgttctctcaagtccagcatatgtgtcgt

SEQ ID NO: 358975 - DNA, 708 bp, Homo Sapiens
  misc_feature (597)..(597): n is a, c, g, or t
  misc_feature (600)..(600): n is a, c, g, or t
gtgtcagattggctcatttccatcggtctgcccatgtacgccggcaccctctccaccgcgggcttcagcacactgagccaagtgccttctctgtctcacacttgccttcaggaggccggcatcacagaggagagacacataagaaagctcctatctgcagccagactcttcaaactgccgccaggccctgaggccatgtagccaggcccggaatgggcctctctggacaagagccaccctttcactgtgcatatgatgctgatgcaattcctccatcatctctggacgtgcagaccagatccagaagaaaggcctggcgtgtggccaaacagcgtgaaaccttggcacaggactgaggatcctctcctccagaaaagccccctcgaggaaataaattagtgcggttctctttgacctccaaagacaagacaagcacttatttttattttcagaagacaaaagaaccaagatccaactggctgcgaatgctctatctccagtctgtctctgtgtactggtagaggctgggaggagtagggggcagcctgttccgatttctgatagtgcccttgctcttctgtctgtcatcttgcaggnatnccgagggccagatgggcttagctaggccaaagtaacagactcaagagttattgtacattactgaccacgctcatttgttcaaaagttagaacatctggctgcaccagg

SEQ ID NO: 358976 - DNA, 988 bp, Homo Sapiens
  misc_feature (185)..(205): n is a, c, g, or t
  misc_feature (288)..(288): n is a, c, g, or t
  misc_feature (623)..(644): n is a, c, g, or t
  misc_feature (686)..(796): n is a, c, g, or t
  misc_feature (851)..(859): n is a, c, g, or t
catgttccccctcctgtaagccaagaagccaaactgcacaagcttgtaagtggttcgtcttaaaatgttttctaggtgaccctgtttaataggctttcacagactggggaatgctcaagatgtgatgggcctggtggtacaggtgtgacatttgttaccacccatttctcccaccccaccctgcnnnnnnnnnnnnnnnnnnnnncatcccccagcacactataatatagtgaactggaaaagtcccttccagaaacagcttggccagctttgtgaacctttgacatnctgaaaacaaccaaggatccatctgggcttctcttccccagctttttgcctgatgccattttattgacagacaatggactttgaagtcagcctttgcctttgagaaagttcaagaactatggttggtcacgtctatctacaacctaatcctactctttggtagtctctgcagcagccacagccttagcagagctggggttcctgtcttctgcacacgattgactttcttgatgggtaattttttttaagattataccaacagtggatcagctgggttttggccaggaagttgtctttgtggactctgcctgcatggcttagtagtagaaggaaannnnnnnnnnnnnnnnnnnnnnataattcagtttaatcaataaacatgtatttattgactgttnnnnnnnnnnnnnnnnnnnnnnnnnnnnnnnnnnnnnnnnnnnnnnnnnnnnnnnnnnnnnnnnnnnnnnnnnnnnnnnnnnnnnnnnnnnnnnnnnnnnnnnnnnnnnnngggggggggcccccctaaaaattccccgtggggggccaaatttaacgttaccccnnnnnnnnngaaaaaaggggcccctaagggggggcctattaaaaaacagggcccgggccccctttttttaaaaacccgcgggcgggggaaaaaaaccccacgcgggggattcttttgaaaagaaaccccctcttctgt

SEQ ID NO: 358977 - DNA, 610 bp, Homo Sapiens
accatttccatcagcataatgactgtgtgttctgagaaatgcaaacaactttatgaaagtgtggtcatcttgacccccaaagagccacagtagctgtcaattattgagatttttaaatggtaaatattgcaaaagttaaacaagggtaccacaatatcatttataattgatgtcaatattagtagtccactttatgcttaaaataaaatcataaaaaatcaagttttaaggttatattttttaaaataatgaattttctatctctaggcaacatgtctttattattcaagctgaatgtttaagagagattttggtcttaaaggcttcacatcatgaaagtgtacatgcatatgcaagtgtgaattacgtggtatggatggttgcttgtttattaactaaagatgtacagcaaactgcccgtttagagtcctggtaatattgatgtcctaacactgggtctgcttatgctagttcagtatttggtctaagcttcattttgatatgactgaattgcaatctatatttttaaaaagaaaaatcaaaatacattaggggttaacttgggtgtggcaaacaaaccagtcctagccttcaatggcaattattataa

SEQ ID NO: 358978 - DNA, 650 bp, Homo Sapiens
caaagtgaaaaaaatggtgtttggtcacaagtcatgtgtaatcctgggggttatgaagtacggtacagccaattaaaaagtgtataaacagaacggttcggtgagtggtagatgggtatgagatttaaggattgtggtgttattcaaagaggagactatgaaattcccagactgtggttgtgaaccggctcattctccaagaaaggttgcaagctgagaacatccagaggtgagactcagacacattgaaagtgactgcatttagggaggtttaacgagttcttactgatcattccacttgttactggttaagataatttgcccacgggtttgtttccaagtcctcttctaggaccaggctcctggtatttcaggggctggttggctgcacagacagcccctcttatgctgtccttgaggacagacaccaaaccagaggtggaggaagaacggtaggaaggctgatggcaaaagcggctgtgtgtcgaggttattttaactttttactactttttgttactgtttctgcaaatgctaacacataaaccatgacctaacttttgtcaccttggatatctattgaatgttaaacatctctaataaagatggccaccacttaatgtgtggaaagtgatggccttctcgtggga

SEQ ID NO: 358979 - DNA, 894 bp, Homo Sapiens
  misc_feature (144)..(144): n is a, c, g, or t
  misc_feature (193)..(193): n is a, c, g, or t
taaaacatgaagaaacttgtaaggtatgtagatagtctgaacgaaaaattaataatccttttgcttatatcgattcaagttctttatgatcggatcttggcataagtatatgaatcttctcttccaccatgtatcacccaggcntatagtgtatgaactttctctggttgcaaattatgaacttccacactcncaagagtgctgtatatgtcaaagattttactgcgggatccattgagcatcacatggaccacatcacaggcagcttctgcaaacctgcgggaaaccgttttccagaatactgaaacagggttgttgctgcagtcctttctccagtctgggcaagattgatagtttattttggaagtgttgaattcaccacaccatgtgaggtcatcagcaaggtagcctagcagcgtgtcctccagggtgaacatgtcccgctggacctgtgtgaactgatgggccagatcttttattctgctccaaagaagaatcttgttgcaaggtacggtctgagttcccaacttcattagtggctgatagtcttcttcagtaatgttgcaaggatgttttgaaataaatgcacccttgaaagcatcccatacactttggcagtctacatgtctcatctcaggatgaatttcagtgtacttgacgcatcgcgccaggacggtctcgggaaagcgcttggtggtgcccggaccgctccactgtggcgccacctcgggacgaccaccgcgagcaccacgacgaggatcaggaccaggatactgacgccaagacagagttgggctctcctagagagccggcagcagggtttgtccccggacaccgggctgaactcgcagttggccatagggctccaggcggggttggctgggcgaagatgag

SEQ ID NO: 358980 - DNA, 869 bp, Homo Sapiens
gaggagtcccgtgtgttgccggttgcgcagcggggggccagcctggttatgtgagcggttcaatggggtgcgcggatactcgtggtggagtttgcagtgcgcgggcagtgtgacctggcgtgcaccacggtgttctcccaagttgtggtacgccatgtgcaccagtacggtgcgcatgagccaggcgtctgttgccaagacgaggtgctcagagttctcaccaggccatggtgtaagtacccaagtattggtggtttttgatctgtcctccatatacttcttgagacttttcccattaatttccagagtatattcataagcaaaaccactgatagcgtctatatttatggtcgcttttgtctttgcagctccaacatagaatgtttctttgcccactaatttgaacatccactcttttcttatctcttcctttccatctacatatactactcgtttgcctgatgtagtcccatgttcaaattcgatcttgtggactccgtcacttaaagcaacatcccaaacagctacgagatctgtcattttttctaggctgtaaggaggactgtgcatctgtgggccgcgggaggctctggggtaggtttcaccaaacaaccggttggttccgactcggctgcgatagccgcgtggccttgctcccctggccgagaaacaggcgcagccggcgcggaggttgaaagctctgcaggcgcgagtaccaaacgcgccgactgtttgtcgcgcctctcaggtcccctgggcgaccagcgcaggaggccacccctcccgccgccacggacccaaccctggtcctctgcctcagccgaaggccgcaccctccgcgcataggccttcctcagccccaacccagc

SEQ ID NO: 358981 - DNA, 443 bp, Homo Sapiens
agtctacattagggggaagtgagcgcctcccatgtgcagacagtgtgtctttatagatttttctaaggctttccccaatgatgtcggtaatttctgatgtttctgaagttcccaggactcacacacccgttcccatctcacttgcccacccagtgtgacaaccctcggtgtggatatacccccgtggactcatggctcttccccacccccactttctataaatgtaggcctagaatacgcttctctgttgcaaaactcagctaagttcctgcttccaccttgatgttgaaatatcttatgtaagagggcaggggatgtcgtgaagatggcaagaagaacacagtttcaaatttctggaaaagagcctgtggtggagatctaaagatgtttagggaagagctcgactaaagaacaatgaaataaatggtccaaggggaagtcat

SEQ ID NO: 358982 - DNA, 953 bp, Homo Sapiens
  misc_feature (228)..(338): n is a, c, g, or t
  misc_feature (472)..(531): n is a, c, g, or t
  misc_feature (759)..(759): n is a, c, g, or t
gtccctatggtcctttccagcatttccaaatcttggactcaaattattttctcttggtgtgaccacacagcctagagaattctgagcaataggagccagggctttccctgactctgcgacagggtcaaaccaaggaatggctaaacctgtgaggttttgtcatccccgggggtactactgtagggggcattatttattaggaagcttaacaaggtaactacggcctgnnnnnnnnnnnnnnnnnnnnnnnnnnnnnnnnnnnnnnnnnnnnnnnnnnnnnnnnnnnnnnnnnnnnnnnnnnnnnnnnnnnnnnnnnnnnnnnnnnnnnnnnnnnnnnngaattacattgatgcatttattgagaaaggtgcaagaatttcacctacacagagggacacatctgctttggtatttataatagaaagctaaattttaattttttaaaggacactgctaatgattgagaatcaannnnnnnnnnnnnnnnnnnnnnnnnnnnnnnnnnnnnnnnnnnnnnnnnnnnnnnnnnnngttgggttgtgtccttatttatataaatactttatccgtaagaggcaaggaggaaaccttctttgcttttacatattgtggttgtcatcgtccctattttatttctggtgtgatttctctgtcttaccttctaaatgagaaaatgttttcttgtatttgtacattgtcagattctatagttttcctagataatttaaccaaatttgctctatggattattatttctgngaagtataaaagtttctatttttaaatggtctggtaaaataccttcaagaaacttgggctttcttttttcctcacaaactcccccacctggtgggggggtttattttggtttttacccattccaccaagaaaaacttgtggtaagaaaaatccttcctcatgggccttcccatgggtaacccttggtaaaaaat

SEQ ID NO: 358983 - DNA, 1757 bp, Homo Sapiens
  misc_feature (55)..(55): n is a, c, g, or t
  misc_feature (1090)..(1100): n is a, c, g, or t
ccctctgagatagatacgccatctcagagggctgctaatataactaactgtacangacacacataattttagcagccctctgagatggcgtatctatcggaaggatttcaaacaccaattgctttacctgaacaaatggtgcttaccctttgaacagcagagtgaccacgtagaaggaaggaaaagggcaaaatcgcttcagttaaactgaaattaaatgaacaataaggcaactatataagtaacttctagtagcattgcctgagagacaaattattgtttgataattttcattgtgaataggaatccaatagatcatattgctttactttgttcctttttatactatagaataatattttgttctctagtatatcaaaataccaaaatattatctcatattttctccctctttctcttactcttaccaagttttcctggtggcttggcttccctgactaaagaattaagtctcattgttactttccatttctattttcttaccacttggttggctccctttgtctctgtacctttaccaacattaggatctcacctctttcttcctcccttaattcataagcaccactcctatcaaagtcccatctcttaaccctgggtatcaaacaaactgtgagttttccagaatctgtttcccagttttcccctcagctttcctggtctcccatctgaactgcttctttgtgcacctcttgttctttctcttggctcccagtcttgattcctgtgatcactcttgcatcactaattgcacaagtgatttcaggtgcaattctgattagcctgcgtccacacagtgatcgatgatcctatgtgcctagaaaggacactgtgtgctgctcatgacctgcaacaggaaaaaagccatttcttgttagcagtgtaagaaccttagagcaaaggagttgaccttctgattgaatataagcacaaccatattaaatgaatcaatacaagaaaattatttctgatactatgtatgtacatatttcttctctaaaatgtatcattcttttctaatgtatatgatctaacaaaaatgaaacatgaaatgcagtagcaaccactnnnnnnnnnnnttcaaggacatctaactttttctctcacttttgcccttggtttatccttccctgtgattagataaacaaaataaaaaacaaaatgctgtatttctcttcttacgccagtcagaaccaatccgaaaagaatgtgtgttgactcaggtttggcagttatttcaggaagacagatatggaccttttaattgataaatattcttattatcctggaatgccagaaacagaactatgtcctgcttgtctagtaggtattcgctgactttctatgtgatatagatgcatttgtaatactctttttcaagtgctaaaggatctctaaaatctcaaactgattaatatgtcacctggcaggtactggactaccgatggaccattctacaactaaaaaaaccttacatttcgatcacaaaataaagacaaaaaagaactaacgcacaaacacatgagacccacgacataaagataccccccggggggggccaaaacataggcgtgaccaccagagtcagatgacaaaaagaggggcccaaaagagcgagcggaagacaagacgagagcgcatgcgagccacgatcggccagccgcgcgagagtggggaaccgagcagccggggagagtcgtaggcagagacgctgtaataggagcgcgaatgcatat

SEQ ID NO: 358984 - DNA, 741 bp, Homo Sapiens
gaagtaagcaaccgtgcattaaaaagctatgaaaagatgaagagaatatgccttcaaatgggaaggaatacttaaactgtgaataagacctagttcaacatggaacttcctggtggccaagtcagaagagaagcacagtgagttttctaactttcataatgagaaaagagaaagcacactgtttttcaaaaaagaaagttattacccagtcactgaattctaaaagaacttcatgcttgccttgttcatggacttcaaataatttaattatttaaaataattattttgtctaaaattctcatgtgtctctgttaattataacatgaataatagcatttacattatgcataaatgacaatagtatatcttctaatagctgtataaaccatctactaagctgtcaagattaattgacattaataaaaccactgtctcacagagttccaaaaatatggattctctgtaagaaagtttcttctttcagtgtcagaagaaaaaattaaagattcctggatctgcttgtttggcattatttgataaaagtgaaagaaaagaagaggctctacaggtttctgaaatatcaaatgctgtggaaatatttaaggctaaatgtcttttccactagactacaaataacagctatattttctcaacacttttattgaaatatttttattagatgtgtgcacatttttgcccttatctgattattttaaaattggcaggtgactttctggggaa

SEQ ID NO: 358985 - DNA, 681 bp, Homo Sapiens
  misc_feature (267)..(285): n is a, c, g, or t
  misc_feature (308)..(361): n is a, c, g, or t
  misc_feature (545)..(556): n is a, c, g, or t
ctgcactttgcttttcttacacaataccttctggaaaaactctccaactgttagaaccctgatttactaccttcaatggctatacgatattccatagcaggaattccacttgattcttcagccatccccctttgatagactttgtcttggtatccagttttctaccaccataaccgatgctgcaataaaagaagtctgtgcacagataagcttatgtgatgacattttatttctgcaggatagaatgccagggttgaagaatacgcnnnnnnnnnnnnnnnnnnngagatgaggtcaccctctgtcannnnnnnnnnnnnnnnnnnnnnnnnnnnnnnnnnnnnnnnnnnnnnnnnnnnnnagctaaagcaatcctcctacctcagcctctcaagtagctgggactactcttggtataatatagatactatttcacatctcaagaaattgttttacaaacatattgttttcccagttatcttgtttatgatcagcgcctcaagagtcaggtcaacagaaattttccaaactgaagcacaaaatgnnnnnnnnnnnntaagaatagagcatgagacatgtcaaacagcagcaaaaattctaacttatgtttacatggagaccccaaaaaagaagacagaagatgaggcagaaaaaaataaatgaagagataatggtggagat

SEQ ID NO: 358986 - DNA, 676 bp, Homo Sapiens
  misc_feature (112)..(112): n is a, c, g, or t
  misc_feature (117)..(117): n is a, c, g, or t
gtaactaactctcttaagttctttacttagagcaaacttctgtccactttcaccaaatgtgcaactttaatgatgggggtcctgaatttactcaagctttcttttcttttcntatcntgatttctaagcacctaggtctcctcatcgattttaattttaattgcagtttctgtcacaagcctcaaatggtctactgaatgaggcagaatataaaaatacatcatctcacttatatatagaatctaaaaaagtggatctcatagaaacagagtaaaaaggtggttatagcaggggctgtggggacagggacaaggtgttggtcaaaggccacaaagtctcaggcgggaggaatacgttttagtgacctatcgcactgcacagtgaccagagttaataataatgtgttacatatttcaaaactgctttaaaaaaggatttttaatgttctcatcacacacacacaaaaggtaagttggtgaggtgatagatatgttaattagcttgatttaatctttctacaatgtatgcatagatcaaaacattacttgatttaatctttataccatgtatacatagaacaaaacatgacactgtaccccatagatgttcacaattactacttgtcaattaaaaaataaattaataaagtatgaataatgtgagcaataaacagttt

SEQ ID NO: 358987 - DNA, 1044 bp, Homo Sapiens
  misc_feature (834)..(834): n is a, c, g, or t
  misc_feature (960)..(960): n is a, c, g, or t
  misc_feature (969)..(969): n is a, c, g, or t
gagcgggctgggcatgcgcggcgcgcggttggcactggctgcgagcgggcgggcggctccagacttcacaggcagcagctagcgaggcggtctcgcccggcgcgaggccggcgctgtgctcgcctcggagatcgctgctctttagctgggtgcagaaggcggctccgtcggctcgcggacgactggctgggcgcgaatcagattggggggctttctcccggtcccctcccacctcgtctgggctcgcggcgtctccggggaaagccgtggccccgagggcggatccgagaacacacaagtgaaagacacaatgaatggtcatatttctaatcatcccaagtagttatggaatgtacccatctcagatgaatggctacggatcatcacctaccttttcccagacggacagagaacataggttcaaaaacaagtgcaaaggccctttatgaacaaaggaagaattatgcacgggacagtgtcagcagtgctgtcagatatatctcaataccgtgttgaacacttgactacctttgtcctggatcggaaagatgctactgatcactgtagatgatggaataaggaaattgaaattgcttgatgccaagggcaaagtgtggactcaagatatgattcttcaagtggatgacagagctgtgagcctgattgatttagaatcaaagaatgaactggagaattttcctttaaacacaatccagcacttgcaagctgtgatgcattcatgcagctatgattcagttcttgcactggtgtgcaaagagccaacccagaacaagccagatcttcatctcttccagtgtgatgaggttatcgcanacctaattagtgaagaaattgaaagtacagccataccttggacatgcaaatataaatctaatgagcattctaaagacaagttgtcatggctctcgtgattgcgaactcctggatagcttggatttngatttacgntatatcctggctaatatgcatacctgggtcttatttttgagaaagcccaaatgtaaaagaggccatgtcttctta

SEQ ID NO: 358988 - DNA, 677 bp, Homo Sapiens
  misc_feature (64)..(64): n is a, c, g, or t
  misc_feature (75)..(75): n is a, c, g, or t
  misc_feature (93)..(93): n is a, c, g, or t
  misc_feature (100)..(390): n is a, c, g, or t
tttgtctagataagtaatatttctcaagcacatcaagcatagatatgtctacatatctcatatntgcctacttcncaaatcattaaggtatgntatgttnnnnnnnnnnnnnnnnnnnnnnnnnnnnnnnnnnnnnnnnnnnnnnnnnnnnnnnnnnnnnnnnnnnnnnnnnnnnnnnnnnnnnnnnnnnnnnnnnnnnnnnnnnnnnnnnnnnnnnnnnnnnnnnnnnnnnnnnnnnnnnnnnnnnnnnnnnnnnnnnnnnnnnnnnnnnnnnnnnnnnnnnnnnnnnnnnnnnnnnnnnnnnnnnnnnnnnnnnnnnnnnnnnnnnnnnnnnnnnnnnnnnnnnnnnnnnnnnnnnnnnnnnnnnnnnnnnnnnnnnnnnnnnnnnnntgaactttttaaataaacgttagcccattacacatcctgtcatatggcatgtaggcagtgtggtatggatgaaagagatgtggagagaggcagacatagactgaaatcccagctttgtctgttactagatgtggaccttgggcatattacttagcttctcttagcttcagtttcctcatctgtaaaatgggaatattaattacaatgctcatatggttgctctgaggtttaagagaaatagcatatgtatacttcagcattcagtatgtgccttcttgtaacttcct

SEQ ID NO: 358989 - DNA, 765 bp, Homo Sapiens
  misc_feature (590)..(590): n is a, c, g, or t
  misc_feature (615)..(615): n is a, c, g, or t
  misc_feature (678)..(678): n is a, c, g, or t
gttctaacacctaaagagcctagcgacactgctagttttaagccatctcatgagggacctttgtcgcattaggttacaacttgtgccaaaagaactagagggaaaagatgcggcctgagccacacgctactgtaagggccggagaggaaagcaggccttggcctcgcttgttcctgggctgtttttcgtaggatggatttcatttgtcagtcctgcagcgtggcacacttaagggaatggaatgtatcatagggtttcagtttcagtaaacattagcgggcattatctgtaaacagtaactagtttattttgtgttaaattgggaagaacctctttcttctgccacgggtgagatgatactaaaagcaggagaaaataacaaatgagaagagcccttctcttctcagcttctctcaagagtagagactggtgaaaaggggacaggaagaggaatccagctgaagagtggaaagttaacaagaacatcaagaggtacatccctagagagcatctctgggtcacttccaggatgacctcatttttctggagaggtacatgtgctagctgcatagtaacctatggcacagcanaagcacaaggaagcgcccattggtntcgttagggacaattattggtagcccaacctatctgaagaatacctttaatagcagtagagcnactctgacattgcactgagtaaaggatgttttctcgtactgggcttttataaaccgtggcctatatgggcagctttatgcttataac

SEQ ID NO: 358990 - DNA, 1024 bp, Homo Sapiens
gaccttattttttacatctatgtggggaagtgaactttaatcaaaatgagaaatctgaaaataagggaggcctctacagcaatagttctggaaatactaaagggaataccagtcaacttttattttaaacttttatttcaccaacctcgaagacaaggatttggggccaatttgagaggaccacccataataaaatgtacagttataaaattgcagggcactctttatcatttcaaggcacactctgttttatcccaaatgactataagttcaaggtcacagtgatgatatatattcaattttggtctggtttctcatgggtatgttgttatatttatagccagtcataagcttcagaaactataatacaatcacttcaaaataatatgtcatttttatatttttaaaaatgtaaatatgtaacataatttcctaatttatatacagtataaatcgggagttttttttccactgcacagtggaggaagggaaggttatttctaccagtattccaacaaatacatatttgattatatagaaagcatgattatgttaaatacaggcatctcctacttagaatacaattattcaacacaaaagatgaactcatttcaaagaacaatgtaaactgaacttaggccttgtacactatctttttactaataacacctatggtccccattagaataaactgtcactaaatcaaggccagagatttcgatatttggctttctgtcctgcctccttacttccaaggctatttatgcaaactgcatcaacattactgggcagagaaatacttagtaatattaaattatggggaaaactataatatgaggaactgaaatttccttagaatctttatggggagaaattgaagcacttaatgctgataaaaaataatttctaagcctatcacattttctacttttcttccatgagaacaacatattaatgttaacactttagtattaatatcttgttttataatattttcctttaagatacgcatattaaaaggttg

SEQ ID NO: 358991 - DNA, 793 bp, Homo Sapiens
ggcttttggcgggggcgttccccaaccctgccctctctcatgaccccgctccgggattatggccgggactgggctgctggcgctgcggacgctgccagggcccagctgggtgcgaggctcgggcccttccgtgctgagccgcctgcaggacgcggccgtggtgcggcctggcttcctgagcacggcagaggaggagacgctgagccgagaactggagcccgagctgcgccgccgccgctacgaatacgatcactgggacgcggccatccacggcttccgagagacagagaagtcgcgctggtcagaagccagccgggccatcctgcagcgcgtgcaggcggccgcctttggccccggccagaccctgctctcctccgtgcacgtgctggacctggaagcccgcggctacatcaagccccacgtggacagcatcaagttctgcggggccaccatcgccggcctgtctctcctgtctcccagcgttatgcggctggtgcacacccaggagccgggggagtggctggaactcttgctggagccgggctccctctacatccttaggggctcagcccgttatgacttctcccatgagatccttcgggatgaagagtccttctttggggaacgccggattccccggggccggcgcatctccgtgatctgccgctccctccctgagggcatggggccaggggagtctggacagccgcccccagcctgctgacccccagctttctacagacaccagatttgtgaataaagttggggaatggacagccctgaaacaccacca

SEQ ID NO: 358992 - DNA, 690 bp, Homo Sapiens
  misc_feature (24)..(24): n is a, c, g, or t
  misc_feature (624)..(624): n is a, c, g, or t
tgtggggaagcaaaaaggcaaggntgtagttccacaggcagaagcgagctgtgacattgtcagtgcagcgtgtaagtgtggctcctcacaggcggccattgattgtgagacctcatcttgctctgaagatttcccggtggctgtcatgcattgcttctcaaaagccttgcactgtgataaggtttaaggagacagattgttgcaacaatagccacttctaaggaatgttattatgtcactgcagatgatgtttttaagaggtgattcagaatgatagtttcgtgattacggaaaggagttccttctcaaactgcaaaaggaaagatgaaaatagtcatgaagcctccagaactgaaattgggcaccttttatgatggatatttactttaattcaatgcaacacatatttatggggcatagactgtatcaaatacttaataaaacccattcagtttggagctcacacctaagctgcgctgtaattggattttcttaatattcattaaaaacacaaaacaatattattttacttttttttggtatttgcatttgttgcttatagtttgtggcgtgaagcaaagtggtgtgaagttgaagaagggcactatgaattaagccacacanatgcctctaagcgctgctaggagacttagaaataattacttagtcctctgacagccatatggggtg

SEQ ID NO: 358993 - DNA, 463 bp, Homo Sapiens
ctccaaataaagttcttggcttgcttaaaaatgtagtgtaatgcagttgttttctctccgctaacctgagtgtccacagtagatatcgacacacctttaggaaggtgacggctcatgggtaagtgcacggctgtgcctgtcatcttcagattcttcaaatactgcaaactatgaaacatgttaagaccaatataaacccaaagatgtgagttgattatactttaataattacattcataaaaagtttactatcttcaatgccaaaaaagtcttaacctataaatgattatatacaatcttagaaaatgtgcttaacagttatggcttctttatttctatgaggaaagattagtaagaaacttaaaattaacatccttttaagattttctgttccattttaatgtattttaggcatttagaactagcctggcataatgaagaaagaaataaaagaattaaagat

SEQ ID NO: 358994 - DNA, 1734 bp, Homo Sapiens
  misc_feature (48)..(84): n is a, c, g, or t
  misc_feature (1605)..(1618): n is a, c, g, or t
gagtgataactcactatagggcgaatggagctcacgcggtggcggcgnnnnnnnnnnnnnnnnnnnnnnnnnnnnnnnnnnnnnatcaggccaaatcggccgagctcgaattcgtcgagagcggtctgtagcggtgggccgcaccgaggcggcggcggcggcgacgactgcagctcgggaggtagcggcctggcgagggacgggccggctgccctctcggacggccgcggcggagggcaaaaatggcggaggcttcggcggccggggcggactcgggcgccgctgtagccgcccaccggtttttctgccacttttgcaagggcgaggtcagccccaaactaccggaatatatatgtcccagatgtgaatcaggctttattgaagaagtgacagatgattccagttttttaggtggtggcggcagtcggatagacaataccacaacaacacattttgcagagctttggggccatttggatcacacgatgttttttcaagattttagaccctttctaagtagcagtccactggaccaagataatagagccaatgaaaggggtcaccagactcacactgacttctggggagcaagacctccacggttgccattgggtcggagatacagatctcgaggaagttctcgtcctgacagatctccagctattgaaggaatactacaacacatctttgcaggattctttgcaaattctgccattcctggatctccacaccctttttcctggagcgggatgctgcactccaaccctggggactatgcctggggtcagacagggcttgatgccattgtaacccagcttttaggacaactggaaaacacaggccctcccccagctgacaaggaaaagatcacatctcttccaacagtgacagtaactcaggaacaagttgatatgggtttagagtgtccagtatgcaaagaagattacacagttgaagaggaagtccggcagttaccttgcaatcacttctttcacagcagttgtattgtgccgtggctagaactgcatgacacatgtcctgtatgtaggaagagcttaaatggtgaggactctactcggcaaagccagagcactgaggcctctgcaagcaacagatttagcaatgacagtcagctacatgaccgatggactttctgaagctaaagaccacacctgaatcagggctgtggtaatcatcttaccatagctgtaaattgtatcaaaacaaaaaattagtagatggatttaggaatatgtaagaaactcaacacataatataaatgcaatgaatgtttttcttctttaaatttaaagttagtatctacagatggaattgtatctacaaccaaatgcctcttatccctgaattcagagtgataattttataagtgtgaaacttaattatgtagggctccccccgtctgaatagaattaattccttaaagtctagttagggtcctgctgtctgtcatgttgccttgtaacggatgtttccacctccttctccaacctctaccccaccattagtgtattttactataaaaacagtggaaccacagccctaaagtcctgctgatataaagtccttttgtcttaattgtatttnnnnnnnnnnnnnnctactcttgatcacattagctatgaggcgaggtcaaattcaggtatctaagactaatgattttgttttgtcttgatccccagagagcaaatcaaagaaaaattacagcaagaagag

SEQ ID NO: 358995 - DNA, 1601 bp, Homo Sapiens
agcgggcttgccgggaaacctggaggctggcccgcctgtggaggccgggagggtcggggcaggccccgcccatcatttcagtgcgtggtgccctcgaagcgcccgcggagctacgggaggctaggcaagtacggttcagaccgcctcctcatcaaaaacagcctctctggcgccttcctgctagatcgacctttcattccttggaaagagtctcgcacactgtgtgatcatcgtttgagcccaaagtgctaaaatacaggtgtaggtgtttgagaagcgctgtagttgattatggacgaaatgcctaatttaaggagcagaggcggagtggaaaatgaaaaaagcttcaccgcagtggagacttgttaacagccctggggagaaaggggcttaacagagtctggaaatcgtgaaagagcttgaccgatgaaatgggcctggctgtcgtatcggtaatttggtgaatgttgcttaagatcagcctggaaaggtagttagtcagatccgaagtgacatatttgcactgccaaaggaggctctggaggttaaagtatgtgttttaatttcgttgttgaggccatataatgcagagttgacggaccgaccttatgagtcaccttggagcggagtagtggagacttaaagacagactaccctggagctggcttcaaactagttcttaatattgtgactcgaactccccatccccagaaattctcagatcttagaagccaaagactggcaaggatactagagggaactactcgagtaggcgaggtcagactacataccgaataggagtccttccaagaaatacagaaggctgaggccggggtgctagagaaccttgccgtgctggaattcacgttgacgcccccacggagctctgctgcagagccctcgagtcccgcacttccggccgccaggtggcgctggttctgttgccaactcggagagactgagctgggccacgcaagatggcgccgtccgccttgctgcgtcccctttcccggctgctggcccccgccaggctcccgagcggcccttcagtgcgatcaaagttctacgtgcgagagccgccgaatgccaaacctgactggctgaaagttgggttcaccttgggcaccactgtcttcttgtggatctatctcatcaaacaacacaatgaagatattttagagtacaaaagaagaaatgggctggaataaacttttgaaacactaatgtagtatgctccgtatagtgattgtagctgttcctctggattcaccatctgttgagttgtaaatgtgagagaaaaagttatatgtgaatatatatcaagccagcatttgtattttgcatcattaaataaaaagaaataaaaatacttctgtattcttccaaatacagcatatttgggaccccttaccttcgtacactctcccccccactaattgttggcccgcccctccggcccctcaagaaacttttccaaaacctttccctttcgggcgcccggggccccatccagggaaagtgaacaccgcgccatagcttggtttcccaaagcagcatcccaggtccagggcacacaagagcatcggccaccctcccccaat

SEQ ID NO: 358996 - DNA, 1247 bp, Homo Sapiens
ggcctgggtggcgaattcggcacgaggattctaatcaggaataattgtatgtaaagatacctctgaggtccaacagctctgatcattttgggcttcaagtctctctctgtgactggtgattttgtgggttgaaacttctgacctaaaattccactttaggagtttgtcgtcttggactcaacaactaacaaaatgaaaaggacccagcaagcctcacttgtggaatgaaaatggggcattcaggaaagcacctgtcctggccccacagtatgtcagctgtataggcaatagtagtagctgtctcttagaagggaaataatgtatcacctctttccagaacgaagcaaagttgctggcttagtagagccctcaattcatagaggttactgtaattgggcctggctcactgatgctttcgccaactgaaactactaggatcctgtgtgtgttcaaactcagtgccattaacaaacccaaagtgaagcggtcactcctctcagtggaaagagcacgaggatgttctcagctctggccaatactccatttcataaaccatgttacatttttgttaagccttggctctggatgtggcctagatatttgatattctaattggaaattacagattaaaaagcaccctttctttgtacagtgggggtaaaagtcacagctgcttagtacaaccatctgggttgctcaagtagatgcccataataagagactattttctgataagactgactggaatcaagctgccgacagctttctccatccagattgtgacggttgctacctggatccatcattttactggtatggcaaaaaatcacccatgtgacactgggtgacatggtaaaagtacatggtacttttacagtaccatgtactgtacaaaataaaggtctctttatctgaaaaaaatctcttcttcttagccctcctctccttcaattccagtggggtcctcttcccgcctctctccctatctcttctttcatcactctcccgcgcttcgcccaatcgctcccctctgtcacacctctgtcctctcctactcctgccgttccgcattaccttaccactctctctcctcttctttcctctacgagctctcctactttctctccttcaattgtattgcttcttcttatccttctctcacatccgacggcttattttttctcttaaccctctcttcttcacacttctccgctcctcttccctctcttcccagttcgcgattccct

SEQ ID NO: 358997 - DNA, 1112 bp, Homo Sapiens
  misc_feature (855)..(855): n is a, c, g, or t
atacattatttcccttctaagagacagctactactattgcctatacagctgacatactgtggggccaggacaggtgctttcctgaatgccccattttcattccacaagtgaggcttgctgggtccttttcattttgttagttgttgagtccaagacgacaaactcctaaagtggaattttaggtcagaaccctctacccaaggaagagatatccaatgtgtaaaagagcccaagagtaaactaacagctgcttttcagaaggggtggacctgggacccttgtcagggaaccaagtcaatcccctggcccccagctcccaagggctgcccccttttgccagaagtttcaacccacaaaatcaccagtcacagagagagacataaagcccaaaatgatcagagctgttggacctcagaggtacctttacatacaattattcctgattagaattctatgacttatgcgaattacagggaattagaattctctctataacttatgggaattaatccctactacactttcagatgtaaacataactgtagtatactctactggccccaaagtacctcacccataaagttattaaatttgtttgccttcccattgccaaaccccattagctaaatctaggtgtcctgtacccccacaggaactagtaagatgttgccttgggcatggattcaataaagccatataaatctgagtccctcccctctctggaggtttcccataatacttgggtgggtgccaatggcctttggaagcccagggaaaactccttaaagcagatatagctggggtatatggaggtgtcaggaggtgtgggggcagtacctctgtgcaattaaggcnacacttacgttgaactgcacagtggctgctcaccattcagccaaaagacttttaggttcatgcaaagccctgtatcaggtggtactatcaatttcattacattgaaaggatgtcttttccacaattctctgatcatatttgaggttctccttgactctctagcctcctaataaggtttgtgccctctgattgacttaagcctggcttacacagaagctttctgccttcctagcagaagataactaaattatgtgtag

SEQ ID NO: 358998 - DNA, 763 bp, Homo Sapiens
gggctgttggccaggactttggcctagacaaaggatgggggttgtggctgtggagcggaagtgggtctcaaccactataaatcctctctgtgcccgtccggagctggtgaggacagcctgccagagtctggtctctggacactatgggcacacgactcctcccagctctgtttcttgtcctcctggtattgggatttgaggtccaggggacccaacagccccagcaagatgagatgcctagcccgaccttcctcacccaggtgaaggaatctctctccagttactgggagtcagcaaagacagccgcccagaacctgtacgagaagacatacctgcccgctgtagatgagaaactcagggacttgtacagcaaaagcacagcagccatgagcacttacacaggcatttttactgaccaagttctttctgtgctgaagggagaggagtaacagccagaccccccatcagtggacaaggggagagtcccctactcccctgatcccccaggttcagactgagctcccccttcccagtagctcttgcatcctcctcccaactctagcctgaattcttttcaataaaaaatacaattcaagttgcttctcatggatggcactgcttttctgaggactcaagggccaagatggaggggctgactcagtccagccaacatttaatgagcacctactttatgtatggagctctaacccatgggtccatgggaataaagcagtgaatagtaacaataaataatcgtaacagc

SEQ ID NO: 358999 - DNA, 438 bp, Homo Sapiens
  misc_feature (27)..(27): n is a, c, g, or t
  misc_feature (43)..(43): n is a, c, g, or t
  misc_feature (52)..(52): n is a, c, g, or t
  misc_feature (77)..(77): n is a, c, g, or t
  misc_feature (94)..(94): n is a, c, g, or t
taaaactatggaaaagtgcaagatagncctaagattaaaattnggttggttntcctcctaggaatcctacatatgtnactaattaataccttgncttgccttattacccaagttcctctcattttacatttatgcaggcttcagtcagagcatcctgcatttaaatcttggatacaagcttcttcctcctgacccagtttaatgctacaagtatgaagggtgaaggagagtactttgcatattggagtcacttgggacttgtgtgggaaggcttttgttttgcctaatttcacaaggtgacaagagttcactcctcagctggaagataaacttagataaattaactgaaaaccatttttcactctttctcacttcacctccaacacactttccttttagaatggcttctgcctgttcctttaagttcctccacttgcc

SEQ ID NO: 359000 - DNA, 506 bp, Homo Sapiens
  misc_feature (477)..(477): n is a, c, g, or t
gtgctttggggttaaaaattatctgctagggatgataggcctgggtttctcgttgacatctagatgggcctgattagagcagtcatctcctggtaggcacaaaataatcaccaacagtaatgttgtatctgtaatgtttgtttgctttttaaagttttattcttgatttcttgtaaacatccattgcactgaggccgtatcattccttaagacagccctacatcttgccttggtaatcccttagataatgtggaaactcaaaccgttaggctccagtcatcttagaccatttcccatccgttttgtatttcctcgtcctgaaagcagctgaactgaaagtaagtaataatatgctggaccagtggggaacggatgtggggagtatttgtgggtgtgcttaaaatactgttaattatctgtgaggctgcctgacacgcttttgccaatcttgttttcatcattcattctgcaaacgtntatggagggccttctttgagcacagaggc

SEQ ID NO: 359001 - DNA, 685 bp, Homo Sapiens
  misc_feature (267)..(267): n is a, c, g, or t
tttccctcaaggaattaagtaacggcccattggcttgggtgacctataagttccttcatcatggacttcatgtttcggattcatgtagaggagaaaccaattaaagcaaccaaggttttcatcccctatccattagaaggaagtatccaaaaatgggcaagttcaaaaaaggaacacttttttgattgataagcatatatgcccatttaatgtccatgactacaactaatgccctttttcaaaaagaaaatggtttgaaaagatcanaaccacagagcaatctcctacaagttccaaatttacatcttctaagaatgtataattttgccaccattaaaatgaaatcttaaaggtaaattaaattctcccattgactctgacattgttttaatttctggagaactgtacagcttcattatttctcaccagctccagtagaataattttttaaataaagaaacccactcaaatgcttcatgtcttccaatagatactgaaagcttatttattaaatatctttgtataatccagcttatttattgtacccagtttgcaaatgctcctcagggcacttgagggaataaatataaaacaaaaatgaagttgcttccctattgccggacaactgcacctgtgacaggtggctggtctttctggggcaacctgggaaagattctgggactcg

SEQ ID NO: 359002 - DNA, 1294 bp, Homo Sapiens
  misc_feature (47)..(47): n is a, c, g, or t
  misc_feature (139)..(139): n is a, c, g, or t
  misc_feature (263)..(263): n is a, c, g, or t
  misc_feature (339)..(339): n is a, c, g, or t
  misc_feature (345)..(345): n is a, c, g, or t
  misc_feature (352)..(352): n is a, c, g, or t
  misc_feature (354)..(354): n is a, c, g, or t
  misc_feature (357)..(357): n is a, c, g, or t
  misc_feature (403)..(403): n is a, c, g, or t
  misc_feature (433)..(433): n is a, c, g, or t
  misc_feature (467)..(468): n is a, c, g, or t
  misc_feature (499)..(500): n is a, c, g, or t
  misc_feature (524)..(524): n is a, c, g, or t
  misc_feature (528)..(528): n is a, c, g, or t
  misc_feature (552)..(841): n is a, c, g, or t
cgtcacctcagtagaatttatatggaaaggcgcacgcccacagatanacgttaggtggagtagaggcatatcagagattttataatctttatacagagttttagacgtagtgtccgtaagaaatagtttaaattttggncgaagcccttcaacggttacagtgtttgaggaacattgctgccatttaaaccataaaaagggttgtgccaccaagcttattacgctaccggtcaacaagccaagttttaagctctgaattctcngtgaccaatccaaaaatgtgggtcatcaggtggctataagggtgaagtagtatatccattaccttcaagggtgtcntggcantgctatncntcnttcttaaagatcctttgatcagttctaaacaatattgttttcatcnaagtctaaggcatcattgattatgcaatcnacgtattattattatcaataatagacgtatatannttcaggagtatgtgatatgacattcatatanntttgtaaagatcgaatcagtgtanttgnggatgtccatcatcgtaaatatgnnnnnnnnnnnnnnnnnnnnnnnnnnnnnnnnnnnnnnnnnnnnnnnnnnnnnnnnnnnnnnnnnnnnnnnnnnnnnnnnnnnnnnnnnnnnnnnnnnnnnnnnnnnnnnnnnnnnnnnnnnnnnnnnnnnnnnnnnnnnnnnnnnnnnnnnnnnnnnnnnnnnnnnnnnnnnnnnnnnnnnnnnnnnnnnnnnnnnnnnnnnnnnnnnnnnnnnnnnnnnnnnnnnnnnnnnnnnnnnnnnnnnnnnnnnnnnnnnnnnnnnnnnnnnnnnnnnnnnnnnnnnnnnnnnttaatgtatcctatgaaagaaagttctattaaattatgacatgccatggattgtataatacatgccaatttcaaggattttaaaaggtaaaaaaaagtttgtcttagaatcaatgaatataataattattttgttagcataaaagtaatgtatatttgttaaaaaccggaaaaatactgagtattagctgaaatatggttgcaggtaacagaaaagcttgattatgtaagaaaaatgtgtgtaactgaaaatccagaggaagaacagagggtagagttgatttaattcaggaactaatggctatcacaacagcagtttctttccatctccctgctatgtctcccattgtgtcagccttcttgagacaagcttctttcgtggtatctgttccaggtttcccatctgcacaccctacactacaatggagacagaaattctatcctagcaatttaa

SEQ ID NO: 359003 - DNA, 2046 bp, Homo Sapiens
  misc_feature (170)..(170): n is a, c, g, or t
  misc_feature (1141)..(1154): n is a, c, g, or t
ggggatctacccgctgttgcggatagagacgtaccgcggggtacgattatttctcttccataaatatgcgcgctttccatagcggcgtttaggcacaccggttcttcgttatatacggtagcgcaccacccaggcacgggatcttgatagacatcacgccgggcatttantctaattgtcttctggagtgtcgagagacggcagggtgatccgcttgtgtggtgagccacgcccagattgatcccaccaagtcgggctaaacattttatagtggcggcccagggggcgacccaacaggggaatgatgattctcacgcgcggggtgtttttttgagggggtgcgaggaggtgcggccctgcaccaaaatgggaataaaccagggtctgggcctagaaaggggttcacagcgaataccccacaccactcccttgtttcttttttgtggcttccggccggcgcaataaggcatatacattgggaagaatcctattggcgcggtcgcccatggatcccagttataccccacgcacacagcagcgttcgggtgggttccatttgattgttgcgaaagcccagtgagtgctgtcttttcgaaggttcccgcaaatccccatgccttctaagatctttgtgaaacaccacaactttctcctcaccagttctgtgggtcagtattgaaactttattacaaaattataaagcagagctctgtaacaaaataatacacatttgggtttgctttaacctccaagtaagtctgagaaaatcttaataaaagccacttgaagtaacaattcacatccaagagatttccacaaatttatacaatgtatattgagcactagttcctgtacagcttattcttattagtttggatccaactattccaatgtattatgaaccagtcagctatctgtcttttgaaacaagtcttaactgaaatctcagagtaatcagcaaaagctacggaataattctaagaattagatgtttccatatcattaaaaccaaggatccatgaggggcagaagggaggattcaaagatttaaaaaaaatcaaattttagaccttggttaaatattaactggaatgggatcttggaactcccaactttaatttggtgtaataaaaatgatgcnnnnnnnnnnnnnntcagggttgtttgacaccttttttcctaaagggaaaccttcaccaaaaggggataaaagatttaaaggcaaaatgagtaaacaacctcagttttaattcttactgaggttactaaccagctatcagtatattattttcgatttgtgtctaggagggaaactgaagaggaggtaaaggcttcagcagagaaagcaggttgtaagtagagagccagctttctgcccttaagttactgctagatcttagctgaattgcacatacatagacctgttttacagaggaactgagtagctgaatgaatgatcctttgctaattggtaggcattgtaaactatagtatttactgcccatgacaaaagtggaaagggatgtcttcatgagcaaatctgattcccccaactcctgcaaaggctgtggttcagaatcaaatcatccaggactttgtataacattgaggtaagtggcccagtgttcagttgactagtttatgcagttatttcattcctccaaaggggtttagtggttggtgatggaagaaagcataaatatgtctgtaccaatgtaataagtccctttagaggtttccctctgccatccagagtcatgattggttctagtctcagatttttcagctgcatgggaggggtaaggggtgggaggtgtctgccaaggcgtttagggtttgcatagttcatccattggtaatgggaaaacactctgctttcctgatcatgtgttttgtgcttggccacgcttctgcagcaaactcttaagtcctccagctcctctagggatgtaaagactgtgagggctcaaatacatcacctactcattgcatggtccttcctaaagagcctagaaaatggtttctcctgctgggtgtggtggctca

SEQ ID NO: 359004 - DNA, 805 bp, Homo Sapiens
aattaatagttacaggcttgttggtccagtgggatttgggtagggggagaaagataccttctaaaatggatcaatagaaccaaaataatacagcatgttctataaccacaaggaaatcaaatgatcctgtcatgattccagttagtcataactatgttagcagtgctaaatgcattttagaaatggtgacttctgtggttttcctagcatttgtctctaacaaatggtgaaataattactcatggccctctctgccattgtctttcattttttcacagtgaaattagacccctttacttcaccattctgccactgcaaattaagtataaagaaaatagcaagagtgtccacaccagtagacagtaagcttctctacctgtaagtgatgaaatcatagctaatgcacttgccatggagttttcaagatgattggtgtcagacagttttcactttgtttaaaaagtgttggtggccttttgtggtggtgttacaatcctctgggggcttaggaggatgttgatgcaacttttagaagcttttaatttcaaaaacaactcaaaaatctgaaggacagtcatagctgccactcagccccagttagtcaaaccccagtgacctttgcccctggttgccaagggctttgcaacatcaagcagggaaataaggatctgtctgtttagtggataccgtgtatcctttaatagaccaggtaacagttcgtgttagtttagactattgttttgtactgtactttcttgggtggcagaggaaaaaaccccaccaataaaaaaccgtatacttgttc

SEQ ID NO: 359005 - DNA, 1310 bp, Homo Sapiens
  misc_feature (140)..(140): n is a, c, g, or t
  misc_feature (203)..(218): n is a, c, g, or t
gttgaaaagcaagccggtcttaatctgggtggcacaatctaccaagttgccagggtgcaaccagaaaaatgtaaaaaagagagccagccctagcctccaggcctacgtctttcagaactcagactggctgtccttgctcntcagcctgcaaatggcctattgtggacccttgtgatcatgtgagttaatacttaataaactcnnnnnnnnnnnnnnnntttccattagttctgtccctctagagaatcctgactaatacagattttggtaccaggagtggttctagaggaacagaatattaaggatggagttctttcattggttttggggtttctgaagttggctgcttaatatgattagaccccaaaatgctaaggactctacttctaatagtatggagaacactgatagtccttggtgtgaactgtttagagagttatgcaaaataaatgcatttgacactcctgaatcatcgctcatgagagacaaggagttcagtaactatacacgtaatacaattgaccatacgtagaaaaccaaggaacataatgaagctagttggttgctcctaagttcagtggacaaagtcatgaaagaaaatgatgaactcagggagtctagctccaagcttcagaagcagatactgaacctaaaatctcctaagattgccctaagtgagagtcttatctcctgtagagaaagagctgaaattgtggaaaaacagacacaagctcttatcacgcaaatggcggatgtgcaatggaaaggtgcctgcctcacaagatgtctattgttaaagtgacggcattgattggaaaaagagtgggaccctgaaccttggaatggggacgtgtgggagtaccctgatgaagacggggacatcgagtttgttaactgtgatgaaactttttttgccagaagaaatagcttccccattcccagtagtggcaacaaccccctccctgacccatgctgccatcagcctttttcacatttgtctggaggagataaacccctacacctgcctgaaggaaacagtgatgggcctcccctgaggcatttgccaaggcaagaataaagttggatccttctccgggaaccacttcccaaaacccctgttttgctttctagaccctggactagaactaaagtccccagcaggcccccttaaagggtaaagtttaaaaatggtcacccttgaaagaaggttccactaaacttcaaaaaataaattgccttgagagttttcccattttgtttttaaaccgagatttcttggaaaaaaacgggccttggggaaaagtggatat

SEQ ID NO: 359006 - DNA, 1131 bp, Homo Sapiens
ggcgtgcgagtgggtgatatgtgctgagtgacttggggtctgccccggcattcacttatacttgtttcttactaagaaattgaatgtgctttaagctgaaaattagaaagcagtagggaaggacaggctggatggtttgggttgttggtttaggaataaaatgcccttttgttttggtggtgggtgatgccatctatagaagggttttaggtcattgtgttggtgtctttccgtctttcccacttgagaccctcttgtaaatatggacttgacccacccattgtactcagaagaaacctcaaagattgtactctacaaagtaaataggttggtatcaatgattattggaactagagagccgaggacaagttttttgatgttgccttctttttatagtataaaatattctaattttaagtatttttgttgagatataatttacagacagtaaggtatacagatcatatttttacaattcagtgaatttgggcaattgtatcagcctttgtaactcacactcccatcaaggcccggaccatttcacctctgaaagatccctcgtaccccttcccagtcagttgacccctcttgcccaagcagccactggtgtgacttatttcaccatagatgagggtctcttcgtattgaacttcatataaaggtattcatgctactcttttctaaaaataaacaagaaataaactcgaggggggcccgtacccaattcgcctataggagtctgataaattaattgccgcctttaaacgtgtgatgtaaaacctgcgtacccacttaatcccttgagacatcccctttccaactgtctaatacaatagccctaccatcgcttccacaatttcagctgatgcaatgaaattaacctaatattgtaaatccgttaattttaataatcttttacaatagctattgtaaatctataataaaaataccggaaagtgatgtttcatttaaaaagcctttaaaactgcttatctatgctaatctttttacgagtcctttcttacactctaaaattttctctcagcctaaacatattctctaatacccttaactttggacctctctcgtataacaattaacgctctatttcattaattgcgttcagctccg

SEQ ID NO: 359007 - DNA, 742 bp, Homo Sapiens
  misc_feature (511)..(511): n is a, c, g, or t
  misc_feature (615)..(667): n is a, c, g, or t
atgctgtagctttcaaaaataaatattcacatctttccattcactgtgttaaatctgccttgtttgtggtcataaattgatattggtgtgtaacggatacatcagtaaagttcctagcagtgaatcttgacagttgctcagagaatctgcttgaactgaggtaccctatctacaaggatcaccttttatttaagtgttattttctccagcacacgataaatatcataaatctctaggtgtcctaaggtgaaagatttagaaggaaaatatgctttctaggttttcctaactttgctatccaaaggaacttggagcgtccctacttgttctctaccatggcagtaaattattatgaataaattacattttttgatgtgtttctcctgctcctccacgtttttggggatgttgaattaggggcaagaagtgtagctgtggcttagatcagcatccttctgtcttttctcagtggtttcattgtgtgctttcttcttaaatcagagcctctcangaagggcagcctaacatctactggttcattagattgcagttaattctctcttttttaattaattggttaatcaattaattatttttgagatggagtctcactcnnnnnnnnnnnnnnnnnnnnnnnnnnnnnnnnnnnnnnnnnnnnnnnnnnnnnctgggttcaagcaatcttctgctcaccctctgagtactggatacagtaccttcacacacctgctaaatttatatt

SEQ ID NO: 359008 - DNA, 1488 bp, Homo Sapiens
  misc_feature (95)..(95): n is a, c, g, or t
  misc_feature (242)..(245): n is a, c, g, or t
  misc_feature (1071)..(1174): n is a, c, g, or t
  misc_feature (1176)..(1187): n is a, c, g, or t
  misc_feature (1189)..(1235): n is a, c, g, or t
  misc_feature (1241)..(1244): n is a, c, g, or t
  misc_feature (1250)..(1250): n is a, c, g, or t
  misc_feature (1259)..(1259): n is a, c, g, or t
  misc_feature (1273)..(1391): n is a, c, g, or t
gtaaggaactgtagcttctctctgaaactgccgggaaagggaaaatctttttaaaatagacatcacacaaccaacagggtcccctaggttcaggnggggaggtgaggtcgagtgagaggaactgcttagcatacgcggggatgctcctcccatctcaccccaccgcgctaaggagaaggtcactttctctttaaatgcaaatgaactccctccagcttagctttcacccggtggtgttcccnnnnggagagggcggagggcggagggaacttgcaccgaagcatcactcgagaccccaaacctccaggcctgaggcccagccagcgcccaatggatgacaaaaagaagaaacggagtcccaagccctgcctggcccagccagcccaggccccaggcacactacggagggtccctgtgcctaccagccacagcggctccttggccctaggacttcctcatctgccatcccccaagcagcgggccaagttcaagagagtaggcaaagagaagtgccgcccagtcctggctggaggtggaagcggctctgcaggcacgcccctgcagcactccttcctgaccgaggtgactgatgtctatgagatggaggggggactcctgaacctgctcaatgatttccactctggccggctgcaggccttcgggaaggaatgctcctttgagcagctggagcacgttcgggagatgcaggagaagctagcccggctgcacttcagcctggatgtgtgtggggaggaggaggacgatgaagaggaagaggatggggtcactgaggggctgccagaggagcagaagaagacaatggctgaccgtaacctggaccagctgcttagcaatctggaagacctcagtaattctatccagaagctgcacctggccgagaacgccgagcctgaggagcagtccgctgcgtaggcgtcccacgcaggcccacactgcccctctcattctcttcaaactgtgactttttacagactcgggcgggtgttctgcggccccccaggtgctatgggggaggggggcgttgaatggaattaaaccagaaagaaagcnnnnnnnnnnnnnnnnnnnnnnnnnnnnnnnnnnnnnnnnnnnnnnnnnnnnnnnnnnnnnnnnnnnnnnnnnnnnnnnnnnnnnnnnnnnnnnnnnnnnnnnnannnnnnnnnnnnannnnnnnnnnnnnnnnnnnnnnnnnnnnnnnnnnnnnnnnnnnnnnncacccnnnnaaaaanaaaccaccnaaaaaacccataannnnnnnnnnnnnnnnnnnnnnnnnnnnnnnnnnnnnnnnnnnnnnnnnnnnnnnnnnnnnnnnnnnnnnnnnnnnnnnnnnnnnnnnnnnnnnnnnnnnnnnnnnnnnnnnnnnnnnnacaacaaaaacatacccccaaattctaccataacacttttcacacccatccccaaacatgtggcaccgcgggcattcttggttctctaacacgcgga

SEQ ID NO: 359009 - DNA, 508 bp, Homo Sapiens
gcttgtccgatgtcctcctatcctttcagcattgaacaattatttttactaatttacactaccacctcacctggtcctcagtcagaaacagcgcgagtgcgcgccaacacaccccagtgtgtctgacctgcacgatctggatgaagagagagggggtgagagagggcaggcggggactgcaacctcagtccacagacggcccgagaccctcgtccccggccctttgcacaggtgagggaactaaacctgtgcaagatgggagaccggggtgggaggaaggactggtccaaagcgccacgatccttgacgggcacagccagaagctgcacctggccgagaacgccgagcctgaggagcagtccgctgcgtaggcgtcccacgcaggcccacactgcccctctcattctcttcaaactgtgactttttacagactcgggcgggtgttctgcggccccccaggtgctatgggggaggggggcgttgaatggaattaaaccagaaagaaagc

SEQ ID NO: 359010 - DNA, 529 bp, Homo Sapiens
actttaaatgtggtgtagtctcatggtaaactgaatttgtcatcagatgcaaagttctattccctaatggaatggaaggaacacaaaacttaagagtgaaatggaatactaagatgtttttaaataggcaggactatgctactcacttgaggctggagtgccaccactgcaaaatctttttaagttttgtaaaaaggagcatcttgaatccacttagataaagagagactgtgtgtgtaggtggatttttcccaaaggatttgggaattgtaatgttacaatgaactgtatggatatgtttgtcatgtacattttcaaacaaaaaggaaaactgaaagtagtgatctttgtatacccatctcttagattcagtgattttgctatataggttgtgtatcccttatctgaaatacttgggactagtagaagcatcttggatttgggatgtttttccaaattttggaatacctgcatacacacaataagatatcttggagatgggacccaagtttaaacacaaatctcgtgc

SEQ ID NO: 359011 - DNA, 710 bp, Homo Sapiens
  misc_feature (88)..(213): n is a, c, g, or t
tgcaacctctgcctcccaggttcaggtgatacttgtgcttcgacctcctgagtggctgggactacaggcgcttgtcaccatgctcagnnnnnnnnnnnnnnnnnnnnnnnnnnnnnnnnnnnnnnnnnnnnnnnnnnnnnnnnnnnnnnnnnnnnnnnnnnnnnnnnnnnnnnnnnnnnnnnnnnnnnnnnnnnnnnnnnnnnnnnnnnnnnnttccaatagattttagttataagacaactaagcttttattaaaattttattattcttctaaacaccatcttgcagcaactgaatgagataggtactgatattatccttgttctatggacaaaaaagctaaggtttaaagatattaagtagtttgtctaagtttacattatcagtgagcaattgagccagattttgaatatggccagtcttacactagcatctagagtcttaaccactatgttgtttaacagcattacctaatgcattatttcctttacagaaaggcaaacttttacatggataggacacacaattgtacatttcagatagctcatatatgctaaaagcttactgaacaagtatttctgtattggtatctttgactttctatatcattgttcttactgtgaatcccacgttactgagcacaaagttgacagtaatacatattaatagctcacctctttttaattaaaattcatcttttcttcatcgta

SEQ ID NO: 359012 - DNA, 680 bp, Homo Sapiens
  misc_feature (286)..(286): n is a, c, g, or t
ttatacattgtaagacacactgtagtaattgctgagtatcatgaagtctatataatggtgcaagacacggtaaggttaaccaaaaaacgtacaaataagggattaatttactggggtcttaataaaattgctgaaattatatccaattagccctcaaaaatgttttaggattatgtaattcccattttatctaccataattctctaagagttttataaaatggttgctacaacttgtattgtgatcacactgagacaccaataaatctctgccaagagatcagtanagtctgatatttgataaaattaatccagtaggttttaataacatagttatttcacttggaggaagcacccaccaaaaagaatgattccagcaattgtagtcagataggtgaagcaaatgggggaagtaagcaatgttaatacaaagtattaactgtggcagctcacataatgcaccagctttcatcaaagcaggctgttgcataatttatctatgtcctattacattgagatttttattccaacaaatatttaatatactttatttactataagtgactgaaatgcaaattcatctgaactataaagtaactaccacaaaataaaagagcctgtaaacatatcccacattattgtggtataaacaatttttatgaattcaaaattactttggca

SEQ ID NO: 359013 - DNA, 1763 bp, Homo Sapiens
tgcggaatgaagcctgtaagagaataaagcgtgaagttgatgatttgggccctgaagttggtgacattaaaatcattccattgtattctacacttccacctcagcagcagcaacgcatttttgagcctccacctcccaaaaaacagaatggaagcaattggaagaaaggtagttgtgtcaactaacatagcagagacgtctttgacaatagatggtgtggtgtttgtgattgatcctggatttgcgaaacagaaggtctacaatcctcgaatcagagttgagtcccttttggtgacagctattagtaaagcttcagctcagcaaagggctggtcgagctggacgtaccagacctggaaaatgcttcagactttacacagagaaagcttataaaacagaaatgcaggataacacctatcctgagattttgcgttctaatttaggatcagttgtgttacaattgaagaaacttggtattgatgacttggtacattttgattttatggatccaccagctcctgaaactctgatgagagccctggaacttttgaattacctggctgctttaaatgatgatggagatctgactgaattgggatccatgatggcagagtttcctctagatccacagctcgcaaaaatggttattgcaagttgtgactacaactgttctaatgaggtcctatctattactgctatgttgtcagtcccacagtgttttgttcgccccacggaggccaagaaagccgcagatgaggccaagatgagatttgcccacatagatggagatcatctgacactgctgaacgtctaccatgcttttaaacaaaatcatgaatcggttcagtggtgttatgacaacttcattaactacaggtccctgatgtccgcagacaatgtacgccagcagctatctcgaattatggacagatttaatttgcctcgtcgaagtactgactttacaagcagggactattatattaatataagaaaagctttggttactgggtattttatgcaggtggcacatttagaacgaacagggcattacttaactgtgaaagataaccagggtggttcagttgcatccctctactgttcttgaccacaaacctgaatgggtgctttataatgagtttgttctaacaacaaagaattacatccggacatgtacagatatcaagccagaatggttggtgaaaattgcccctcaatattatgacatgagcaatttcccacagtgtgaagcaaagagacagttggaccgcatcattgccaaacttcaatccaaggaatattcacagtactgaattcagtgcttagaactgaagttattgagaggacagctttaaaagatgaatgaactcaaaagttcgagttgtgctcttcacgttggttcgataatggcctttatttgaaagctttttaatttttctttacagtaaatattccattctgatttcataaattaaacatttatgcctcccttttgtgttgacactgtagctcatactggaaaagtcgatcaatgttttgcagtttattgaaagtagttctatatataacaatgttataagcatttctttagaaatggttgaaaatgcttctaaaatgtgattatcgaccatggtatgcatgatcgttgtaattgttgacattccttttagaagttgtgaaatgttacaacttgtgcttatgtagacacaatcttctgtctcagtacagaggcactgacttcaataaagtctatttatactaattttg

SEQ ID NO: 359014 - DNA, 380 bp, Homo Sapiens
gcgcgccgtgtgccacataggcgtgaatgtctgtgaccctccctctccctcgtcacatttccccccagaatgaatgctgtccctgtctgcctcatgtttgtgttgaagctgccaaagtcggggagctctggtcctgcccagacccctttggaattgctggcccatcctcccactggagagctggggtgcagctcaccttggggaaggaaacctcatgcctcagagtaatttcttgtgaatgcaaagcctgggggagcgggtctttggggggcaaggagccagtcaggggcttgtttcccctcatagagctccccagacgtgcctccgcaatgcctgaaacccagacctaggctaataaacggttcaatttctgttaaaaa

SEQ ID NO: 359015 - DNA, 792 bp, Homo Sapiens
aaaatgattaatgatttaagtcctacttattgtttaaagcatattttacatatttgattcttgtgactgatgtgatttctcattaaatattgtgctgagtatttctagttacccaatatatgtaattgtgtatgtcttagtcacttagtcaaaaacgatttattttatgtggaccacccaagtaagttttgtttgactaggatataagcttggaaagttaagttgtaaatttaaacgatggattaagtgcaatgtattgtaaaacgcttcattcaataattgtaccctagggtttttaggcatctccaacccaaatgactgtatttcctttttcaacttcagtgatctcacagtttaatttattgagtcgtccatctaggatgaagagagagtccttggaaggtgtcatcaggtattgaccaaacaagccactgtcctggatttgcctgtttttccggttccaaggccattcttctgccttgagtggttccttgagactctttatcatcttgaccttcccagaagagagctccacaaagagcacatcagtttgtgtgcttgaactaccgtagatgttatattggtgggcttcagtaaaggatggttgaaatgccagatcagatatgtgcagatttgtgtaaatatcaaaagcctcctgtatttctcctctgatggtaatgtactgaacccttacaagacctttcacatcattaatgctgacaaggtagtggccatctggagagacatatggagtgcccgtcacatcactattgaacccaatgactgagtcag

SEQ ID NO: 359016 - DNA, 796 bp, Homo Sapiens
  misc_feature (271)..(271): n is a, c, g, or t
  misc_feature (528)..(536): n is a, c, g, or t
tcaatctcaaaatactgttatgcattggacaatctatgtgtgcaaagtttaagtttaggacacaaaaatagtgttggatatttagaatcagtagagtagctattatgtcttaggcaaagatgatgtgatatagaaacctatggttattaggtgcagagcaagcttgtcaattcccatgacatcggggcaatacgctggttcctggctggaatcctgttctcatccggcacattaaaacctcaaagtacatgggcctagggaaaatacctanagttctcccaggtaaacacactcagttgtcactatactgcttaggtatgtaaagaacacggcatgtaacattaatacaggtactatcatggtctttgatcacagtttgctcaacttgcagtatcattatacatttgactaaaactgaaaatttagtttcaaaagtgaacagatattatatatctaaatattttaccaagataaattgaaacagacaggtgaaatattaaagacaatattaaagacaaagaaaacagnnnnnnnnnttttactgagtttggccatgctgtagcaaagttaatgaaaatgagaaatggagtgcctttttaggagggaccaagggagagattcgttaggtgtagggttctatctgtatgtggagagcaactgctgcttatggaaattattagacaatcaagtgtgataaataaaagacaaagttagttttcatcctactgaaccctagttcaaagtggaaataggtctcagttataaattattaacactgaaacagaaacagcatatt

SEQ ID NO: 359017 - DNA, 611 bp, Homo Sapiens
  misc_feature (86)..(86): n is a, c, g, or t
aattgaatttaaggtctcacaatagagtgtttcataggaaagataaaaatgtctacagagtggcattctgcaattataatagattntgcatcttttgcacctaacggatcaagataaagtgtaggccacaacctgaacttgatctatagaatcaataacgatgatgatgctgccttgatgacgagcagagagtttttccagccaacgtggaaattcttccagaagcttagcaggatccagtgtcagagcagagactgaccaagagtgctgcatcaactttagagttagtcgtttaataatcaaggaggactctgagctggttgacatgggccttcccacaaaatgggaaagaatcagtgtgttgggggaattcttctgttgtaattgaatccactttgataaaagaagagacttcccagaacctggtcctccagacacgagaagaggtggaatcggggctggtgctgccactagatcattaaggcgttggtaatatttctcaaatcccaactcatgggctgaattagaagcctgctgaaaagtttccatttgctcttgttcatcatgtatgtcccacagaacatcaccaaaatcatcttcttctggaatgg

SEQ ID NO: 359018 - DNA, 1167 bp, Homo Sapiens
  misc_feature (64)..(64): n is a, c, g, or t
gaggccaagtcaagtgtgaattcatagagcaggatttccaccattcattatactcatagggttntgcccttatgtgaaccttctgatgtacactgaaagttgactggtagctgaatgtctctgtacatgggtgataatcagagtatttatctgttgcatgagttctctgatgcactggaagggttgaattacggttgaaactttttccatattcaaagggtttcacccctatatgaactctatgatgttctctaatgtgtgacttttggctgaaggatttccctcctgtgagagttttgtgagtgattctacagaagcaatttccagtatcattaaactcatagtgactcttctctggattcatgttctgaggaataataaaggttgatttatcatatttgttttccccaaatttattgaaattgtaagattttccttttgggtgggtactgttagatgtaacaagggcaagccttttcaagaaaagcttttctactttcattatattcaaaatcttgccccagagtctgaattgtctgatgttgaataacttcctccttatgatggagggttttcacaattttactataagcgaaagatttctcttgagtgttagttctgccatccttaatactgatgagccatttgtcacaaacattacgctcatgagccttttcttctgaatactgacagtgtggggccatcaggctgagcccctggcaagcagaccccgcaatgtcacatttacaaggcatcattcttgcacgaaaaatgtttatgtctcgattatgtggttttcctgaaatttcttgctctgtagtcaataatttattggtgaataaaacttgcaacaaatgtttgccttgattttctgggctcttctctgagatttcatcaggttgggagtcttctggggagttcctgcttagaaatcctttctctttctctaataaccatggatcttctccttgttccaatgtgaagatcagttctggttttgtaaagcagtagcctgaaatgtgttcattttctgtggctcttgggagagtatagagaactgtaaagcctcagccgggtttttccagctccagagctcggggtctcgatgcagacccaccgtccggggatttcgggcacgttgtcgcccgcgttacaaatgcgctttcc

SEQ ID NO: 359019 - DNA, 671 bp, Homo Sapiens
  misc_feature (494)..(502): n is a, c, g, or t
acgcctctccctaggagaagagttgaggaactgtacagaaaagggcggcttcgttagaccgctctcttttctgtacttcctgagtggccagggaatctaatatccccaaattagggcaattggaacaaagtgaaggacatagaggtatattggaagaggcagagctgaggtggtaggaggaggaccctggaaatggactggtttgagattgccccaggtctgggaagctgagggcaaatccagtcccaatggtcctgactttgggcgctgggtattggaaatggatgcaaagtacaatgtgtttttctccagtgctgtccatgcttctcatcttgtgaaatggccaggatcctctcctttgaaacctgctctgtaggagctacccttttcctttgtggttttatggagacctctccttcctaccctcctgcactgtttaagtactgtttaccatttttcattcacttctcttaaacttgtgaatgcttctcacnnnnnnnnngtttgatgcaggcacttattgtaaattttagaaacccctctgtagccactagtaagtaattatgcactaaatatgaaccctttgtttcttgtttattgagtttgtaggtaaaatgtatttttctacattattgcttattgcttagtaaaatttatttcataaaaccaaa

SEQ ID NO: 359020 - DNA, 1467 bp, Homo Sapiens
cctggtctctctaaccgcgccagtgtgcctccgactcggaacggcttccgcggccggggcagcgagggccgggggcggcgggcgggatgagtgcggtgtgcggtggagcggcgcggatgctgcggacgccgggacgccacggctacgccgccgagttctccccgtacctgccgggccgcctggcctgcgccaccgcgcagcactacggcatcgcgggctgtggaaccctactaatattggatccagatgaagctgggctaaggctttttagaagctttgactggaatgatggtttgtttgatgtgacttggagtgagaacaacgaacatgtcctcatcacctgtagtggcgatggctcgctgcagctctgggacactgccaaagctgcagggccactgcaagtctataaagaacacgctcaggaggtgtatagtggtgattggagccaaaccagaggtgaacagctcgtggtgtctggctcatgggatcaaactgtcaaattgtgggatccaactgttggaaagtctctgtgcacctttagaggccatgaaagtattatttatagcacaatctggtctccccacatccctggtggtttgcttcagcctcaggtgatcagactctgagaatatgggatgtgaaggcagcaggagtaagaatcgtgattcctgcacatcaggcagaaatcttgagttgtgactggtgtaaatacaatgagaatttgctggtgaccggggcggttgactgtagtttgacgaggctgggacttaaggaatgtacgacaaaccagtggtttgaacttcttggtcatacctatgctattaggagggtgaaattttcaccatttcatgcttctgtgctggcctcttgctcgtatgattttactgtaagattctggaacttttcaaagcctgactctcttcttgaaacagtggagcatcatacagagtttacttgtggtttagacttcagtcttcagagccccactcaggtggctgactgttcttgggatgaaacaataaagatctatgaccctgcttgtcttactattcctgcttgagatacactactttggtcagaaacagaggatgttggctgaagaactgcctaacagcaaataaattaactatggaaaacatagacattatgcttttatatgctattcagatttcaaatctttccaatttaccctggaatcagttttgagggagctgataaagactttagctgactcgttaagcctgatacataagccatatttaaaattctaagaaataattaatgttatgatatatcttgtagtatctattaaaatgtctctgggtcataaaatggattaaaatatgggagatcagtaggttatacttatatagatagtgatatatttcatttttaatttgtcatttttgatgtaaaatataatcactgctgtgataaataaactatctattgatcatttatcatttt

SEQ ID NO: 359021 - DNA, 441 bp, Homo Sapiens
gtgttctctgtgctgagcggcgggactgagctgttgagttagagccaacatgagtgagcgacaaggtgctggggcaaccaatggaaaagacaagacatctggtgaaaatgatggacagaagaaagttcaagaagaatttgacattgacatggatgcaccagagacagaacgtgcagcggtggccattcagtctcagttcagaaaattccagaagaagaaggctgggtctcagtcctagtgggagaaccccctcctagtccacctgaaaacaccaaattcaaccatcatctgtcaagaaattcaaaccttcaatgcatgtacagaaacctgtgatatttatacccttgtaggaaagtatagacaatggaattgtgagtagcttaatctctatgtttctcttcattttcattcctcctgcaactattttccttgatgttgtaa

SEQ ID NO: 359022 - DNA, 697 bp, Homo Sapiens
  misc_feature (46)..(46): n is a, c, g, or t
  misc_feature (76)..(112): n is a, c, g, or t
gagagaagaaaaaaagggaaggaggctgaaatataactcactatangggaattggagctcaccgcggtggcggcgnnnnnnnnnnnnnnnnnnnnnnnnnnnnnnnnnnnnnatcaggccaaatcggccgagctcgaattcgtcgagagcggagcgacccctgagcagtgttctctgtgctgagcggcgggactgagctgttgagttagagccaacatgagtgagcgacaaggtgctggggcaaccaatggaaaagacaagacatctggtgaaaatgatggacagaagaaagttcaagaagaatttgacattgacatggatgcaccagagacagaacgtgcagcggtggccattcagtctcagttcagaaaattccagaagaagaaggctgggtctcagtcctagtgggagaaccccctcctagtccacctgaaaacaccaaattcaaccatcatctgtcaagaaattaaaagaacaacaccctagagagaagtcatccacacacaatccacacacgcatagcaaacctccaatgcatgtacagaaacctgtgatatttatacccttgtaggaaggtatagacaatggaattgtgagtagcttaatctctatgtttctctccattttcattcctcctgcaactattttccttgatgttgtaataaaatgaagttacgatgagtgaattcaaaaaaaa

SEQ ID NO: 359023 - DNA, 667 bp, Homo Sapiens
ggagcatagccaataaatcctcttgaatctggccacaaaattccatctgctgcaaagaccactgtgtggtttgccttttggaatttttttagaacttcttctggaccaccagcaaatatgacatcaaagcattcagtaaacatgacaaccagatcatcttgatcagcatagtgttccatgacttctttcattaatctcactttctggccccctccaatactattaattccatcaccacctctccattcttctccttgaccaaggaccttcacagtataattgaaatatttggctgactgcataaatcgatggaatccatcactttcttttgttgctacagttatgactaataatttatctgtggggatgctcgagggcttctccgagtccgcacccagacagggattccaggggtggaggacgagcgccaggagcagcagctgaggcttcaccgtgcatccccccatattcggccctcgagggccgcgcgggctcaggcgcccacggccccgcagcgccgcgcttctcgcgagaacgcagagacccgggtccgccctgagccgccgattgcgggcgggagccggcgggcaaggcgcgcggccggcagccggagcggcgcgtaacgcagctgagtgaggtcgtcggtggaggcacggagcagcccgct

SEQ ID NO: 359024 - DNA, 803 bp, Homo Sapiens
  misc_feature (137)..(137): n is a, c, g, or t
  misc_feature (556)..(556): n is a, c, g, or t
  misc_feature (699)..(699): n is a, c, g, or t
  misc_feature (751)..(751): n is a, c, g, or t
  misc_feature (762)..(762): n is a, c, g, or t
agactacaaatcctagtgagtatcgagttggtcttattatcgcgtgaactgggagcctttgtttcctgcgtgtcgcaggaagtgacgtttcgggtacagccgctaccagagtccctttctcgcgaggcggaagaacnccgatcgctgaggagcaagggggcgctaggaaagggaactgggttgcgacggtccggcgagagagagctggggtgctggggtgcggggaagttggggagcagaggccgcttggtgtccgagtagggtaagaccgcaccgacccagtccgttaggaaagaagggaaacgaggcaattgtcgggcggatccccggacggagggctaaggttgtgtggaaggcgctgctccccggatggcgaccgcagatactccggccccggcctccagtggcctctcgccgaaggaagaaggggagcttgaagatggggaaatcagtgacgacgataataacagccagatacggagtcggagcagcagcagcagcagcggcggcgggctgttaccctatccgcggcgaaggcctcctcactcggcccggnggcggtggatctggcggaggcggtggctcttcctcgtcatcgtcctcttctcaacagcagctgaggaatttctcacgctcgcggcacgcgtctgagcggggccacctcaggggaccaagcaactaccgacccaaagaaccgtntccggtctcatccgccttctgtacggatgccttcgaactcactgtccgaaancaatccccggncgtcttctgggaacggagccaactcgccttggaccgttccg

SEQ ID NO: 359025 - DNA, 288 bp, Homo Sapiens
gttccaaattagtatccttttaggtaaattctgtattgcccatatgctgtaattgtagttaaaatattagtgttaataaaataaaaaatttaataatgtcacgttagagtggtaagggcttaggggtagttataggtagtattaggagtagttagaaattacttatttttgtaggcttgtttccaagttatcagcagttgaaagggatgtttctacagtacgtggtaaatggcaataaaacaggataaaggaaagatcaaaacaaggctgtggaccaaacctcgtgcc

SEQ ID NO: 359026 - DNA, 728 bp, Homo Sapiens
  misc_feature (370)..(430): n is a, c, g, or t
  misc_feature (504)..(504): n is a, c, g, or t
  misc_feature (577)..(577): n is a, c, g, or t
  misc_feature (632)..(632): n is a, c, g, or t
  misc_feature (656)..(656): n is a, c, g, or t
aattccttcctcccctgtctcatttctacccagtgagttcatttgtcatataggcactgggttgtttctatatcatcatcgtctataaactagctttaggatagtgccagacaaacatatgatatcatggtgtaaaaaacacacacatacacaaatatttgtaacatattgtgaccaaatgggcctcaaagattcagattgaaacaaacaaaaagcttttgatggaaaatatgtgggtggatagtatatttctatgggtgggtctaatttggtaacggtttgattgtgcctggttttatcacctgttcagatgagaagatttttgtcttttgtagcactgataaccaggagaagccattaaaagccactnnnnnnnnnnnnnnnnnnnnnnnnnnnnnnnnnnnnnnnnnnnnnnnnnnnnnnnnnnnnnacactgtggtacatataagcaactttaataggtgataaatgtacagtagttagatttcacctgcatatacattnttccattttatgctctatgatctgaacaaaagctttttgaattgtataagatttatgtctactgtaaacaatngctaaattttttgctcttgatttaaaagcttctttttgcaaccttgacttctatngtaccaatgtggaatcgctcctcnttcctaaagtgtactaaatcttggctttctttgcacattgtctttggtgcaagtcttaagctgaggcaaata

SEQ ID NO: 359027 - DNA, 1156 bp, Homo Sapiens
  misc_feature (1031)..(1040): n is a, c, g, or t
gtgccagacaaacatatgatatcatggtgtaaaaaacacacacatacacaaatatttgtaacatattgtgaccaaatgggcctcaaagattcagattgaaacaaacaaaaagcttttgatggaaaatatgtgggtggatagtatatttctatgggtgggtctaatttggtaacggtttgattgtgcctggttttatcacctgttcagatgagaagatttttgtcttttgtagcactgataaccaggagaagcccattaaaagccactggttattttatttttcatcaggcaattttcgaggtttttatttgttcggtattgtttttttacactgtggtacatataagcaactttaataggtgataaatgtacagtagttagatttcacctgcatatacatttttccattttatgctctatgatctgaacaaaagctttttgaattgtataagatttatgtctactgtaaacattgcttaatttttttgctcttgatttaaaaaaaagttttgttgaaagcgctattgaatattgcaatctatatagtgtattggatggcttcttttgtcaccctgatctcctatgttaccaatgtgtatcgtctccttctccctaaagtgtacttaatctttgctttctttgcacaatgtctttggttgcaagtcataagcctgaggcaaataaaattccagtaatttcgaagaatgtggtgttggtgctttcctaataaagaaataatttagcttgacccccgagcggcgaggcggcgcggacgagcccggcgaacacgctccgcgcgcccctaaaatgagaccctgcgaggcccgataacacccccccttcttccaagtcccggctgaacgcacgaaagagcggcgtgggggcccgccctccccccctagaaaaacttttcaaaaacccttttttttgggcgcggggcgccccgtgagggagcggaccggggggtaaaacgttctttccccacagaaaaacccggggctaagaaaaaaggcgttgggaactcccccacnnnnnnnnnnccccccgggggccacccaccgcgccttttcaaccacaactccgaggggggggcgtcccagggtcccaccagggcgatattatacaccgggcgggcccccacgcgagcccctcaaag

SEQ ID NO: 359028 - DNA, 505 bp, Homo Sapiens
  misc_feature (377)..(377): n is a, c, g, or t
gaaaagacaaatttgctcctcttttagctcagccaagagatgctgttttatctagaagcttcccctggtgtctccattcttcctgggtgatttctccctctctgctttcagcagccacctgtagctgatgacttcctcctgtcccacttctttccagcctcactgccactattttaggtaacccagagttattgcaggtcccatcgccaatccacacagctgcctgaggaattgatctgaaacatcatgtccctcgtatggcatccgaggccctcataatctggcctgattaactccgatctcacctcatgtgccatccttcccccaaatgtgccttcctcttcagctgcccctctgcggggcttcctatgcctggngcaactgtgcttaccaccccagatagctggataaacagggccaagggttctgtgccccatgttgaagctgggatctccattcctgggtattcctatggcatttaccaatggctactggcacttcctgg

SEQ ID NO: 359029 - DNA, 1189 bp, Homo Sapiens
  misc_feature (594)..(606): n is a, c, g, or t
agcggaggcatggggcggagccgttgccgtcggaggatgagaactgcacgctggtcgaagtgactgaagaggaggtccagaactcagtcaaacacattcccagccttggcaaccgtgatcctggtgaagaccatgatacgtaaacgctcctttgggaacccattcgagggcagccggcggcaggaacgctcactgtcagcgcctggaaacttgctcaccaaaaaaccaaccagggaatgtgagtccctgtctgagctcaaggaagcaaggcagcgaagacaacctccagggcaccgacccgccccccgtgggggaggaggaagtgctcttgtgagaggcagtccctgcgtggaaagttgctgggcccccgcccccggctcccccgcacgcatgcatccactgcggccggaggaggccatggagcccgagtagctgcctggatcgctcgacctcgcatgcgcgccgcgtcgcctctggggggctgctgcaccgcgtttccatagcagcatgtcctacggaaacccagcacgtgtgtagagcctcgatcgtcatctctggttatttgttttttcctttgttgttttaaaggggacnnnnnnnnnnnnngggatttgacttccattgacggtcgaccggtggccgttggttggttggacagagcgtggtgttgaggagtttgcagacccaaacccaggtgcattttggggacaataggctatcttcaaaaacgtttttatgccaaaaatccttcatggtgcatttccagaaaccagcgtcagaatatacccaagtgactgatgtgatggggtcttgtgaccaccttgttggaaaagtgcgaggtcaagagaatctctcggccgtgcctgaggcccatggagcaggctgagatcggcggggcaactctcgacagacggacacgataagggggggccaaaacaatgtcgcagcccccaatggagacaagaaacgcgcgcgaaaacacccttcagtcggcacccttccgacgcagaagccccggtggcaacacacccagtgggcacgtccacgagcaggcgagccgggcagcggcgcccccaacggagcaagccctcgaggcaggggacaccgcctcagaggacccgcacaccgctacaccacatggtagaaaaaagagaggtgtcaacgagcgagcgcaaaggcgggataagaa

SEQ ID NO: 359030 - DNA, 734 bp, Homo Sapiens
  misc_feature (711)..(711): n is a, c, g, or t
  misc_feature (717)..(717): n is a, c, g, or t
atccaccggtgacatcaaaccttccaacctcctggtcggagaagatgggcacatcaagatcgctgactttggtgtgagcaatgaattcaagggcagtgacgcgctcctctccaacaccgtgggcacgcccgccttcatggcacccgagtcgctctctgagacccgcaagatcttctctgggaaggccttggatgtttgggccatgggtgtgacactatactgctttgtctttggccagtgcccattcatggacgagcggatcatgtgtttacacagtaagatcaagagtcaggccctgggaatttccagaccagcccgacatagctgaggacttgaaggacctgatcacccgtatgctggacaagaaccccgagtcgaggatcgtggttgccggaaatcaagctgcacccctgggtcacgaggcatggggcggacgtttgccgtcggaggatgagaactgcacgctggtcgaagtgactgaagaggaggtcgagaactcagtcaaacacattcccagcttggcaaccgtgatcctgggtgaagaccatgatacgtaaacgctcctttgggaacccattcgagggcagccggcgggaggaacgctcactgtcagcgcctgggaaacttgcttcaccaaaaaaccaaccaggggaatgtgagtccctgttttgagcttcaaggtaacgcccgcctgcctgttgccgtagcctnttgctnggggccttgaggggggc

SEQ ID NO: 359031 - DNA, 732 bp, Homo Sapiens
ggggagagagggagtggagaacgcataagcaagctggtttgaccagaaacagaactgcctgtgacagattaagagacaagcaaggcttggaatctgagagcaagcaaagagagtggaaatttacagctgccctatcattccatattggaagaagagatttctacacatgaaaaaaatgcctttgtttagtaaatcacacaaaaatccagcagaaattgtgaaaatcctgaaagacaatttggccattttggaaaagcaagacaaaaagacagacaaggcttcagaagaagtgtctaaatcactgcaagcaatgaaagaaattctgtgtggtacaaacgagaaagaacccccgacagaagcagtggctcagctagcacaagaactctacagcagtggcctgctggtgacactgatagctgacctgcagctgatagactttgagggaaaaaaagatgtgacccagatatttaacaacatcttgagaagacagataggcactcggagtcctactgtggagtatattagtgctcatcctcatatcctgtctatgctcctcaaaggatatgaagccccacagattgccttacgtcgtgggattatgctgagagaatgtattcgacatgaaccacttgccaaaatcatcctcttttctaatcaattcagagatttctttaagtacgtggagttgtcaacattttgatattgcttcagatgccctttgctacttttcaa

SEQ ID NO: 359032 - DNA, 1230 bp, Homo Sapiens
gcatcaggaaagctctgcagtggggggctggtggctccggggctgggggatcacaggctggtgaaccccggtgggaacagaggtgaaagcctgccacattccgcctgtctccctaaccctccattgcctcgcctctattccagaatcaatgctgcagaatgtgttagctgcagataggcatggtctcaggtatgaacagacactttgaaacgactttaggtctttcttttctccagtgttttaaacatgttgattatccaaagaattgaaactcctagcacatccagtttttacaacagatttgcagctcattccttaccctggttaggtcactacttttgcagattttgctggcactgatctggagatctgcagatctggaggagacgggaaggagtcgattcttaaataaggatcagtgaggcatcctgtcccaagctactgtttggtggggatctgggttcatctcacccacagagggaggatctttaagaggagaaaaaagccaagagggaaagccagagttccctgttctaggggactagccaaatgcctacatcagctgtcccctccctgttgtctccaagtaagtttgccagaaaaggttttagcaaagtgctacaactgtgtctttataggaggataggcctctgccctgccccacccccaccacctgtccccacccagtgtcccaggccacaggagcttattggccaggagggaataatgtcccccaatactgcctgttgagggaccagagttggggtctttggtgcttccaacctcctgccaacctggagttcacaacaccagagccccacggcctcgcacactgaagcaggggcgtgcggtgactcggtgcttctgttttggaagaaccacctgtcatcaaaacatggacagcagggtgttctcagctcccagcgaagcctccacaacagaatggggccacagggcagccgggactccctgtctcacctacattaacccatgcatactgtatgccataaactcactttggtatatccgcgtcacatgcagagaggaactctgcgacgtcaaagtgttgcttcttaaagtttcattattggcaactagagggttgtttttaatgcatggaaactaaacagattcctcggggagttcctgaaggaaccaggtgggcaaacctttgcttatatacatgcggcctcacctggaagagaaataaaccacttgtactaaaaaaaa

SEQ ID NO: 359033 - DNA, 1346 bp, Homo Sapiens
acagcgcagagcagccggcgagcggcagcagctccgggctcgagagcccgcgcccatgccagtgcccatgcggggccgccgccagtgacgccggagaggtgttccccccacactggggctcccactactgcgaggagtgacccacgaaggccacagagatggccggggcttcggtgaaggtggcggtgcgggtccgccccttcaattcccgggaaatgagccgtgactccaagtgcatcattcagatgtctggaagcaccaccaccattgttaaccccaaacagcccaaggagacgcccaaaagcttcagctttgactactcctactggtcgcacacctcacctgaggacatcaactacgcgtcgcagaagcaggtgtaccgggacatcggcgaggagatgctgcagcatgcctttgagggatacaacgtgtgcatcttcgcctatgggcagacgggtgccggcaagtcctacaccatgatgggcaagcaggagaaggaccagcagggcatcatcccacagctctgcgaggacctcttctctcggatcaacgacacgaccaacgacaacatgtcctactccgtggaggtcagctacatggagatttactgtgagcgcgtccgtgacctcctgaaccccaagaacaagggcaaccttcgcgtgagggagcacccactgctggggccctacgtggaggacctctccaagctggctgtcacctcctacaatgacatccaggacctcatggactcagggaacaaggccaggaccgtggcggccaccaacatgaatgagaccagcagtcgctcccacgccgtcttcaacatcatcttcacccagaagcgccatgacgcagagaccaatatcaccacggagaaggtgagcaaaatcagcctggtggacctggctgggagcgagcgggctgactccacgggagccaagggcacgcgcctcaaggagggggccaacatcaacaagtcgctgaccaccctgggcaaggtcatctccgccctggctgaaatggactccggacccaacaagaacaagaaaaagaagaagacagatttcattccgtaccgagattccgtgttgacctggctcctccgggaaaacctgggcggtaactcaaggacagctatggtggcagccttgagtcctgcagacatcaactacgatgagacccttagcacgctgaggtatgctgaccgggccaagcagatccgctgcaatgctgtcatcaatgaggaccccaacaacaagctgatccgcgagctgaaggatgaggtgacccggctgcgggaccttctgtacgcccagggtcttggcgacatcactgacatgaccaat

SEQ ID NO: 359034 - DNA, 439 bp, Homo Sapiens
  misc_feature (25)..(25): n is a, c, g, or t
atgcattgagctagggcctccaggnctgtgggaaggggtttcgaaggggcttgtggccctcttcctggctctatcactcagggaagattctcagagccttgtagggcaggtgcactactcaggctcagatgttggccttgacccctacagatgaccctttctgacgccacacgacctcctatctagcccctctgtgtggctccacttcagtcctactgatgtccaccctgctgctctccttttgaccttttttgggggcccagctaaagctggtctgcactctctgaggaggctcaggatgtccaagtgataagatgggacaaggagcccttctgtcagttctggtcctgggcgtacagaacatcccagatcagagaccagagcaaggggcaagggccaggataggcctggcctccatctcccccatcctcctgcctcc

SEQ ID NO: 359035 - DNA, 744 bp, Homo Sapiens
aacagattttctatgatgaaagaccactgggggccaggggaagagtcctggttctcctctctttaaatattctggatatctcaaagtacagtagagtgaaactgctcctacgttaagtcgagtttattttcgcttggttgatccacgcccaccactttgccctcagtttgggggctgatctcattcttaacatcttcctgtattctgacccagtttaaagaattgtatatctgttttctatttttgtaacagttgaaataactcataatttaaacacttggtgagttttgctcttttctgtcttgagtatgttatgaaacacggccatgtttttctatgtaattattgtttacttttccttattgtgatgatacattatagcgttccagctgacaatgtattcttgtgtataatcgcccatttcgcgccatatttcgacagtagaatacggaagacaaccctattcttaaggtacccttagcaatcttcactcatttttgaagtcctcaatctcgttttactaatgaatagtgacccagagttacatggtaatcaatggctacattagttactatccattaattactattttgatttcttggcattttagtaagcaatgtttggatcaaaacagtttttaagtttcaatctaagtctgctccagggagataatgggctgttcttttgggtgagagctgctgctttgacaattgtatttcttataaataaatttaataaattagt

SEQ ID NO: 359036 - DNA, 877 bp, Homo Sapiens
gaacaggaatacgaaacacaacatctgtaaatgactaaattcagagggaatttagtggggcatatctcttaaatggttttgaataatttggtgttttaaccaatgacttaatttaacttagtgggtatactgttcccagtcccattactgatttttattcctctgtgataacatacacccaaataaagactgctatgtatttgactttaaaactataaagatgtaaaaaaggttcactaagccaaacaccttagaaaatagcctcagctatttgctatgtttatattatacctgcataaaagtatttatgtatagatgtacttaccttacacagtaagtacctaaaatttgtaaattgaatacttttgaatgtaagcagttgaagtaaaacctgtagtgagttcttcagtcagtcaacactaaacctgttttgtaaatttgatgctagtattacactggactttctcaaaatgaagtacacctatatatgcatatagtatatgagcatgcgtatttgtacaaaagcccttcaaaaggagttcagcttttataaacaccaaaacactctctgcctgtaaaatgtttttgctgaaatttgtatcattaactctcaaatttacatcttcatgtttgagatacgcttttaggactgtctatgcatgtagactttggtcaactctctcctcctccctcaataaatcagttaacttaaaaaatatattgtgaccatttttataaaatacatgttcataaaacagatcaacatatttagcttatacagaaataaaattaagtcaatccactcacaaagaatttctattttgtaaaaatgtagcttgtatttcagtataataaaatctgatgtaagaaaaaggga

SEQ ID NO: 359037 - DNA, 569 bp, Homo Sapiens
  misc_feature (483)..(483): n is a, c, g, or t
  misc_feature (541)..(541): n is a, c, g, or t
cccatcctgccttctaaaaccatctcgtcatattctcaaatctttctgaccctgtatgctatattttctgatatccttttaaattttcttaccttttcctgttatttcctttttatgcaattcttctttatagaattgtagagtttagcagttttctcattttgcttttgttgcacctgatttttaaattttcctttcctttaagattgatttatttccagcaatcggattccatggtgccctcaaagccctcatctctatggctaacataggagatgaaagctcagttcccacaataaccaaacaccagccactagaagaatcaatgaagagagggagagaaagaaaagcagagtgttagacttcagaataagaagtgagaatggtcacatgggaagcctgcttcatatccaaatcctaaaaacaccttcccaattccactttgacaaattattgccattttcttaatactgataaatggtnaattaattaaatctaaccaagaaggtccaaggcaaaagacagttttatttccacgttncattcagattatagcaccctagcttcct

SEQ ID NO: 359038 - DNA, 647 bp, Homo Sapiens
  misc_feature (256)..(286): n is a, c, g, or t
cagtgaacctccatacccagcccaaatatgcattcttggaattatctgcaattgcccaagaatgtacaagcaactcctgagaataaaccaaaaaagataagaaactccatgagaaaatgggcaatgcacaggaagggaaaccagaaaggctaagtgaaaaaattccccaaattaatgctgatcagatgaatgtatgttaaagcactgcaccactatctacccatgagactggcaaaaattaggtagtctggcaatnnnnnnnnnnnnnnnnnnnnnnnnnnnnnnncggcctcaagtaggagggtcagtcaccgttctaaagaaaatctggaaaaccaaagagaaactgacctctgtgacctataggcccatcctgggtacacatgccacacaagcacagaagggaacacacgaaaggatgtttatcgtggcctgtatccggtgccaaggggtcaggggcacccaggtgtcccccactttaggcaatgtgtgtaaactgcaattgacattgtggagtgccacatggcaggtcaaagcaatactgcatttctagaagagtcaatggggctagatcttagcacacacttgagtgaaaacagcataagacctatgcacaatagcactatgtacagtacaagccggtaccg

SEQ ID NO: 359039 - DNA, 268 bp, Homo Sapiens
atttaaaaaaagatatattaacagttttagaagtcagtagaataaaatcttaaagcactcataatatggcatccttcaatttctgtataaaagcagatctttttaaaaagatacttctgtaacttaagaaacctggcatttaaatcatattttgtctttaggtaaaagctttggtttgtgttcgtgttttgtttgtttcacttgtttccctcccagccccaaaccttttgttctctccgtgaaacttacctttccctttttctttctc

SEQ ID NO: 359040 - DNA, 719 bp, Homo Sapiens
  misc_feature (66)..(66): n is a, c, g, or t
gttgggggccctttttcccaattaattgttaactcttgggggtttactagaaattgccgcccaccntaaaagtaggcctctcggccccagggcaccatgacctttgaagcacttggtgctcggtgttggaaagcaaaccagagaagatggtcagtgacgtcttcatgtggagaaaagagaaggggaggatgcatctgaggcacttctggaaagaaagcaggacgggaaaaagagagctccacgtcttgaatataactcagggtactcggtgactcctgcagcattgacctcatacagtgtgaccatcaccgtgagatggatctctgcatgggcctagtgaatcccactcgagtccacagagtgcatgtttctcccaggggccctccaatggtggtccatggagcttatccaagggctcactcatgtccctaaggccttactgacggacaatgccatccagagagctagactgacacacagatgctccacacacgtctgagatagaacaagggtgttgatggatctctgatctagtaaccaccaggtcatagaggctagagacagtttacaccacagttacaagagacagggtactggatgcattgtgcttctgattacccagtcacttcctggttcttacaagcattgcagcgtgccaaaaccgttgtcatcgctcctacgaattgtttaccaaggcggtttcgagctcgaactacttt

SEQ ID NO: 359041 - DNA, 1079 bp, Homo Sapiens
ggcaaaataattctatgacatagggcccaagttcatggtagtaagtgtactctttgattaatcacacgctaatatagattactgcctctaactttgtaagtgtggcaatgacttcttaattaaagaaagatgcaggagttatgtctaagcgttcagtttttcaaatctgtgttattggaaatgtcttcaagtcattttgcattgtatttttgatatgagaggcagcttattgcgatgtgtatggccatgtttcattctcaaatttaattctataaatacaaatcctaaatacatggctacagcaactgcactggaacatttttgcttggttttagggattgagaacttgccttgcaggtttccttcctcaaaaggagcagggcagtcctttccctgttgagtcaattagaatttttacatagaggtgagactgtgaattattttggttattttcagtgatgtagattagtgtgaatgaccagggtggaatgtttttgaaggaatataaagcaaaaactggttgacattcacaaactgttcttttgtgaacatattttggacccttaaatatgactaaaatcacagcaatattgttacatacgggttatatgccaactctgtttgaaatatactctggaaaaacagctgaattgtcttggttattaaagtatggtatgtattcaacttgtacagactggatgtaatttgtaatcaggtatagtccatgttttactttaagcagtacatcacttaataaccattgttaagccattgctttcaagaatgttaactgccaatttaaaagcatgtgtcctaggttcatgctttggtaaagctctcatttcaagtgtattcatagctaagttttctgggagcagaattgtctctttggtgaaaaggaagtacagcctttcctgtttctgaggttgcttaccatacatgtatgtcactggtttcattgggccctggttacatccatttggtaaaatttaatttggtcctgattaaccagctctcattttatgggaaatggatgataaatctcactacttaaatttaatttatgcctttatttttaa

SEQ ID NO: 359042 - DNA, 695 bp, Homo Sapiens
ggaggactctgcagtctgcgccgtttgaaaaccctgagaaagagatgccacctcaacttgaatcatgacagcccatcgctcagtctcaccctaaactcatggagcttgtttcagctcctcacttcttgactgtatttgtactatgttgaaaaaatatcctgtccacaaagacataagcctaacaacctagaaaaacaacagggtactactggcattacagaacttctttgcctttcaaaacaaaagcaaaacacagtgaacttcaccacggagctgcacagcgtggggaactcatccatcactttcaaaattagagtcatttgatccaagttggagtcagacacagtatttgagctgcacggcttctgggttctcccaccttatttgatcatattcaaaagattatttcctgtgtttgctttgatttgttcctcagtacattaaaatgatccacaccttgaacactgccctctctagaaggttgattttgatcagccttttgaagatgggtgtcgtttccctaacttatctcacagaattttgagtgttgtatttggcaagttctgagatttgccttctgtcttatgccaaacacccctttctaagagctgtccccgcttagttttagaagtactaggggttttcatacttattttatagaacacccatttatatttatttccgtatatagaact

SEQ ID NO: 359043 - DNA, 721 bp, Homo Sapiens
agttacacccttcctcaaagagaaagtattggttgcccacatatgatccattcaaatccttccttttaaaatacagttagtgtaatttaaagtaaggccattttaaagtgacatgatgtgcaagccactttgcagccataaggccaggggaagcaagagttgccaatgaaaaatcatgacgtcattgtgcttctaaattgatcctggacttctttaacgttcactgtgtattttgggaaaatcatttccctcttggagactgtatgtagtcacctaagaatacaatggctgtgtatgttttgttttattaagaacataatttcagaggattgagggaatcaaatccctccgttcataatacgttatcactatttacttcacaaagcctctctttcctataattgattgggtctttttagtcctttctctccccatttcccactctcaccctttccatagcaaccattctgatatgtttaatgtgtagcttttcatcatacatttcttacaaaatcttttgtcgttcatgtgtattttcagcttacatattgaggttgtattctagatctcattctggtttttacctccaatcataactgctctatgagatccatttatagaagtatatggttcactaattcttctctcttttaaaaggagcataatgctcaatcgcatgtatccaccatatttgcctttgcctgtactagcaataaagtgc

SEQ ID NO: 359044 - DNA, 492 bp, Homo Sapiens
ctgtgctctccctatctacagcccatctggagtaggttctgctttgtggcagcccgaggggcggtgctcagcctcccatgaagggggtcttccctcacaatcggactgctggctgcctttggcctcgtctgcagggagcagggcgggtgggctggctgggacggcagcaagccctgcttacaggcccagcggaccctcaaaggtgcaaggactttctgagggtgcaggacctgtctgactctcagaggcccaggcaatgagaaaatgacaggcaagatacaaacaataccaaatcatttaatacgtgcaagaaagtccgaagaattctgatataccccacgatatgcttttttggaatagccaaaaatgaagtttaaaaaaacgttttccacatgcctcggcgtcctgcgtagccggtggtcaggcagagctccctctccctggcgggtgcgggggcggctccgccccaggacgctcccgcccctcccagat

SEQ ID NO: 359045 - DNA, 1135 bp, Homo Sapiens
  misc_feature (357)..(376): n is a, c, g, or t
  misc_feature (1007)..(1081): n is a, c, g, or t
ggccgtgctttaggggcaacagtgccaccatgtgaccagaacaaaggttctggagcagaatttgcactaaggtggaggagcggccaagaggtgtgggacggggcccagagccactgacataactcctccaagtgcttctctgaaacaggctgagaggttctgtgactgcaactgggaagtcagacccaagtcgcagctgagagaaatggttgaaagctcactttctcaaggtttagattagtggtgactaacttccaagcaaacttcatagaagagaaaatgaatgccgacattccttacttacctgcaggaagactttttgagccatagtttgcaaactttagtgccagcagctgnnnnnnnnnnnnnnnnnnnncatattgagactatttttctaattaagaatagggggtagccataaagagctgtatgttggagggggaaacatggtgggcgggcagtttgggtttctttggggatccgcgtttctctcacacttcattcgtagcaactcaagccagatgttttcgtctgaaattctctgggcttgtcattccacctgtatcgtgctgcaaaccaggtgttatgctagtaggcatctgccctcacccctctgcctgagttttctgtaggcagatgttaacctgagaaaacaagtgccatgtggacaccaagtaagcatttttgataatgaattagagcaccagtttctactgaatggagcaaaaaccttcagccatggccaaggctgcaatccctttggtcctggagtttcatctacttactgccatcttccacggtctttgcactgtcccgtgtcccttcccccctgggaggcagaagagattgcctcggaggggccttatttttctcccaacttgtgaaatgatgtagtggtctatgtattatggccgagttttccaagctgtcttccaaatggaaagtaaaatctttccctttgaaatcatttgggaccgggggcccaatatgtgacggcttgctatttnnnnnnnnnnnnnnnnnnnnnnnnnnnnnnnnnnnnnnnnnnnnnnnnnnnnnnnnnnnnnnnnnnnnnnnnnnntggattgttgctaagacccctaagctgtgaaccttttttgttcgcgtggttggc

SEQ ID NO: 359046 - DNA, 492 bp, Homo Sapiens
aaacacacacacatgaactcagatttgcaaaccaggtttctgaaactttgggtaaggtgtatgcttttaactttgaaatgtataaacacccagcggaaacgtatacctttcagtgcatagtgcattgtgtgcttaccctgggttgtttaaacttgtgttcaaatattccccctccaagtgaaagcctgtcgggaattccacagtaacacctttactgttctcccattgatgatcatatacgttacctcttcctagcggtacatttgtatgatccttactactggaattaccgggttaaaaggaaatgcttaccactaagatgtcagtattctcctcatggatattttcagtctcaatgttgccagtctaatagtatagtatgtggttgctttactgctgttctccccacccccgtggagttgtgtcattattttaatgaatgtgagctcttgacttactctagaattctaatacagatactttctgcactag

SEQ ID NO: 359047 - DNA, 438 bp, Homo Sapiens
cacacgctttgtgatcccctaatacggttaatgcaaatttctagagtgatccgtctttgtttgagtactgggcaggcagcagggagagtcaggcagcagccgtgagcgggtggctcttccccaccttgccagcaggctctgtgctccttgaagcaagcgctccagaggctccggaagccacggctggattggagacaagatgggatcctcagaggaccaggcctatcgcctccttaatgactacgccaacggcttcatggtgtcccaggttctcttcgccgcctgcaagctgggcgtgtttgaccttctcgccgaggccccagggcccctggacgtggcggcagtggctgcaggtgtgagggccagcgcccatgggacagagctcctgctggacatctgtgtgtccctgaagctgctgaaagtggagacgaggggagg

SEQ ID NO: 359048 - DNA, 697 bp, Homo Sapiens
  misc_feature (324)..(333): n is a, c, g, or t
ctcgtgccgattattttaaaatgaacatatgtatttttattaacttttagttaaatacagattttacaacgaggtcagcataagcctaaatctatatagagggctaactcaggcattgtcttgtttatttgtagactggattaaaaacaacctgtcctgttttgtcagttcccagcttcttcgtttagaataaattagaccaaaagaagaaacgtgcttgtctctgtatacccgcagaatgaagttactgttgttaaaactggattttttcattttactaggttccgaagagtccagatgcttggtagatgttcaatacgtgannnnnnnnnnaattgaatgtgttcatttaaaatcctccttaacatttctagaaagacttctttcaataaataatggaatcttagaggaaaagtggttttttaaaagctagggaactcctccactaaaagtaaccattggaaacctcgaatgagggctaaagttttaatcataagagaaaaggcagcataatgaaatgtgtacacatacatagtcagtggtccattttaggaagccagtggcgtctgataaagaaatgttaagagtagtgaggttgaggaaggaaattgtggggatttgaaatattctctttatgttgtttctcttctgagtcatggtaaaacaataaattatcatctctaggtggcaaaaaaaa

SEQ ID NO: 359049 - DNA, 892 bp, Homo Sapiens
gcaggcggcacgagcctggttcattgtggtcgctgccatccaggacaatcgctacatactctgcaagacagcctgtgtggctgccaccttcttcatccacttcttctacctcagcgtcttcttctggatgctgacactgggcctcatgctgttctatcgcctggttttcattctgcatgaaacaagcaggtccactcagaaagccattgccttctgtcttggctatggctgcccacttgccatctcggtcatcacgctgggagccacccagccccgggaagtctatacgaggaagaatgtctgttggctcaactgggaggacaccaaggccctgctggctttcgccatcccagcactgatcattgtggtggtgaacataaccatcactattgtggtcatcaccaagatcctgaggccttccattggagacaagccatgcaagcaggagaagagcagcctgtttcagatcagcaagagcattggggtcctcacaccactcttgggcctcacttggggtttcggtctcaccactgtgttcccagggaccaaccttgtgttccatatcatatttgccatcctcaatgtcttccagggattattcattttactctttggatgcctctgggatctgaaggtacaggaagccttgctgaataagttttcattgtcgagatggtcttcacagcactcaaagtcaacatccctgggttcatccacacctgtgtcttctatgagtgctccaatatcaaggagatttaacaatttgtcagggtacaacaggaacgtataatgttgaccaccccgagaagcaaccagctcatccctggaacaactcatccagtgcttcttcgtcgctcagctaagaacaggataatccaagctacgtgaactc

SEQ ID NO: 359050 - DNA, 1007 bp, Homo Sapiens
gggggcagccagctttcacggatctagaggtgatcaccaatcgcccaaagggcttcaccaggtttcggtcggccgtcagagtatccattgcaatttccagaatgaaatttttggttcgacggtggcatcgagtcacaggttctgtttccatcaatattaacagagatggctttggactgaatcaaggtgcagaaaagactgactcattttatcattcttctggtgggctggagttatatggagaaccaagacatactacgtatcgctcaagatcagatctggactatattaggtcccctttaccatttcagaataggtacccaggcactccagctgatttcaatcctggttctttagcatgttctcagcttcagaattacgatcctgacagagccctaacagattatatcactcggctagaggcactgcaaagacgacttggaactatacagtcaggttcaactactcaatttcatgctggcatgagaagataatcctttgaaacatcattaattgaagtgattttaaatagatttccttttgtaaatcaatggttcttttgtgcttttgtattgtgaatattcaatgggaccaatatgaacacagcttatgattgtatacaaatcccttgccagcacatgaaaacaaactggaatttgtatatataagcattgtgtatgtattcatgcacaataattattgaattacctgtatatttgtggaatgctaatttaaaacattaaattataaaccttgtgtatttatcaaatgggtgaaaagattaaacttttacgcattacaatactgctgaatgtgtagctcgaggtgtcctgcacttttcttataaggctactgaagttacatgttttgcctaatatattctactggtgatgaagacagataatatcacttgtagagacctatttttgtataatggtagaagttttgaattttatggggtattttgtcaagtactgaaataaaaatgacttcaccacttttaccaa

SEQ ID NO: 359051 - DNA, 986 bp, Homo Sapiens
  misc_feature (892)..(892): n is a, c, g, or t
  misc_feature (945)..(945): n is a, c, g, or t
  misc_feature (969)..(969): n is a, c, g, or t
ctttttcttataaccttttagagagacagagaacagaaatcaatgtataattaatatcagtaatatggtgggtccctattctttgaaagtttgggcttttcatgtagattgagatcaagtatttctttatctttcttaaggtggcagtagtaaggctaaataacattcctcccgattccacccccgccagagtccccaggcctggctcccaacaagggaatggagagctgccagtgtgtactgcttgtgggcttctcccttgccgtggatgcctcttccctcagctgtcaggacggtcatgctttgttcagagagggataatgtcacagcacaatttgcctcctgctgagaatagacatgttctgcccctgcgtgaatctttatcatttcagttcacccacaactatttccttctgtgccctccttaagcttcaagccccatcccatccagcctgcacatgcacagcttacgtagctttggagggaataaaggcctagaggactgatgactccctgcttccaggagatctctgatctccacctcggagacaggggagatagacaggggagccacagtggcaagaacttggcgccttctactccagacactcgctcttaagaaaggtgggctcttccctactctctggcactttgctctggcattcctagagccgcctggcctgccttgtgattctgtggttgtgaaggttctaattctgctgaacccagatcttttggctttgcatgcacactgtactgtattgggggtaaaagtgaaaacttggcattttacctgtttaatgggcatccctgaggctaagggatggcattttgagggtaccattctccctacttggggaaggaattcttaaggcaggcccactttgctctncctgcccgggggtttgggaaacacccaaaaggggggctttttcaggcagcttnttcagagggggcagaggggtcatngggtgatccttgaattt

SEQ ID NO: 359052 - DNA, 1061 bp, Homo Sapiens
  misc_feature (959)..(959): n is a, c, g, or t
  misc_feature (967)..(967): n is a, c, g, or t
  misc_feature (969)..(969): n is a, c, g, or t
  misc_feature (976)..(976): n is a, c, g, or t
  misc_feature (996)..(996): n is a, c, g, or t
  misc_feature (998)..(998): n is a, c, g, or t
  misc_feature (1003)..(1003): n is a, c, g, or t
  misc_feature (1015)..(1015): n is a, c, g, or t
  misc_feature (1017)..(1018): n is a, c, g, or t
  misc_feature (1024)..(1024): n is a, c, g, or t
cagcgccatcttggtgcaccaactagagcaccacccggtccagttgagccttcagatgactccagtcccagttgctgagtgactgaaacttccatgagagactcccaaataagaactgacagctggaccccagtcaaccccatagaactgtgaaaggtaacaaaaatggttttaagcccattatgttttggagtggcttgttcttggtgcaataggcaactgaaacagtcttccccaccaaactgttggtgcctaaaaagcaggtatggtgtccttgacactctggatctccggtcccaggctgggctgggtaaggagcaagtgctcatcaaatattccttgactgaacgaatgaaacccatcaaaactcgctgttcaccctgagatagaatagatttattagcaagaggtaatcaggaaacatatatttttacaaaaatggaaatttttttccaaacaagctgtaagttgaaatattttaggacttgaaatagaattctcataccactaggtattgcttacagcaaaagttgtctgtctgttgtagtggagcatgcctgccacttcggagttaacctgtgttttctatactgtacagtgtaaaaaatacatggtaatattcacagaataagcactacattactatattcctgctagaaggcatttagacaggactacagtatatgcaataaaaacacttggttattgatttcctaattctacagtgtggtactaattatcacaaggtatacagacttagagcatctcaatgtaagcttgtagtgaccgttaggcagcttaaagaggaaaagtgacatttttgtgttcccgactttcagtggatgctgggccagtggtcggcaagagtcgacgtggcttggtgtttgtgactccatttcctcgggaagtccagggcctcatccagttgtattgagactgctattcatgctatctggtgntaatcctngngcacggngcgacgtggggcctgaacgngntggcngcattggtacgngnngtgtgnctctgcgcagcgaggactcccttccgtccaggttact

SEQ ID NO: 359053 - DNA, 431 bp, Homo Sapiens
tttgggtgccaagtagtgtttggaaaacaccacctgaagattacctgccccaattacctaagaccatttttccaaaaagcatgtttttaaatccagtgtagccccggatcacactatattaaatataaagataacttaaaggatcattggatcattcattttggccaaatttttagcttctccaaagtgactaacatcagggcctacaataaaatctgtaattctccaagtttagtaattttatattgaggcaggaagggctcattaagtactaataagtacataatttattaaaaacatacataagtgtcatcaaaaaggtccacaattgttagtaaaaaaaattaaattgaagtagtaaatgctgttttataacatacatttttctgctaattcattctgttttgtgtgacctaataaagcaaaaaaaa

SEQ ID NO: 359054 - DNA, 2354 bp, Homo Sapiens
gggtgtattgatgttaaagcatttccctgttagctaaaagaggcctgttcatacaagccaactggtatatacgtgtggttcatccatcatctgctgcacatagcagactagaattctgggaaccctgtgcaattcagtctgctctcccttgtggaccctggtaaagaaaagcctcagctcatagtgaacacagcagacctagaaatgtagcagcagcctactgagtagctttcatttactgatcatctgctgtgactgtggccctgtctggaggttcctaggttttgagatttagagcaatgcattctggagacagaaccagcagaacagccatttttcaatttttctttaaatcagtattccatcaggcagataactgctgtattcatgaatcttgagagtgttcctgagacagaattaatggtcatttgggaaaactatcgccatggcttcccatctgtggttttcctctaaaagccttggagattagcccttccttgccagtgagaacggtgaccgcctcctgctctgcacggtctgcggcagttgccgtttctggttaggtgtgtcaggttggcttattttgggttcaggcctggcgtagacccacaagtggcagacatatcacaagagtccccagactctgcctagaaacagtgtttgccctttggccagtgacgtggttcatcccggcccatgttgagccatgagtggagtttccagcagagggaggaatgtgtgccttgttcaaggagggcacgacccttaggcctttttcaaccagatttagctgaagggcttgacacctttgaattacagcagttgactcagagtgcaagaagtctggccattttggaaagcaaggtttcctttcagccctgtctactgaccaataccccgactcaccttgtgtggcgcacttcagaatcagatatacctagagtatacctgtggtttggttttataattaatcagctcgttacttcagcccatgaaaatggcatccagggctgccaggagattcagagctcaaaacaaggcgagcttgagttctgcactccagatgtgtgccaaaactagtaaaacttaacggacttacaaccttgtcagtttttttaatgaggcagggatactctgtttttcacactaaacatatgaatgcagcactgctgcctcagctcagcttcgtgcctgggttccccactggtctgggaagactgttgtgctccatagagcagtgcacatctgacccagagggtgggtgttcataactgctacttgctctgctctaccatgtttaaagaaatatttggatgttaaattaactcactatggtttttcacctgggaaggaaacaaattacgtactagagggcattgattggttaaaaacttgtgtatcccgggaaggacctgcggtacaggagtcagccatgtctgtgctgtgtggaaccacctgatgacatggttaacgaggaagacgatgtgttgaccggctgccgtttgaggactttggtcacccagactagacaccttctgtgctcatgtttggaaagctgaaagggaaggacagctgtgccctcctgggagctcatgtgtccctggcgctgtgctagctttcctttacagctgtttacagacaaggcaggcctgaggcagatggccactgctcttgtgatgtttgctcagaggaatatgaacattttatttttgaaaagggatgatgtggttttttgccaggtgtttataattaatcctttaatattatggttattaacctcttaaacatgaatgaattcttgattgttttaacacagtacctaagactaatgctttctgtggacaccactgagctctgcctcaactccaccctctgcgaccggaggactatgcccctagtaactgctgtcggtgtggacgctgtgctggttctgttttctaaaggagcagaaggacaggtctctgagacaggatcgttgtccctacaggaggaacagtggccttgcttcttagacggtcttcactgtgtgttttaaaacgacgacgacaacgacaacaacataaaactcttttgacctgtaacttaaagatcataaacttcaggcaataatattttctgtgtaagcttttaaaattatttttggggatcatagcttgttttattttgtgctataaaattaacagtattaaatgacttatattcttagaatacatcgagtgtcttttcttaacagattagtgcctttttatttttgtattccgttttacgttactggtcccagcatcaaaacccttgtttccatggcctgtttgtatattgtctcaataaaacttgcatcagccggtggtggcggc

SEQ ID NO: 359055 - DNA, 406 bp, Homo Sapiens
  misc_feature (310)..(330): n is a, c, g, or t
gactgcatccaacgccggccaccacgctgatgcaagttttattgagacaatatacaaacaggccatggaaacaagggtttgatgctgggaccagtaacgtaaaacggaatacaaaaataaaaaggcactaatctgttaagaaaagacactcgatgtattctaagaatataagtcatttaatactgttaattttatagcacaaaataaaacaagctatgatccccaaaaataattttaaaaacttacacagaaaatattattgcctgaagtttatgatctttaagttacaggtcaaaagagttttatgtcnnnnnnnnnnnnnnnnnnnnnttaaaacacacagtgaagaccgtctaagaagcaaggccactgttcctcctgtgcggcgttggatgcagtcgggtac

SEQ ID NO: 359056 - DNA, 458 bp, Homo Sapiens
  misc_feature (158)..(188): n is a, c, g, or t
  misc_feature (283)..(283): n is a, c, g, or t
  misc_feature (444)..(444): n is a, c, g, or t
ttttttttattctaagaatataagtcatttaatactgttaattttatagcacaaaataaaacaagctatgatccccaaaaataattttaaaagcttacacagaaaatattattgcctgaagtttatgatctttaagttacaggtcaaaagagttttannnnnnnnnnnnnnnnnnnnnnnnnnnnnnnttaaaacacacagtgaaggaccgtctaaggaaggcaaggccactgttcctcctgtaggggacaacgatcctgtctcagaggacctgtccttctgnctcctttagaaaacagaaccaggcacagcgttccacaccggacaggcagttactaggggggcatagtcctccggttcggcagaggggtgggagttgagggcagagcttcagtgggtgttccacaggaaaggcattagttcttagggtactgtgtttaaaancattcaaggatttc

SEQ ID NO: 359057 - DNA, 749 bp, Homo Sapiens
caggctggtacgcccggattacgggatatcgtcgacccacgcgtcggtccagagagccatggccgccctgcgtgtctgctgtcctgcgcccgcggaccgctgaggcccccggttcgctgtcccgcctggcgtcccttcgcctcgggtgctaactttgagtacatcatcgcagaaaaaagagggaagaaactaacaccgtggggttgatccaactgaacctgcccaaggccctcaatgcactttgcgatggcctgattgacgagctcaaccaggccctgaagatcttcgaggaggacccggcctgtgggggccattgtcctcaccggcggggataaggcctttgcagctggagctgatatcaaggaaatgcagaacctgagtttccaggactgttactccagcaagttcttgaagcactgggaccacctcacccaggtcaagaagccagtcatcgctgctgtcaatggctatgccttcggcgggggctgtgagcttgccatgatgtgtgcatatcatctatgccggttgagaaggcccagtttgcacagccggagatcttaataggaaccatcccaggtgcgcggcggcaccccagaagactcacccgtgctgtcggggaagtcgcttggcgatggcacatggtcctcaccggtgaccggatctcagcccaggacgccaagcaacgcaggtcttgtcagcagatttgtcctgtgacacactggtggaagaagccatccagtgtgcgaaca

SEQ ID NO: 359058 - DNA, 1098 bp, Homo Sapiens
  misc_feature (35)..(35): n is a, c, g, or t
taaagggcctgggtttacccgccccccccgggtancgggataggctataggcgagggggcggctccgcggggccgggcgaaggagtccagagagccatggcgcgccctgcgtgtcctgctgtcctgcgcccgcggcccgctgaggcccccggttcgctgtcccgcctggcgtcccttcgcctcgggtgctaactttgagtacatcatcgcagaaaaaagagggaagaataacaccgtggggttgatccaactgaaccgccccaaggccctcaatgcactttgcgatggcctgattgacgagctcaaccaggccctgaagatcttcgaggaggacccggccgtgggggccattgtcctcaccggcggggataaggcctttgcagctggagctgatatcaaggaaatgcagaacctgagtttccaggactgttactccagcaagttcttgaagcactgggaccacctcacccaggtcaagaagccagtcatcgctgctgtcaatggctatgcctttggcgggggctgtgagcttgccatgatgtgtgatatcatctatgccgggtgagaaggcccagtttgcacagccggagatcttaataggaaccatcccaggtgcgggcgggcacccaagaagactcacccgtgctgttgggaacgtcgcctggcgatggagatggtcctcaccgggtgacccggatctcaacccatggacggcccaagcaagcaggtcttgtccagcaagatttgtcctggtgagaaactggtggaagaaaccatccagtgtggcagaaaaaattgccagcaattccaaaaatggaagtagccgatgggccaaagaaacagtgaatggcagctttttgaaaatgacattaacagaaggaactaagttgggagaaaaaaactctttttattcaaccttttgccactgaatgaccgggaaagagggaatgacccccgtttgtcggaaaaaaaggaaaggccaactttcaaagaaccaggggagaaaccaagctgggccctggcgttcacaccttctggcttgggaagaaggacaaagtggccacccctgttcagttttttaagaaaccaatgtcaact

SEQ ID NO: 359059 - DNA, 1305 bp, Homo Sapiens
aagtagcgaggcctgggtggcgaattcggcacgagggagagccatggccgccctgcgtgtcctgctgtcctgcgcccgcggcccgctgaggcccccggttcgctgtcccgcctggcgtcccttcgcctcgggtgctaactttgagtacatcatcgcagaaaaaagagggaagaataacaccgtggggttgatccaactgaaccgccccaaggccctcaatgcactttgcgatggcctgattgacgagctcaaccaggccctgaagatcttcgaggaggacccggccgtgggggccattgtcctcaccggcggggataaggcctttgcagctggagctgatatcaaggaaatgcagaacctgagtttccaggactgttactccagcaagttcttgaagcactgggaccacctcacccaggtcaagaagccagtcatcgctgctgtcaatggctatgcctttggcgggggctgtgagcttgccatgatgtgtgatatcatctatgccggtgagaaggcccagtttgcacagccggagatcttaataggaaccatcccaggtgcgggcggcacccagagactcacccgtgctgttgggaagtcgctggcgatggagatggtcctcaccggtgaccggatctcagcccaggacgccaagcaagcaggtcttgtcagcaagatttgtcctgttgagacactggtggaagaagccatccagtgtgcagaaaaaattgccagcaattctaaaattgtagtagcgatggccaaagaatcagtgaatgcagcttttgaaatgacattaacagaaggaagtaagttggagaagaaactcttttattcaacctttgccactgatgaccggaaagaagggatgaccgcgtttgtggaaaagagaaaggccaacttcaaagaccagtgagaaccagctgcccctgcttcacacctctgcttggagaggacaagtgcagcctgtcagttttagaagcaagtaaatcatcctcttttcaagagcagtgtccgtggtgtgcagttcctctccaattgctgcgtggtcgtggcccgacctctcacggcatgacagccttcgtcacccagcctgtgagggtcctgactggagcaccttctaaatctaagattctgctgaggagcccccgctggtccctctgggcatgctgtgctcggacggaaagcggggcctgtgggtccttgtgtccctgccgctgaagaatggggctgctctgagggaaacgctgtctgctgccttcatacagatgctgattaaagtgatagcgattcagattacaccaa

SEQ ID NO: 359060 - DNA, 1016 bp, Homo Sapiens
ggcctgggtggcgaattcggcacgagggagagcatggccgccctgcgtgtcctgctgtcctgcgcccgcggcccgctgaggcccccggttcgctgtcccgcctggcgtcccttcgcctcgggtgctaactttgagtacatcatcgcagaaaaaagagggaagaataacaccgtggggttgatccaactgaaccgccccaaggccctcaatgcactttgcgatggcctgattgacgagctcaaccaggccctgaagatcttcgaggaggacccggccgtgggggccattgtcctcaccggcggggataaggcctttgcagctggagctgatatcaaggaaatgcagaacctgagtttccaggactgttactccagcaagttcttgaagcactgggaccacctcacccaggtcaagaagccagtcatcgctgctgtcaatggctatgcctttggcgggggctgtgagcttgccatgatgtgtgatatcatctatgccggtgagaaggcccagtttgcacagccggagatcttaataggaaccatcccaggtgcgggcggcacccagagactcacccgtgctgttgggaagtcgctggcgatggagatggtcctcaccggtgaccggatctcagcccaggacgccaagcaagcaggtcttgtcagcaagatttgtcctgttgagacactggtggaagaagccatccagtgtgcagaaaaaattgccagcaattctaaaattgtagtagcgatggccaaagaatcagtgaatgcagcttttgaaatgacattaacagaaaggaagtaagttgggagaagaaactctttttattcaaccttttgccactggatgacccggaaaagaaggggatgaacccgcgttttgtggaaaaagaagaaaggccaaactttcaaaggacccagggaagaaaccaggctgggccccctggcttttaccaccctcttggcttgggagaaaggaaaaaatgtggcaaccccttggttaaggtttttttaaac

SEQ ID NO: 359061 - DNA, 414 bp, Homo Sapiens
gcaataagcccattgaacaaccagcgaatgaactggcttcctttgaccctgggtgaaggtggtccccagtgccttccaaaaaacttgctggaagaaacagtccctggaaaactcaaggttctgcaatttcccttgatatcagctcccagctgcaaaggccttatccccgccggtgaggaaaatggcccccacggccgggtcctcctcgaagatcttcagggcctggttgagctcgtcaatcaggccatcgcaaagtgcattgagggccttggggcggttcagttggatcaaccccacggtgttattcttccctcttttttctgcgatgatgtactcaaagttagcacccgaggcgaagggacgccaggcgggacagcgaaccgggggcctcagcgggcccgggcgcaggatcag

SEQ ID NO: 359062 - DNA, 1167 bp, Homo Sapiens
ggacgattgccgctgcagccgccgcccactcacctccgggtgtgtctgcagcccggacactaagggagatggatgaatgggtggggaggatgcggcgcacatggccccgggcggctcggcggtcagctgccgcccccacagcggaccggtcggggcgggggtcgggcggtagaaaaaagggccgcgaggcgagcggggcacgtgggcggaccgcggcggcagcatgagcggcgcagaccgtagccccaatgcgggcgcagcccctgactcggccccgggccaggcggcggtggcttcggcctaccagcgcttcgagccgcgcgcctacctccgcaacaactacgcgccccctcgcggggacctgtgcaacccgaacggcgtcgggccgtggaagctgcgctgcttggcgcagaccttcgccaccggtgaagtgtccagacgcaccctcatcgacattggttcaggccccaccgtgtaccagctgctcagtgcctgcagccactttgaggacatcaccatgacagatttcctggaggtcaaccgccaggagctggggcgctggctgcaggaggagccgggggccttcaactggagcatgtacagccaacatgcctgcctcattgagggcaagggggaatgctggcaggataaggagcgccagctgcgagccagggtgaaacgggtcctgcccatcgacgtgcaccagccccagcccctgggtgctgggagcccagctcccctgcctgctgacgccctggtctctgccttctgcttggaggctgtgagcccagatcttgccagctttcagcgggccctggaccacatcaccacgctgctgaggcctggggggcacctcctcctcatcggggccctggaggagtcgtggtacctggctggggaggccaggctgacggtggtgccagtgtctgaggaggaggtgagggaggccctggtgcgtagtggctacaaggtccgggacctccgcacctatatcatgcctgcccaccttcagacaggcgtagatgatgtcaagggcgtcttcttcgcctgggctcagaaggttgggctgtgagggctgtacctggtgccctgtggcccccacccacctggattccctgttctttgaagtggcacctaataaagaaataataccctgccgctgcggtc

SEQ ID NO: 359063 - DNA, 498 bp, Homo Sapiens
  misc_feature (29)..(29): n is a, c, g, or t
taggcccccggtgctttcccaccagtccnccacagagctggctgaaaaccggggtccttgaaccagaaaaggctccctagcgaaaacccactgcctgcctttggacctccagtcacgacctggcaaacagatgcctatccccttaaagtgccattcatatgtcagctttttataattgtacaaagaacatgtttccattaggcggctgagggcagctaagctgagccatacccgttttcactgcagaattcaaactaagtggaaatccttatagtcttcatgtagaatgtttgactctttagccaaataggtaattttgtctaaaattcagtaaattcccagatggattattatcttgtggtaaatgattttggggtgaggggacattgaatcaggtctctgaaagaatctggggtttttagtataatatgtatgattccatctcatttcctttaactgagctcaaagttagaaagaaaatactgcctaatttgtcac

SEQ ID NO: 359064 - DNA, 1985 bp, Homo Sapiens
agaatactgggctcaatactaacataagaaagacacttcattgagaaattcttaagcttacagaaaacctatactctttgcacattccacataaccctagcaaaatgcagtttcttcatacttctgtcactttttccattggaagatttgcttaggaaaattaattcctatttattcccacaaaatgttggcattgcttgattttacccaatggggaatgtgctttgaatttttggaacacttttacaattaaaaataaagtagggccatttttaaattgtttccatcagaaactatgttaaaagagagggttaaataataaatatattttcgtgtgtatttttgggaagatttttgttccaaagcaatagtccaaaatcagatgacctgtcccataataattatgtgtccttcatccttctcagaggccccatgcctcatatgcacgtgtcattgggatacactcttgggggatttggtacactctaatggatgtctaatgttcaacccctcgagaatctgaacttgagtccccagattgtcaaactactggtcagctattgagaattttagaactcaagtctttgatttgaagtagggaacatagtggctcacacagagtttaggtgctgttagaaagatgggaacaagagtgttttgccaccttatttttatatgggaaattttttttaatgaatgaaaaaatgaaaatgaaataacaggatgatagtgatgagtgatgtaaaacatcttacttagatggcagaaccttcgggttgtagaatagtgatgtctaaaaattaaagttattttgggaatacaccactttaatagtatagtcttataaaaattattcattatggtgaacccttcttgtctgctattcgtttcccaacctacttattggaaccacctcaaaacccagttctgaaatgaccttaccaaaagtaaatgtatttattttttagtcagcagaactctgtaattccaaatgttgttctgtgtggtagaattttttttcaggaaccattaggttgtattgaaaatctttgttataggcgataccaaaactgattattcttttttgcaatctgctttaattcatgtccttctgcaattgctctgtattaaaacagggtaaaaaggccatagcccattatgaaaaatataatacaaaactctttgacctatgaggtaacttacagacattgtgttttctaaacaggctgtcagtgaaagcccgtatctgtctccaggtgaatgtaatttacttccgagtactttacccagaggatgtattccccaggtgggcagagtacagttgatctctagcacagacagagattctggcctctgcatattctcaggtctctgtgtgtacctcccattgagtagagaagcttaagataatttctgagagaagaacactgctgattgtgggagcagtttaggagtccatggaagaaagaaaaatacatgtgtcttggcagccatggtgtatttttgtccaaatggattggaaggatatttgaatatttgaatgttggtatgacataaagctgcagtgcactatagagtcaagtcattgaattaccactcctgatacagggctttattgtactactgtgaagtgtatgtgtgcaatacattggtgagttcatttactggtgtacggaagagccagcaggagcagcgtggtcattgctggggtgctattacagttggcttgaagtgagtgctgttttcccagaagatggaacccgttgggggtgggcagatctaactgaatatcaaatgatgcctcttcctcccatgaagaccttccgcaaaagcccgttacttggaaaccacagggttcacctttctctttttatccaaatatttataaatgaaaaagaccctccttaagggaaacaacttggttgttaatccaaaaaatgggaccaatttatttaaaaaatttaggcctcccaagccactttagg

SEQ ID NO: 359065 - DNA, 458 bp, Homo Sapiens
tgctggagaccggcgtagggacagatgtattcatcctggtgttactgaaaaacaggtgtgatcctgttactgatactataagtgacctaaaatgtcactgttcaaattagccagtgttctaacaaactaaactcttcaaatgcttggaaagatactacaaagccaatctttatagaattgggccaagataaatcaatgttgttttgcatgtctattgttaagctccaaaggttcactgtgtttctgccgctgtcctggagttgtcaccactgactgggcaaggcttcttgggcatcgatgtagaactgttgtcctttttccactaacagttatctttgactctcttgcctgttatgcttacaaaatggtgatggcttatggaaggctgttaaattaatattcctgttaaaggaaattaaagtttgtctatttttgacaataaaacattatatattttt

SEQ ID NO: 359066 - DNA, 721 bp, Homo Sapiens
taccggggggggcgggctgcagctcgtgctgaattcggcacgagattttatcacaatttttcttctgtaatactaagagatgggtgccttagtacccttcacctagcatctctcggtaaaaagcagacaagatcacaaattacagtaaaaatgtgctcttttttaaggtgggcagattagtttgtcaaagtctcagccccagttcaattcagttgatctcgagtggtgagtattttgtctcttgttaaaccagaccctgggcttgtctgggcagagacagaagctgatttaacagcatagagcacagcgccctacttccccacagacaggctgaattagaagcccctattacaaataagagcaccacgagctaaaatttaccaacccatttatcaggatgaccattgccatttgtcaggtgacagacagcttggtcacaacacaactgtgtcctgagcacacaagattccatcagccctgaaggacagcagaggagtattttccatcatttcaaaccacaaacaaaattaagatttaaactgtgggatgggtaagaaatccccttctttggctgggaatctccaccttaatccttaaaggaccataactggcaaaatccttagtgtacggacaaaagcaaattggaaaagccagccatttactaattcagaggaacagcatagccaaggctagcgaggcatactttccagttgaaaaaaat

SEQ ID NO: 359067 - DNA, 563 bp, Homo Sapiens
  misc_feature (364)..(364): n is a, c, g, or t
  misc_feature (409)..(409): n is a, c, g, or t
  misc_feature (415)..(415): n is a, c, g, or t
  misc_feature (485)..(507): n is a, c, g, or t
  misc_feature (528)..(528): n is a, c, g, or t
cttgtctgggcagagacagaagctgatttaacagcatagagcacagcgccctacttccccacagacaggctgaattagaagcccctattacaaataagagcaccacgagctaaaatttaccaacccatttatcaggatgaccattgccatttgtcaggtgacagacagcttggtcacaacacaactgtgtcctgagcacacaagattccatcagccctgaaggacagcagaggagtattttccatcatttcaaaccacaaacaaaattaagatttaaactgtggggatgggtaaggaaatccccttctttgggctggggaatctccaccttaaatccttaaaagggaccataactgggcaaaantccttagtgttacgggacaaaaggcaattggggaaaagccagccnttttantaatttcagaggggacagcttaggccagggttggcgagggcttattttcccgtttggaaaaaattcaaannnnnnnnnnnnnnnnnnnnnnnggggtattgttccttttaggnaagtggattggccgttggttcccaaaggggttttt

SEQ ID NO: 359068 - DNA, 1213 bp, Homo Sapiens
  misc_feature (30)..(30): n is a, c, g, or t
  misc_feature (36)..(36): n is a, c, g, or t
  misc_feature (707)..(766): n is a, c, g, or t
  misc_feature (974)..(987): n is a, c, g, or t
  misc_feature (1114)..(1114): n is a, c, g, or t
aatttaatgccataaaggcagaaaatcttnacaagnttttatttttaatgtgaacatagatgcagcaccgactttttaaacttgaaaaaactggtataatgttaacttttaaaaataacatttggacacactagtaattgatttttgtttacagattgttttgtttacaaattgttagtctttgtttctatgagatacttttagtgtgactttttaaatgtcttagaaattaaaagttgtacaaaaagtgatttcatatttggtttataagcatttatatgtggggtttatttgttcttttgttttttccatcttaaatatcatcatggctaaaacttaagggtatttatagtttaattccatttcagttttatagagggcagtaattattctgatgaatgttgaattaagaaatggatattttctttctctgttgtgcagttattggtagatcaatttcttataacccacaatgtagcatcaataattgatagcatgtattttatttaattacttgaattatttagacttgatttctctaattttttccataaaaggactgaacagcacctacttgtggtctggacagcttaacccagagttcctggaagaataaatgctgttagcatctggttaatttactggcagacagaagcctacttacagtggctttcaactttttgaccacagtaagaaataacccattnnnnnnnnnnnnnnnnnnnnnnnnnnnnnnnnnnnnnnnnnnnnnnnnnnnnnnnnnnnnagatacgtataagcaaaaattcgacaagacagtacttgtttttcctaagtgtgcatgctggcatcttctgttttattatttttaaaaatactagacacagacactaagttactttgtggcctcctaatagatggcagacttcagtttgaaaagcatccctttggaatgtggtttaaaagaagaaataatacaaagacctttttggagnnnnnnnnnnnnnnggctcttgaatattgcttaggtaaaaattattgctgcaaacacaactgaagcaaaagtactgtgtacgcaaattactttgtgcactgtagaaaatgtaatatcaggagaagttcctaaaactcacanatatatacaaaatttcaaaacttggtgattgatccatatgtctttgaaggaatattaggcaataaacctacccttttcaagagataattaaacccccca

SEQ ID NO: 359069 - DNA, 698 bp, Homo Sapiens
  misc_feature (530)..(530): n is a, c, g, or t
  misc_feature (612)..(621): n is a, c, g, or t
actttgggtaaacgttttgactgtttaaagtttatggcggtgaagtgggcgtcttcaaagactagtacttacacagtttagaagatttcaaggtactgctgacagtagtttattatgtcagtatacatacatgtgtaggagatcataatttagttcccttcttaatgttacaatttcttagtttacttttcctaaagggccatagcataattcttgattcctggtggaaatcttttctgaggtgtgggggtgggcaaggtgtggattgctgtttacgatagtgccttcattagttttagttctgtctgttttcattcattattgactcaaaggtattagaacaggcccttatctttttcctattagatttatttttggtttttactttatgtaagttcagaatcctttcttaagtgatgactactgatgaaataatgttactagtagctgaattttagacttgatgctatgttgattaatatttaaatggtgaaagtaattaggcaaaataagcaattctgcttttctgntgctttcagaacttttaggcttgtaacatgtctcaagcaggaagtcagtctatatctctctcaagttcttactggacgtcannnnnnnnnnagcacagctctaatttttaaatatttggataacagctttctgcatgtgacctacttaatggtgaaaattaactgatg

SEQ ID NO: 359070 - DNA, 739 bp, Homo Sapiens
  misc_feature (20)..(20): n is a, c, g, or t
  misc_feature (34)..(34): n is a, c, g, or t
  misc_feature (52)..(52): n is a, c, g, or t
  misc_feature (106)..(106): n is a, c, g, or t
  misc_feature (228)..(228): n is a, c, g, or t
tatttctccctttcagtgtntggtataacttaanccacaaactcatgttccnttatcacatatggttctgtttaggttatctgtttctacagtgagctttctagtntgtatcctatacggaatctgtttccacctaagttgttaaataatacaacccttggagttggtccatggtgttttcctagttagccttttaataactatagtgtctgtagtgtattccctctntcatttctgacactgaatttgtatcttctgtttttctaggcagtcagctagaagcttatcttattgctctaaaagcatttttaatgcactcaagatagttatgctagaaactttaacttcttattcaacactgaatatgagtgactaatttttaattaaggatctattttgctttttatatcacagtaatgacttctatgtgttagtagtagtacttcgttctgtgtaatactggaatactaggagttcattctaacttaatgaaaatcaaagttggcttagatggaatatgaatttaacttctgagggccgaagacttaaattgtgctctttttaaattctgcagaactatatatcttcatacagatcttcgttgtagctttagcccaggtgcttaggtgtttgcaggtctgagaaacctctaacctagtgttcctctaaattagagtccttggatctgtatcaaaaccacctagtgtactgtttaaaaatggccattcctaggccttat

SEQ ID NO: 359071 - DNA, 463 bp, Homo Sapiens
  misc_feature (438)..(438): n is a, c, g, or t
cacgagctggagtaacaaatatgcctgttaggtgttatactgttatcaggcaatatactgatagcaaaatgggtctcaccttcaagggttttggtacaactgagggcaaaggtttcctctttctcaaaggtatctcccacctcttcccaagcagcagcaaagttaagcttcagtactttctgaatatggtcagacacagtcacttcgagatcttccagctagtgggtaataagcagacagtaaagaaaagtcctttctgttatagggcaaagataaaggaactagtcaatatggtcctccggagcctagagaaaactctaccaccaaaatagtttaagttctgtagtctggataaatctaatgttgtagcccttagcaaaggaaagcaaggagtagtcatgttgcacccacacttgaccactgagttctgggcacacngtaccctctgatcattcactaagag

SEQ ID NO: 359072 - DNA, 445 bp, Homo Sapiens
ggtacccggtgtttatcgatgccactgaccatgtagtgtgcatcagtttcctcttgtccagtaagcatttatccaacagaagctaagataacatctacaggtgtgctctctttacttctgacagtcacctgcatggtcactccatcggctaaggccagccgggacctcaccaataaatcatagccacctctgaatatacctgccagatagagcgaatgggaattctggttctcaggtactttatcggacctctcacatggctgcatgcccagaaatgtgatgatattgttgacagcctcttcaagggtttgggtagaactgagggcaaaggtttcctctttctcaaaggtatctcccacctcttcccaagcagcagcaaagttaggcttcagtactttctgaatatggtcagacacagtcacttcgagatcttccagcacatact

SEQ ID NO: 359073 - DNA, 779 bp, Homo Sapiens
  misc_feature (56)..(65): n is a, c, g, or t
  misc_feature (638)..(698): n is a, c, g, or t
ggtgggttggggggaccttttctttctagttgtctttaaggaaaattaattttacnnnnnnnnnngttctggccgaaatttttatgagatatctctcacttgtcttccactttgaaccggttaaagctcatagctgtcagctctgaatgaggaggggagaagcccctgggtctttctttgaaaggaatccgctgcttgagggctgcctccctcatggtgtgcgtgtcgtttctcttcctgacgcatcttgtgatatcagaggtaactatgcaaagcatccaggcggttctgaatgtgaagcactacacccagcagagtcccggtgccctctgtccccactgccggcccatgttctctctccggaggtcaccaaggaatgcacaggtttcgactaccagaaaggggagtccttgggttctttcaaaaaattcgtgaggagagctgtctacagtggaatagggggtctccctggggaatgcaggccaagtccttttattttaacatgatgtccatgaagaggtttgccgtctgggcagccctgtcggcaaggagcgtgcatactgcgtttgtgtaattgtttgctgtatctcccttccctctgagctgtattgttctttaatggctgtcttgcccttccnnnnnnnnnnnnnnnnnnnnnnnnnnnnnnnnnnnnnnnnnnnnnnnnnnnnnnnnnnnnngttttgtttagtttactgtgaaatgaactgtatggcttatttacagtatttttaattcttaataaacacttgagctttgtt

SEQ ID NO: 359074 - DNA, 789 bp, Homo Sapiens
caaagaatcaacccattgccacggaagaaaagtcaaagaaattcaagaagaagcaacagggaaagcgcaggacccacggtgaaatcacaaaggagcgagaagatgagtgttttagttgtggggatgctggccagctcgtctcctgcaagaaaccaggctgcccaaaagtttaccacgcagactgtctcaatctgaccaagcgaccagcagggaaatgggaatgtccgtggcatcagtgtgacatctgcgggaaggaagcagcctccttctgtgagatgtgccccagctccttttgtaagcagcatcgagaagggatgcttttcatttccaaactggatgggcgtctgtcttgtactgagcatgacccctgtgggcccaatcctctggaacctggggagatccgtgagtatgtgcctcccccagtaccgctgcctccagggccaagcactcacctggcagagcaatcaacaggaatggctgctcaggcacccaaaatgtcagataaacctcctgctgacaccaaccagatgctgtcgctctccaaaaaagctctggcagggacttgtcagaggccattgctacctgaaagacctcttgagagaactgactccaggccccagcctttagataaggtcagagacctcgctgggtcagggaccaaatcccaatccttggtttccagccagaggccactggacaggccaccagcagtggcaggaccaagaccccagctaagcgacaaacctctccagtgaccagcccaagctcctcaccctcagtcaggtccca

SEQ ID NO: 359075 - DNA, 367 bp, Homo Sapiens
ttctgctgttaccactgctgttgttactggtatcaatgtgactgtcatatcgttttcttctaatctgttgccttatttgacatagcaagccctaatagaaggcctagcatcactgggttccaaatcagaaagtccatgcattttcaaaccttataacatgaatttttttgtttaaaaaagccagcatcctggggcctaccctcattaggccttctataccactaataaatatatctttttaggcaacctaagtagtctgaagcaagttgtctatggctacattttgaaaaacagtgttctgtagaagttttacacatacatgtttttctggattcatgcttctctgccatttgaaagactgtagttg

SEQ ID NO: 359076 - DNA, 1365 bp, Homo Sapiens
  misc_feature (1100)..(1100): n is a, c, g, or t
agcggttctggttttgtaaaggatagtactggaatttgcgtctgaagaccaatattggtgtaactcctgtcagtatattggtaaaatgtagcagaggcaggagtttggatgtttggatgggattcccttaggattctacagccaataaagatcctatttcctatgcatgtcccaggaatcagtaatcctcttttactctgttgggatgagtctttttttgtttctgttcagagtggttactaacttcaccttctttcctcttgctgtcatctgcattcgtgcttcccacctgttgttggcatgtcctttaccttctctttccctgccacatcaacctacacactgactcatcattgacgtggaagcatgtggaagatgtcaagtttgtgatcaactatgactatccaaacagctcagaggattatgtgcaccgtattggccgaacagcccgtagcaccaacaagggtaccgcctataccttcttcaccccagggaacctaaaacaggccagagagcttatcaaagtgctggaagaggccaatcaggctatcaatccaaaactgatgcagcttgtggaccacagaggaggcggcggaggcgggggtggtcgttctcgttaccggaccacttcttcagccaacaatcccaatctgatgtatcaggatgagtgtgaccgaaggcttcgaggagtcaaggatggtggccggagagactctgcaagctatcgggatcgtagtgaaaccgatagagctggttatgctaatggcagtggctatggaagtccaaattctgcctttggagcacaagcaggccaatacacctatggtcaaggcacctatggggcagctgcttatggcaccagtagctatacagctcaagaatatggtgctggcacttatggagctagtagcaccacctcaactgggagaagttcacagagctctagccagcagtttagtgggataggccggtctgggcagcagccacagccactgatgtcacaacagtttgcacagcctccgggagctaccaatatgataggttacatggggcagactgcctaccaataccctccctcctcctccaccctctcctccttnacgtaaatgaaaccccctcaagtgggaagtgactcccagccatgcccctgccgcgaaacaccccaacgataaatacacttcccttggcgggcccgcctccgggccctccgaagaaactttttcaaagacccatttccgtttgggcgcggcgggggccccccgtcagggcaaagggggaacaatgggggtccattaacctggtgtgttccccaagggaggacaaccccccggggtcaaatggaaccctaaagtggggctcttgggc

SEQ ID NO: 359077 - DNA, 858 bp, Homo Sapiens
  misc_feature (49)..(85): n is a, c, g, or t
gatgatgaactcactatagggcgactggagctcaccgcggtggcggcgnnnnnnnnnnnnnnnnnnnnnnnnnnnnnnnnnnnnnatcaggccaaatcggccgagctcgaattcgtcgagagcggggcgttgaggctgcggtcatggagggagcaggagctggatccggcttccggaaggagctggtgagcaggctgctgcacctgcacttcaaggatgacaagaccaaagaagcagcagtccgcggcgtgcggcaggcccaggcagaagacgcgctccgtgtggacgtggaccagctggagaaggtgcttccgcagctgctcctggacttctagggatctcagccgtggctgaggccacccccagaggagcccctggtccacagaagcaggccttgtgtttccagcggcctctgataagaggcagggaaggacctgaaggatttggagttgattcaaacaagatctctgggagtctccagcctgtgcagaaggggcaggactgcagtgcactgcgggccttggagtgtccagtggggacactggtgtgggaaggggcagcacctggggagtccctgcctctcctccctgggacaatagtgtgcatgccacccggggtcctacaggcaggtgctgggaaaggcctggccagcaggtagcctgtgtgtttgacaaacagcagctggcagcgctgcctcctgcccacattcctgccacccgacatcaaagctggcgtgtgacctttccagccatgcgatattccccttggaagatgcttccccaggctataaatttgttctcacaaagcaacatcaataaatcaaaactgtctctcccagaaaaaatagacagcgatcac

SEQ ID NO: 359078 - DNA, 720 bp, Homo Sapiens
gggggtgggctcgcgttgaggctgcggtcatggagggagcaggagctggatccggcttccggaaggagctggtgagcaggctgctgcacctgcacttcaaggatgacaagaccaaagtgagcggggacgcgctgcagctcatggtggagttgctgaaggtcttcgttgtggaagcagcagtccgcggcgtgcggcaggcccaggcagaagacgcgctccgtgtggacgtggaccagctggagaaggtgcttccgcagctgctcctggacttctagggatctcagccgtggctgaggccacccccagaggagcccctggtccacagaagcaggccttgtgtttccagcggcctctgataagaggcagggaaggacctgaaggatttggagttgattcaaacaagatctctgggagtctccagcctgtgcagaaggggcaggactgcagtgcactgcgggccttggagtgtccagtggggacactggtgtgggaaggggcagcacctggggagtccctgcctctcctccctgggacaatagtgtgcatgccacccggggtcctacaggcaggtgctgggaaaggcctggccagcaggtagcctgtgtgtttgacaaacagcaactggcagcgctgcctactgcccacatgcctgccacccgacatcaaagctggcgtgtgacctttccagccatgcgatattccccttggaagatgcttccc

SEQ ID NO: 359079 - DNA, 969 bp, Homo Sapiens
acatacaataaaaccgaatgagctggttctttccatcctcttgtggtacccgtagtgcccagcatccagacctttgtgcccctgtgcacatttggaagctaaaatgtacatcgttgtctgaaaaaacccaaccccaaaaccttcatctgattggtgagctgaagtctgtccttgcaccatgttatcatctgtttctcgtgtccgcctggttgaggaggacccacgagtgctgccgaggtgtggagggctggtattgagttgtggacatcactgttgaccctacctcacgtgccgagactctcatgtcacaggcgtgccttgctgcccccctgcagcactgtgcaggacgtggaccagctggagctgctgcccagcacagaggagagtcgccgcagatgacctagctgcggtgtgagagagcatggcccagacaagcagctgggttggcttctgagaacaggacttaccctgggcttcaggaacatctgatggctgaggttagtgtgcttggaggctgcaggacgaactgtcgatgtttcttagcagagatggtcacagagggcagcagggacaggactggaagggacctgcagcctgcagaccccgcctggcccccgctggcttctggctggtccagtgatgggcaagtgacagaccttccccaggcttctgcttcagaactctaatgggaaactgggcctgtctacctttagaagtcttcgattctcagagagcatttgtctaatacaataaaaactggcattaatacaaacctcaaaaacgtgagcgtatcttccaggcttcatggattcttgacatgtaattgctttgttcagaaaaagttattagaattcacataatttctgtataaactatggagatccacagtacttttttgttttgagatttaaagttttaagggattgtacatagatatcaaaatattaacattggcaaaagccttttcca

SEQ ID NO: 359080 - DNA, 1086 bp, Homo Sapiens
  misc_feature (162)..(178): n is a, c, g, or t
gctactaccaacatttactaaaaccacattaaaaatacacaggataatgaatggtttgaaagagcgcatttgaagcagagagaacccaattacacaccttcctgcaacagagtgcctcgatcatacacaaaataaacttaagctgtttacaatgtttcccannnnnnnnnnnnnnnnnccctctacatttaactattaaaaaagttttttattaataaaagggctcctctgggggtcatatacaatcataagtgaactttaaattccattttatacaaacatctcaaaaaatattgggagtgaagtatggtaggaaatattgctcacattgctaattaacatgcgtatatgaaaggaggaaaatgttttgttagtgcatatacctccagagcagaaaacccacccaaaacaaaagatctaaaataaaacatacagtagctgattacaaaaaaaggtaatgtccacaaaattaagtttttcatgctattctactttccagtactatgcttcaggtaatcaatttgcatggctagatgttgaatacttgaggtatataagaagggaaacctgcatgttgaggaaaatctgtcatcttaagggttgtttctttttgtttgtttatcctggtactttaacatttttaaaagatattttatttacatcaaaattcactgaactacaatgacattccaattataatagatgacaaacaacgcctctatcactaggcacttttaaaagggagttcaggctttacagaacccttctgatgcaatcccatgtatgatatgacatcatcccaccaccctcgtcccactaaaattaccctctggggaaatattaccttatatagcctgattaatttactatggaagaaattagcataaaatgaccaaagtaaatgcatcatttaagactaataaaacagccgaagatgtcaggtttgaaagaggagacaaattgtgtatatttaaaactaattaaataatttaaatttgacctatactttatatattagtgagacacaaatataggctattgtcttttaaaatttcattcacataatggaaaatttcttgtttatta

SEQ ID NO: 359081 - DNA, 674 bp, Homo Sapiens
  misc_feature (58)..(58): n is a, c, g, or t
  misc_feature (94)..(94): n is a, c, g, or t
  misc_feature (96)..(96): n is a, c, g, or t
  misc_feature (415)..(612): n is a, c, g, or t
aggtggtggaagtaaacctcagattgattgaatctgaggagcttcgtacagtagctcnccccggagtgctcttgacattttgggtatgccactntntcattgttcagtactttcccacatactacaggacatttataggtccttcacccacaaaatgccatttgagcctgcaaatcctcgtaacagccaaaaaatgcacagcatattttcagatgccccttagactgctaatactacctctggttgaaaaccactatcagggaaaatatttctaatccctgcctctgtaataccatattctgtacttttcttcctattttactctgccatgccctcatgttttcattggtatctctctgtcatctttcatctctactaggcaataagaatcttagggatcacagattgactcttnnnnnnnnnnnnnnnnnnnnnnnnnnnnnnnnnnnnnnnnnnnnnnnnnnnnnnnnnnnnnnnnnnnnnnnnnnnnnnnnnnnnnnnnnnnnnnnnnnnnnnnnnnnnnnnnnnnnnnnnnnnnnnnnnnnnnnnnnnnnnnnnnnnnnnnnnnnnnnnnnnnnnnnnnnnnnnnnnnnnnnnnnnnnnnnnnnnnnncctgggagcgaggtacaggagccaatagacactgactgcactagcacagacgagacttgctc

SEQ ID NO: 359082 - DNA, 698 bp, Homo Sapiens
ggagtcactcctctcaaatcctgctgctgctttatcaactaagagtatgtaatgttctaaatcctttgttgtcatgtgaacaaagttcagagtgcctccaccaggagtaggttccatcttaacacatcattttctttgcttatccataagaaatacctcatcattggttacagtttattatgagattgtagcaattcagtcatgtcttcagactccactgctaattctagttctcttgccgtttctaccacatctgcacttacttcttccactgcaatgctgaacccctcaaactcacccatgaggcgtggagtcagcttctcccaaactcctgttaatgttgatattttgacctcctctcatgaatcccgaatggtcttgatggcatctagaatgatgaatgcttttcagaaggtttttgattgactttttcaagaccatcagaggagtcatcatccgtggcagctatagacttacaaaatgcatttcttaaatagtaagacgtgaaagtcaaatttactccttgattcataggctgcagaatggatgctgtggcatgaaaccaacattcatctccatgaggactcttgggtacccggtgcatgatgtattttataaatatgaaactggagagaaaatccagcatgataattgaaatttgcaaccatgtgaccagaattcctagtaaatgtgggtcc

SEQ ID NO: 359083 - DNA, 516 bp, Homo Sapiens
  misc_feature (38)..(38): n is a, c, g, or t
gacccaatggactctgacctggatctcatttaaaaatntcagctggtcttttgcccaggctatgttacgcctttcaagtagttctgacaaggaagatgattattctaaccagcattatgatgttgtttgtttggcctgagtcgctctgcatcattgcattatgctgttcactgagagatgacatccctttattatcattttcttagcctctcttgggatgcccctgcccccagccttcctgactggttgcaaattctgtattttattattgtcttggcatcttgatatctagaccactcctacaagtttatctggcagtaggaacttggtgcatttttttctacgctacacccccccacccttaatctttctttgctgtcataatattcagtagcatttataaaagctgtctagttagctctttaaaaacttttgtcctgcaaaatgtttgttagtcaacacactactttgtgtaaacaactattatgtttccttgggaccatcacaagctcttta

SEQ ID NO: 359084 - DNA, 1286 bp, Homo Sapiens
  misc_feature (60)..(60): n is a, c, g, or t
  misc_feature (124)..(124): n is a, c, g, or t
acgacatttcattactagattggtttaaatgtaaggatccttatgcgtcatatgcaagtntcctgtaagtatccactaatggtcaaatgagtgagtgctagtctcaaagactttaatgtgttanagtatcaatcagtgcagtcttattctctgtgagagaagagagagaacaatgtctttagcatttctcaacagaaaaacagttgtttcttgatttgcagtatacactcagcttgtagcactgtgaatccaaggtcgagaaggaagatgaacttgcatgtgacaaactgctagggctaggatggttctccagtgagtaaggcactcatttactttaaaagaaacaattgcattaatatatgctgaaagtaataaggtgacaggacgtctcatatacaaagttaaaattaagatttaacacactggggaatcctgcacttctgtgaggagctatctctgcatctatttcataacctcagagagaaaacttggagaggctacaaaacagttaccttctgggtgggtcactctggcttgctctctggaaaacagaatcacagacgtgtgacagaagagccacaaaatggcttgtcaccagggattggatctaagcacctaaaactacaccattggccatttatgagacggctgcaggcacagcgagagtcacgcctcacttctcattcagctactctgggaaccaccttcctttgatacgaggaggaaccagagagaaggctaaggaagagcccactacttatcatcgtagggccagcagcatgctgatcacctgggcgctttttagacctgtaacaagatccttccagtgatctctgtgcacatttaggttagagaagtagcagtaacaggcatagattaaaagctgcaacaaggaggatgcacaatgtctggaggatatttaggaaaagttgtgcttattatttgttttcttagatcaataattaaggacaaataaaaacaggaataaaaagatgaatggacttcaggcaaagacctgtcctgttttaaagccactatctagccccaggccacaactattcagtgaaaaataggtagaaatttggtttagacacgtcaaggtatttaggctttccaattccttcggactgtcccaagtcctagataatacatcagttatggctatgtcattatagatatccagtgctaaaaagtgactcaagtggcatagattttagatcaaggcaggagctctgtgtagattcagaaatgctgaacaatagaaggagacacaggagaactttaca

SEQ ID NO: 359085 - DNA, 1279 bp, Homo Sapiens
  misc_feature (32)..(32): n is a, c, g, or t
  misc_feature (1040)..(1040): n is a, c, g, or t
  misc_feature (1046)..(1046): n is a, c, g, or t
  misc_feature (1091)..(1091): n is a, c, g, or t
cctcatttcctcctttcctcccaatccccttnaaattctgaagtactgtaacataatatttctgggttccccacgatgatgtgaaaaactaccagactgttttttgtcttctcacaaagacaagaaaaatcagggcattttgtgagtgccttaagatcaaactaacaagatctgaccctctcccctcacagtgagccactgccccacttcagagggtaagagccaaaagcctcattgtgaaaggcactggacttggaccagggacaccatcagggccttggttttctcacgcataaaatggagagtggattaatcgccaaagattcttctgatctgacattttgaaattgtgagagaaactagatgactgtaaacttggtcacaggcctggttctggcagttctttgcggacttttttctagcattatgccaaataaacatgcagtctcagtgtgctctcgcatgtatgaatatctagtcctttctgtggttctcagccaagacataaaaactaggactcagagcacatacaaaaccagttatgtttcggaaagagggaaaagagtccccgagcccggatcttgtgctgcttttctcactgacgtgttgccttttttctttacaaaatctgctttgatacttaggacctctctggactaatttctcttcctagacagctcagcacagctattgatatgttagaggcagtatccttaatattcattctaaatgagttaacgacttaacttgaaattgggcctaaggagtgagaactacaaaaatacaaaatgcttgtccaggactcagccatgcacacctttgagcagcgccggcaggaggcacggaaggaactgtgctctcgttctcctcactggcatggtgccaccagtgtctgatgaagggcagagtgacccagactgcaggcagtaactgacttcacacagtccctgggcattagtcatctgtgaatgtctatcactctggactgtgcagagccaccttgcaccgagatctgcattcgactgctatgaacggtgtgnggccgnggctgcttgctgagtctcaactgcacttgagctccttatacctancactgcttgaagtggagttacaccgactactggccacctaccaggcgggattaatgcatccttttggaaggcttttttctctgcctggaattccatttataaagtctaaatgtcaattgggctggttaaacttaattgaaactgtttttgttgcaaaatactgcctccgggcacaaatataaaacacc

SEQ ID NO: 359086 - DNA, 699 bp, Homo Sapiens
  misc_feature (519)..(519): n is a, c, g, or t
ggatcccccgggctgcaggaattggcacgagctgagaagcaaatgatgtgtttgaaatgcctggcatggggtctagacacaatactgctcaacctttaagtttccttcctccttttttcccaggcttgtgggtcttatccagtcctgtcacctgtcaacagtcttcgtcctcctcctgttaccacttatggcccttgggatcttcctttgagagccctgacttgttgggcttggcccacccacccagctgccctgtatgtcagtcacctcccctgtaagctgagaagggatgacatcagcctttccctcttcccccctcccaagcctctaggctgttttgagccataaatattttagctgggcctttctctggctgttgccaaggtgatgggctctcaggggactggggtgggagtgtggaggtagggctggcagcctggggcctggcagcagagctggccctggaggagtgggtatgaggcctggccaagagccaatgcttgcagcttgacaagcagngctgttgctctacctgcttgccctccctttcctaagcccctcagagccactcctattgcctacaggcccacttctggccttggctgctgctcttcgacctcaggtaaattggtcaatgtccctaggctttcattctaacattcgttacaaaaattccaagaaagcacaggaggttttgga

SEQ ID NO: 359087 - DNA, 1313 bp, Homo Sapiens
tgtccttcatgttagatcataatatgatctcaccagatccttactgaaaatgtacctattacgagtactagcactttacagtgtgctatagtaatgataaacccgttttaaacttcttaatcttatcatcaagcaacaccaggcttctaaatctttttgtttcatttaaaatggctactatatatgagaatttttaaggtattatactaaaccctttttcaggtcaaaaggcatgttatctagaaaataatttaacactgtaattggatcttcaagatcaatttgttttatatactctgcagcaaaaataacatttctagtaggaaggaattaattataaacctagcagattctagacattcacatatttgtgtaaacaattttaacatggtttattacgtttccagaaaggttaagtcttatattccattttctgctaattcttctttcatatatcatttaatataataaatatatgttattagggtgcatatgtgcatatattttcacacatatatatgtcttatatacataaaacagcacttaatggtcatgttctttgcatgttcaacttcagaggaaaaaaatgaattgctgttatgtataaccaatggcgatcttcccttctgtttcacagatggccatatctggatgtaaacaaaacattggagcgagtcattccaggtgaattgtacttcaagttgtaggttggtgttctcaagaagaattgggtgctccctggtagtaaatacctggaattaccccagtcaggaccaatgcctgaaagtgatcctcttttgtcagttgcatatttgtaaaccactagcaggcactgtttacaaagctccactaggcgctggcaacactggagctgcaaaggagtcaccacctccgggcttttattgaatatactctcccaagaggatcctgaatcacagaaacagttccacagcccttggccacgactccagagtaagcgattaaaaacccggttgaaaatccgatataaatttacttcttcaacatcaggcaccttccagatgcgtggaagaactgtacgaatacttgttttcactatgtccaaaacttttcggatgtattacagagtccaattttatgagccaatatgaagccactttggttttatgatacttccagttatcaatgatatcttctatcagaagttctgattctgcatctgactttcctggaaaccggatcttcatgtctttgagaacaaataaggtctgacttgttagatcatcttcttgttcttttgttttcagttgccgcaaagactcactcttaaattt

SEQ ID NO: 359088 - DNA, 543 bp, Homo Sapiens
tctccacattccttaaaccgtgcttcctcctacatgaggcatctgcctcacagtaatgatgcctgctctaccaactctcaagtgagtgagtctttgcggcaactgaaaacaaaagaacaagaagatgatctaacaagtcagaccttatttgttctcaaagacatgaagatccggtttccaggaaagtcagatgcagaatcagaacttctgatagaagatatcattgataactggaagtatcataaaaccaaagtggcttcatattggctcataaaattggactctgtaaaacaacgaaaaatgaagatgttttcagtttgtatgatgatgagaatgatttagaagagaggaatggcccaggaaagagaggtgttaaaaagttcttgagtaagtaagctgtgagagggggagggttttcctaatcaagagcatttattctaacaggggggaaggcaggtgcatgggaatgtggtgggaagatgggaaagttttcttctggtggggagggcttctggagattggggagagagtctccgtcgaact

SEQ ID NO: 359089 - DNA, 940 bp, Homo Sapiens
  misc_feature (67)..(67): n is a, c, g, or t
  misc_feature (196)..(196): n is a, c, g, or t
  misc_feature (247)..(247): n is a, c, g, or t
  misc_feature (252)..(253): n is a, c, g, or t
  misc_feature (294)..(294): n is a, c, g, or t
  misc_feature (326)..(326): n is a, c, g, or t
  misc_feature (343)..(344): n is a, c, g, or t
  misc_feature (370)..(370): n is a, c, g, or t
  misc_feature (382)..(382): n is a, c, g, or t
  misc_feature (918)..(918): n is a, c, g, or t
agcgccttggttgcccgcgtctgagggcttagcggggagacgtcggagacatatccatctatagctnttctttccccttctgatccgcctccgtgcaaggcaggtgtaacatcctataaatcccttggatcggcatgtgtcaagtcgaaaagctttctggatggtgggccagaagttcactttgagttcagcactnccaaaggcatgcctttgtttggtcaagctagaaagggctggattcctttgnaagcnnatgttctggcagtctcctcatgacagcctgtccctcggccntcggcttgaggacttgctctctgaagggattntcaggcttgctgtgtcnngctgcggggaagtgtgtcactgatgnagaagctcttcntggtgtgtgcatatggcgcacttggctcctctgccgagtagctgttggcgcgctctatcttggaaccagtgatgttgttgaacagggttctctctgagttatcaccctcctggaaggatattgcaatggtggctctgcggcctttggcctcattctcctcactgtcagagctggggtgactcagttctgcttctcgctctggatggcagcaagttaagtcctccactttgtctccaagacctccagggaaggcagctctgtccgcaattgcttgaggggcattgacacaccttgtgtcaatacagtctgtaatacttgtgtattctgctgtttttacaggcaccccaaagttggcataatagctccttgagggggaaaacataaagctatgagatttcacaatgggagcctcttctagaagaaagggtgtggtggctaggtagcggctacttttggaacgctcaatggtgtggtacatcggaggctctgagtcccaggggttttggcattctgggaggtgggtgtagtctgaaganaaagatctagtgtccatggagg

SEQ ID NO: 359090 - DNA, 1004 bp, Homo Sapiens
  misc_feature (205)..(213): n is a, c, g, or t
  misc_feature (311)..(311): n is a, c, g, or t
cggcacgagcacatcttatgccaagcactctgctaggagctgcgtatacagagaagaaaggcattcctgctctcatgatgttcatggtcttctgcggaagagaccagaaaaaaagtattacaatgtagaatgaaataagaatgacagggtattttggcagcaaggaggagggcactttaactcaaactgggcagtggaagaagtnnnnnnnnncattgaaagaaatcctgaaggataagcaggagttaagaagagtggatgaagcccttcaagggtaaaagcatggcttattcagagcactgcaagtgttntagtatggcccacatgtaaagcttacagaggaacacagagagaaaggcaagagcaggaagtgaagggtcctgtgtatactggcttacttgttgagttggagaactattgccgtattcctctgctaagctcagggtgcattcgtggaaaccctactgcaactggcccattgtgcatacaaagctggaactgagatgtgaacagatttgcattgccttgatcaccttccgtgggaaatatagctaggcccacttattggtaggagctactgacatgttaaaactaggttaaactgaattggaagtaatggtgtatttggaatcatggctgactgattcccattacatgttctagcatgataccagtctgaggttattccccttgaaccaccgacttagtagagtttaatgcacaatgtgatggtcttagttccttgtactgttcttcagtgtcaaagttgttcaactaccagttaagttttttgggctttgtttctcagtagtgacaataaatttgtgttgatctatttacaccttttggactgaacaccttagcaatcattgatattttaagcctacaggaagtgcccatgggataaaaccaatctgctggctcacactaagttctgatcccatgattttggtctcattaataccgtgctataaataaagttagctaaatcttttgaaactgca

SEQ ID NO: 359091 - DNA, 908 bp, Homo Sapiens
  misc_feature (74)..(74): n is a, c, g, or t
  misc_feature (223)..(223): n is a, c, g, or t
  misc_feature (290)..(290): n is a, c, g, or t
  misc_feature (371)..(371): n is a, c, g, or t
  misc_feature (376)..(376): n is a, c, g, or t
  misc_feature (507)..(507): n is a, c, g, or t
  misc_feature (539)..(539): n is a, c, g, or t
  misc_feature (563)..(563): n is a, c, g, or t
  misc_feature (575)..(576): n is a, c, g, or t
  misc_feature (873)..(873): n is a, c, g, or t
acagactcacgtttagaagttatcaatcagcaggatagtaactttatcacagctcttgaattagcagtacgttntgggaaaacccttattatacaagagatggatggtgtagaacctgttctttatccattattgagacgagatctggttgctcaaggaccacgttatgtggtacaaataggtgacaaaattattgactacaatgaagaattccgcctctttntgtcaacaagaaacccaaatccttttattccaccggatgcagcttccattgttactgaggttaactntactacaacaagaagtggattacgagggcagctcttagctttaaccattcagcatgagaaacctgatttagaagaacagantacanaactattacaacaggaagaatgataagaaaatacagctagccaagctcgaagaatctcttctagagacacttgccacatctcaaggcaatatctgggaaaataaggatttgattgagtctttgattagacntgatcatgaacggatgctatctcccctgctgnagtgcacgacacgtccgtcatatnctgattgtcaannatatacatgacccgttagttggctgctttttgacttttcacgagtctacaacaaccagatctgaaatctgacagggatccagcctattagtatttcacattgatatgaatttatgccgtgccattaagtgatagtatgtccttgcattgttaagatgctctgactcttagaaagatgggatcgttagggcggctgtggaaatgtcgaaggtccttaacacatacgagaagtccgctggatatagaataattggccggcacctaagatggttccaactttaaaccttgttagagcctnttggggcgttttaaatcaagtgggaaagtcctttt

SEQ ID NO: 359092 - DNA, 618 bp, Homo Sapiens
  misc_feature (349)..(449): n is a, c, g, or t
ctctctccacactggctgagccccattctttgacaattcagcttttatacgttgttatagcttttcctcattcctttatgcagaatttcttatttatccatgtcctcatagcacctaatgtacctgtagacagtgtttctaaatggagttgcagacctctttgagaataaatatgaaatgtgtgaatcctcttcctagaaaaatctacattttactcttttgcaaataatttcagagaaagcctggattcctagaggcctgttccatagaccccagattaagaacccctggcttttgtttgtttgttttactttaaaaaattacttggctaggcacagtggctcatacnnnnnnnnnnnnnnnnnnnnnnnnnnnnnnnnnnnnnnnnnnnnnnnnnnnnnnnnnnnnnnnnnnnnnnnnnnnnnnnnnnnnnnnnnnnnnnnnnnnnncgagacagaacgagactctgtctcaaaacaaaaatccagggttctaggtagttaaaaaaagaagaaagaattatttcaactttattcatatttctttggctggggtgtagggggctgggggcgcatatttgcaaaaacttgaaactaattccattaaagtgacaaaaat

SEQ ID NO: 359093 - DNA, 1583 bp, Homo Sapiens
  misc_feature (89)..(89): n is a, c, g, or t
  misc_feature (948)..(988): n is a, c, g, or t
gcaaatctaaaaaaaattcagttgaacttctgagagttaacatatggtggattatgttgatttagaactcaaaatagatgtgtaaattntgggttcaaaatgtagatttgagtccagtttggatgtgtgattaattttcaaatcatctaaagtttaaaagtagtattcatgatttctggcttttgatttgtcatattcctggtcataaaacattaagaaaattatggctgttgctgtcattacatatctattaaatgtcatcaaatatgtagtagacaatgctgtaattaggtgaactctaaaactgcaacatctgacaaatagctttaaaaatacaatgattataagtatggaatcagtgaaaatatttagtttgtatttttatgtccaaacttttccattttagattcctttatagacacgtcagcctaaaaatcagcctattcgggtgttcttttgaatatctcctggcatttttgtatctaactttgttcaatctgggaatttcagttttcaatatccttgaaaatggcttaagtgataacttccgtttcagttaaaaggaagcccgaagttgtgtttgtgctgcccacaggacagtgggagttacagttcatatcaggatgaccctacatacccaggtcagattgacgggaccagaagggaacatcgacttctaatccagctttcttgtttaattatgacctaaatctaatttacttccactgaaccatccaagacctctggcaggcagggaaatgggcagtgatgcaaaaaaaggagactcttttggagcttttatgaatagttcatgggtgaggacagaactttttctactttcagacagactgcttgctagttttatgaattcagcacacgaattatgctgcgttgctcacattcaaaccaaaccaacgactatgtttaatgaactcagtattcaaattnnnnnnnnnnnnnnnnnnnnnnnnnnnnnnnnnnnnnnnnnttagatttaactcgtagttttatttgaaagtagaaaagaactctacaaaaacgggaagaatgtgtctttcttcccttcttgacttctaataggtgtcattgaaatgtaaaatctaagtatgaaattatgaaaggacattctttaattactgcccactcaacacatatttaatatgtgcccagattattctaaaatcttaaaaaaagatgcatatagtgaaattttttaaatggatatacttttaataaagttttataactcactgacaaaacatatttcaatagtatatgagtatgagatttcttatcaattatgagtgaaatattctatctgaatgcattggaaggcatttacagtatttgctttcaacagttactgagtatgacattttagcatgaaaatatatcaaacacatcatttgaaggacatatgtaatccttgactatgggttatgggtttttttgaatgtattcccttggttttcatatttggatagcatctaaattctttttgaacaatccttaatatgtaaggttcatttaaaattttaaagacagtttccaatgccatatattagttagaaaacccttttaag

SEQ ID NO: 359094 - DNA, 812 bp, Homo Sapiens
  misc_feature (25)..(25): n is a, c, g, or t
accgtgccccagtcaggctggcttnaccttttaaataaagtggaatttccaaaaacagatacttcatattctgggcatagcatcacacatacaaccattaccaatataataatattaaatgattacttaacagacatcctaataacgcaaacaccttttattcacatttgctgagtagcaattacagtgttttcttcattagttttccaacactggtaatgtaattatgatgcaattactaacaatataagtaccaatactttgaccaacaatagtcacaatggtttataacaactgaactcaaaggccacgttgatttttccacccacaacttgattctgatttttctagagtcattcataagaacaagaagtagtggatcctttcttcctccttagtatctgaaaattctgaactctgaagagaaattccatttggtttgtcattttcacctctgtgcatttcggcagctcttaacttttcttcaattctttactctattagagtgacttttctgcctgcttgcttgttcttcctcatccgtgtatccattatgtgtccttggtcctcatggctctgttcttttctcatttcagaatgtgtcatagattctgagcctagtctgaagtcctgggacttgttcttattgattgattgcttttgaggagctggagatttttctattttagttttttcctcagggcttaaaggaggggatcgctcctttatctcaggaggcagttcttgatacagtgtttcactagccacatgattagctggaaaataaccttcctgtccctttcctatgctgc

SEQ ID NO: 359095 - DNA, 981 bp, Homo Sapiens
  misc_feature (13)..(13): n is a, c, g, or t
  misc_feature (47)..(47): n is a, c, g, or t
  misc_feature (66)..(66): n is a, c, g, or t
  misc_feature (97)..(97): n is a, c, g, or t
  misc_feature (102)..(102): n is a, c, g, or t
  misc_feature (163)..(163): n is a, c, g, or t
aaataacgtgcanttgagcgattagccagtgacaagaatatgtttcntgcataagccaattaaagncgtttcaaagccaagtttaaatggtgtggtntgctntgtgcagttattcttcagagaagaatgagcagaaaggaaatgtgatagaggctactggaanaaaggtccatcccctggttgctcaaggatatccagtaccttatgaagtgtctctgtggctaggctctggcttgcaccattgtcaagaagaaacttgacaacttccaggtgattttcctgggctgccatatacaatggcgtgaaaccattctgagattgtgcattgacattggctccatttgtaaccaagacttttaccacctctgcttgcccagccaaagatgcgatgtgcaatgctgtgtttcctttctttgtagctgcatccacattggcttctctctgcagcagctcagaaacaaccttctacatggccttctttggaagcaaggtggagagcgttcaacccattctgattgcaaatgttgatgtcaactccatttttttatgtagtcgagggccttttcaaggtgtccagctcgagctgctcttaagtaacttgcattagcatcagactttttcttccgatcccgggaccgtttgcggtgtttcctttttttctcaggctcttcttcagcattgatttctaaatccctgtttttctttaattgtgaggctgcatgagccataatgcatttaaaaagatcctctcaagcacacacggcttccttgtaaaaggtgatatcctcaggcacctctaatcaggcttacagcagcattccaatcactagagagaaagctttgactagaagcaggaagatattcacaatgcaaagatgctggagaagctgaagcttttaaaaacccaaatgatggtgtccggacttcatcctacaccttcctctacctgaaccttacaggagagtgcagccattgtaatgc

SEQ ID NO: 359096 - DNA, 935 bp, Homo Sapiens
  misc_feature (899)..(899): n is a, c, g, or t
aatacaggtgggcccaactaaaggggctggggatgctagggccaacataaaagcagcaacctgtttataaaaagcaacactaccctctcacccgccttaaaggacagcagaaccctaggatccatggatgaggaagcttcaagacagaccttgtcctagtcacagacgaagtactaacaggcatatggtacataataaataatataaaataaagcatatacatttgtggctttaaaggactcaaacaagaaaaagattgataacttcaccttcacagtagattcagacttggggagtaatgatcagaagcgaggctggggctctcctggggaatgagaatccgtaagacctcagtctgtgcccaactttgctctgctctagaagtctgagcctccaacaaaaaaggcaggcacccaagccccaccaggcccattggatagttctcttcagggtgaatctgcagccaaatctggcccccaaagaactgcatcctaaaagtgaatccatgtggatcagatgccggaaggcgtccttccaagcgaggcaagacaatgctcccattcttctcagtgtgttcacggtcccaatgggcattaaaacctgaaaaccttgtgtactcaagtctttcttacagtatgtgttggatctgtgtacatataaaccttggcatacaaacacctagaactttactctcttgcagctagaacctttgtttccatgatgcttgaagttcaacctggtatttcccatcaaaagatatttaaaacaattctagtagagatgatgtcagtagctctagcatacagagagaacgtgcttacttgagctgagccaaccacagtggtgtgagaagcaaagaaggtccccagcctaggatggtgggagatcgacagcgtggntcgacgatatcccggaattccggaccgtaccagcct

SEQ ID NO: 359097 - DNA, 510 bp, Homo Sapiens
ctgggtcgggcccctactgctctccagtctcccagacaactgctccttctgggatgcctttcgcccagagggccggcgcagtgtgctacggacgattggggaatacctggaacaagatgaggagcagccaaccccatcaggctttgaacccactgtcaaccccagctctggtataagcaagatggagctgctggcctgctttagtgtgagtgctctgccagagggaaagctcctagaacagtgagaaggccctccaggggaattcctcgaatactcagaggcagtagtgtggggtagtagttgaagcacacagctctagagtcagacaggcttggattcatatcttggttctgtgaccagccttgaatgagttatttaacttctctgagcaatatttttctcgtctcatttataaactagggatgataatggtatatgagataatacatgctgtgggcttagcacagtgcatgatacacaaacatgcaataaatattaccttgttattct

SEQ ID NO: 359098 - DNA, 587 bp, Homo Sapiens
ctcaatcctgtctacaatgaggccatcatctttgacattcccccgggccacaatgagatcataggagtctgtcgtgtggggatcactgctgaaggcctgggcagggaccactggaacgagatgctggcatacccccggaagcccatcgcacactggcactccttggtggaggtaaagaaatccttcaaagagggaaaccctcggttgtgatttcattcacgtggatgctgcaagcagagagactgccacctggagttaggatggcagggccgagctgctagcttcgacagtgagagctcgtgcccatctccgaaaccacctccaacaccatgagatgtgcagccaaataacacaaatgggactcagcaatgttctctttgcacttgttcaaccgtctaaacagtgttgtgcagtcgcagtggcggcagcagcggcagccgtccgtcactccagagtcttacctgctcctgtgtaggtcaaggctgagacacttgtcatgtggtcagatctgtcttagtcttttgtgtctcccaaggtgatgtttttgtggtttttcactttttatgggtctgctggtaagaaaaggg

SEQ ID NO: 359099 - DNA, 902 bp, Homo Sapiens
ctacattgagtgctttctctggctccttgcaaagaaagatactttttgtaatggtccaggaaaggaacattgctttctttttgtctttcagcacatttgtattatgctcaccttgtctctgtctcactgtgacccctttacacttgagttcagagttcaagcattccaaatataaattggaatgttggcagcccagtggcttgaaggccaatgatgagcagtccaagaccccacagcgagatgagcaactcttaggaattcccacatcctagagtgaatgcaccaactaacagtatagaatgctgtccttttcaaagcgtcctaacagcaggattacctggtcaagtatggactttctttgaatctttcttttcacaaattggactgcctgtaataccaataacattgttgtatctaactaaataaatgactgcatatacacacataccctcaattctcttgcttccccattttctttttcatcccctgtctcaggacttttattttcagtgttgacctttggtttggccatatatcactgttataggaaatctcatgagaggaatggctagtgacccaactctccaaatgtctaagttagtagttacagctgattttttatgatgcataattggaatgtggagcctctgaggttgtgatagcttgtacatgaatttcaaatgtcattctaaagaatgaggggtgggagggatttatagttagaaacgacagtgcaggaaggggtattttcttgttgtcagggctggaatgaatcactgctgctcaagtcaaaggttcttgaatatccttagtttttgcatttcccctccttttcctttgacccttatttaattaattatgtatacacttatatatttatatacttttgctccggatcagcg

SEQ ID NO: 359100 - DNA, 349 bp, Homo Sapiens
tgttggaccctttggtttgggcccatatatccactgttaataggaaatccccatgaagaggaatggcctagtgaccccaactcctcccaaatgtcctaagttagtagttacagcctgattttttatgatgccataattggaatgtggagccctctgaggttgtgatagcttgtacatgaatttcaaatgtcattctaaagaatgaggggtgggagggatttatagttagaaacgacagtgcaggaaggggtattttcttgttgtcagggctggaatgaatcactgctgctcaagtcaaaggttcttgaatatccttagtttttgcatttcccctccttttcctttgacc

SEQ ID NO: 359101 - DNA, 567 bp, Homo Sapiens
  misc_feature (485)..(485): n is a, c, g, or t
cggacctcgcgacgtgtatccttcaaccgttcgtttttatcggaaggctctgaagatgcttatgttggatatatgacaataaggtttaaccctgatgacaaatctgcacaacaccacaatgcacaccactgcttagagattacagtaaattgtagccctattattgatcactgtatcatccgaagtacatgtacagttggttctgcagtatgtgttagtggtcaaggagcatgtcccaccatcaagcactgtaacatcagtgactgtgaaaatgttggactatatataacagatcatgcacagggaatatatgaggataatgaaatttccaataatgcgttagctgggacttgcgtagtgtcacattgatcatggcatgcgtactttgaagtgcatataccagaataggaagcagcttgagtaaagctatgtaacctacagtgttcatggaattcacatggcagactgaggaattatgtcatganaaggagaggcattcatgaggataaatctatcaacaactttcagtgattgatacctaatagtgcccccataagggattctttt

SEQ ID NO: 359102 - DNA, 1045 bp, Homo Sapiens
  misc_feature (618)..(618): n is a, c, g, or t
  misc_feature (662)..(662): n is a, c, g, or t
  misc_feature (754)..(754): n is a, c, g, or t
  misc_feature (852)..(852): n is a, c, g, or t
  misc_feature (860)..(860): n is a, c, g, or t
  misc_feature (894)..(894): n is a, c, g, or t
  misc_feature (937)..(938): n is a, c, g, or t
agacaggaagatatccaacacttggctcagcactggctggtttacaatgacaattgcactggagctctgtgacaggatcaatgtttatggcatggtgcccccagacttctgcagggatcccaatcacccttcagtaccttatcattattatgaaccttttggacctgatgaatgtacaatgtacctctcccatgagcgaggacgcaagggcagtcatcaccgctttatcacagagaaacgagtctttaagaactgggcacggacattcaatattcacttttttcaaccagactggaaaccagaatcacttgctataaatcatcctgagaataaacctgtgttctaaggaatgagcatgccagactgtaatcccaggtattcactgcatcagacaccgagacactgaacttcctgagccaccagacaggaaagggtagcagaaaacagcttcactcctcaggaagtaccatggacagacgcctaccaggggtgacaaagcagtgcagttggattgtaaggaaaaattccggaattaatgcatcctaatgaatgttgtccccttcaatggtgttaccttaggagctgaacattcaattcagttacaccactatgactaanaacagtttggatctcttagtattgcctttgaaactgcaacatangcaactcaacaatattagttgcattcctttatagacataccatgtcaaagaccgttttctatcaagtgggcatcattctgtctatacccttngcatctgtagactctgatgtgtgatttgtataagcagctgaactatgacatgactctgagagacatctcactgacttataagcaatgtccatatactnatggagtnttaggcatctgggccagatttatgatatgatatnggcattatcctctactcttaatctgatgatgttgaatggctannatagtacttgtacatgtcatgtagcatgcatgattgacctgaatgtggtgattctgacccaggtttagaactgccttgaaagatacgggcatttaatggcaatgtca

SEQ ID NO: 359103 - DNA, 669 bp, Homo Sapiens
gggttgcagattgggtgactgaccagacttgttggggtcctgggatgagttgccccgggctgcaaattaagagtacagctaagtgcgggggtggcggtggagggaacgaaaattgaacctgtctgcctgtgctgtgtcgtgtggctttatcagcccgaggaagggcaggtgtattctaatttgcacaaaggtgctgggtagactagtggcagctctcatgtgctgcacataactggaatcagtatgaatagaagaacttgctgtataaaggaatttcatggcaacaatgctggtaagggcaattagcctcgcttaagttgccttttttacacaccaaaactttttacatgaagggctggtttcacatgaatactatactgaaatctgtgctctcaagatctagcagtgaccagggctgcccggcgggggctctcctggcaaagtcaggaaggtttctcgtgctaatataacatagaaacacattagtgcactgggcctctctgaggtcagcatatttgtactcttggaatattggttttttcttcaagtacaacacgaacccccagttgggagtttaacaaataactgactaccactcactcatgcatctttatttcccaattcaggcaaagcactgtgctgggcttcagatataataggttggtagga

SEQ ID NO: 359104 - DNA, 321 bp, Homo Sapiens
  misc_feature (219)..(228): n is a, c, g, or t
ttataaagttattaatatgatcagggaaacctttgggacttctgacaggcatctggtgaagagacaattcaagccttagtgactatttagaatagccagtgatcactagctaattctcatatccatgcctttttgtcctgtttacagtcttaaaagaggtaaaacagcaaatatttttttaagggaactataaccttaggattcctgaaaagaatttcnnnnnnnnnntaaagacactgttgccaatgtgacccaaaacttaagaacatactaatggcatatatttgttacaattaaaaaataaatttacaacttaatcct

SEQ ID NO: 359105 - DNA, 1214 bp, Homo Sapiens
  misc_feature (215)..(247): n is a, c, g, or t
  misc_feature (468)..(502): n is a, c, g, or t
cgagagactgaacaaattgagaaaacttacttaaagcatgtttctgtatctctacaataattattaaattgttatcttatgagaaccttttattttgtacagagccatggtatcaattacagggttaatgtcagtcatcagatcttccttctcttcctaaggatgcttgtgttgcctcaatctatcaatctatctttcttgtttagggtagtttnnnnnnnnnnnnnnnnnnnnnnnnnnnnnnnnntcttagagacatggtctaaccatgttgtctaggatatagggcagtggctattcacagatgtgatgatagcacactggagcctcaaactcttaggctcaggcgatccttcaagcctcccggggagctgggaccacaggcacgtgccaccacacccagctctctttcttggtttttcatcatttcatgtatctatcaaagcccagttcacctcctcccccaannnnnnnnnnnnnnnnnnnnnnnnnnnnnnnnnnnattaagttgctgcaaattcaaaagcttagagagaataagcttcttggtggtgaaactacaactctcacgtgtgctccagttctaaaattaacctgtgcctggtctctgaagccctttcttgctctgtgcctttcagccacatccttaggtgctaacggccatgagctccgactctccaaagtgagctccactttgggtctgaggagcccctggcagagtccacgctgcctcaggtatcatgggcgtaatgatcacccaggctccgggagatctcatggatgattactgtatgagacagaggggacttcagtctttccagggccttggtggaatttttggctctggtgttttcgccagacaataaacttacactggaagctttgattcaccctccacagtactccagaaaggactgtcctataagttgtacactttaaaaggtcatgtagaggttgtagtagaatggcttttcaccctggtgactttggaagaaactcttgaatactgcctgcatccgggcaccatggccaggttgcctaggagtggggtccactgatgaaaaaaggtgttttgtacttacataagaaaaataaatttctgattgattttaaccgtcatctgcttatattttgggggcccctcctcattgctgctatccagcacacaaatttgtgcttgtgtctgatttgtttaataaagggaggcttatttt

SEQ ID NO: 359106 - DNA, 1360 bp, Homo Sapiens
  misc_feature (1306)..(1306): n is a, c, g, or t
aggactgatcaggtgttgtctgcctgatccaatcattatcaagttccataattcattattaagctctgaaattcaggacacatacatttatagagtgtgaggctgtgcatacgtacattcatcccttaatgttctcaaggaggcccaggatccccaaaatattataagcattgcagtcagatgatatagcactagcaaagcattcatccctttccatataacaggagggaggggaagaaggaagtttccatgtgcaggcaatacgtgagagcatgggcaagtgaggatttgtatgctccctgtagccagaggtgaaatattcaacgcttttattttttctcccgtcttcaatgacctcccatttggacccatagtttatttatagagagcacacactccctaattgtcagatggtttttttgggaaaactcttagatagtacagtgagttgtgaccctccaaaggatcacaagtacataaacagatacaaaatatttatgtggtattaaaatttcatggtgatggtgcaagggagagatgattaggaagaaaatgtcttaaacggctgtaattgagaaatactgatctagagtcatttcctgcttcttaaattgttcgttttctcttccctgggtattttctcatttccaaagacccagagtctcagagccaggttaagtggaagaaactttgagaggtttcttaatcaattccttctatctctcaaaccatgccagtaacttccttggtgaaaaaatctatactcctctcacagttcttcgggcatggaaattctatagcattctttggtataaccaacccactgaaccctccacaacatcttgaattccattcaactcgagctgaagtattctttttgagtttcagtatatcttttctagtgtcccacttttagaaaggtccaaagatgatatataataagtgaaaatacaattaatcagagctttatttgcatatccattaaatatctgaaggctattaccagttgtgcttcagcctcctttcccttgcaattctcccagggtggcatcctctacggagtcttgttgctccattgttgaccactgatgtaactcaacgtgaaaccttcccaaagctctccacatcactctctgttatggctgtgaccagcagtgaacatgaaaagaacttatttcatgccttctccaaactatattgtttctttgctaagtccagacctgctttttcttacatttatagggtttctattttaatcgccatggcaaaattcttttatcatactcaatcatttggggtttatctntcctgacttcttacctttaacatccctgttaaaaataacactgttgttgttttc

SEQ ID NO: 359107 - DNA, 315 bp, Homo Sapiens
aatacaaagcgttcatgttaatcatcagttggtacagcagacaggaatcaggactgtccctgagaaactgggaagtgtttgattacccacgtggccagataattcagaagaatcaacaagctacaaaaaccagataaaggatgtagatacaaaaagcaacaccaaacttttatagaagctcagcctcgctaagcatcaaagaaattcaaattaaagcaacaaaatgtttcttttcaccttttcaagatggcaaaaattattgtaaaaataatagccatcatttattgaactatatatggtagaacagactggtcc

SEQ ID NO: 359108 - DNA, 500 bp, Homo Sapiens
  misc_feature (269)..(269): n is a, c, g, or t
  misc_feature (342)..(342): n is a, c, g, or t
taataatgctgggtagtgaccttgtgattgttacagctccctttgatcaaagaaatatagctttcaggcataaacctggaagtctccctctgaatccagcagttgttttcattgatgcttgtcaggttgaagatgctttcagtgatgctctctatactctataaataagcaaatgtggcaggctttgctttctggatcccaggattaaaactaaccgtgaccactactccaaacaaaacacaatatgcctaggggcacggatgaacgtncagggagccccggccccaggctttgttgcgtgtttcctgctcctttccatctggtgtggaaacactgcccagngagaaaggaggaagctcactgtggacagtcttctttccttctgacagaccaggtcatctggcttccgagatcatcagagaagataaggctggctctttaagctgccataagttttccaggatgagaggggaacatccttactcccttgttagaccttt

SEQ ID NO: 359109 - DNA, 244 bp, Homo Sapiens
gctcggtccctctctccacactggtgtggaaacactgcccagggagaaaggaggaagctcactgtggacagtctcctttccttctgacagaccaggtcatctggcttccgagatcatcagagaagataagtctgtctctttcagctgccagtaagttttccaggatgagaggggaaaaagaaagcctccagtgacatcagatgctcttgccagtgtggagagacggggatcactctagaagtca

SEQ ID NO: 359110 - DNA, 415 bp, Homo Sapiens
  misc_feature (130)..(130): n is a, c, g, or t
cccccctgaaccatgtgaatgaggggccctcattagtgcttaaggtgcttgttgtattaatcctcacactcaggtaaggtgggtactatgataatccctggtttacagatgagaaaccagagatataggnaagttaagtatctcactcaagggtgatacagctaatagtggcacagccaggattcagacctggacgatcctaagtttccatttcctaatctgaaaacagagatagccatactcagctcctaaaagtactacccccccactgtaactaaatgattcaatgtatgtaaaatgccttatacataacaagtactagaaacgtttgttctgtgttctcttttccttctctttccttcccattcccatttctgattacagggaatttacataactttaaaagtgactattc

SEQ ID NO: 359111 - DNA, 605 bp, Homo Sapiens
  misc_feature (328)..(336): n is a, c, g, or t
ccgatggaactggttaagttctcctgagccccagatcgccctttggttgacagtccttcgtttagtgtgagctggtttttctcctaggaagttgttgtttaaggattctaattctagttcagagacacattctaaagggttttctttattgctttttctcccaaaattaatcttgattcggcttgtctgcgcatttgtgtgaggaattgaactgttgttttcataggtaaatgagagactgagttttctcaactccaaagagaaaggcatttgctcctcccagccaaaacgtgctcctgggtgactgggggccttgtgggagtgtctnnnnnnnnnttgacatcctgtgacatgcagcagccctatggggaaatccccaacaaaaattaattttaaaaatggcttgtccaggaatgcatataaggactgatcacccatcattttgagccctctcaaaggtaatagacctctggagagagaaactgagacatgtaacagggtggaaacaactcagtggtgacacatggtggggtcctgcccacaagcagcacacattgatccaccacacaaaaaccctaggccacagctcagttcctacttctaag

SEQ ID NO: 359112 - DNA, 834 bp, Homo Sapiens
tgcagtggaggaagaaccccactcaagttagaaggacagttttacccagagggacttctcgtcaatcactcattatcagcatggctccttctgctgagggcggagaagaggttcttactattgaagtcaaagaaaaggctaagcaataaatgtttgattatctttagatgtgatatagctagttcccaaagtgattgtacctaggattgtaacttaaattaacgaggggaaacgacatgctgggacccttgagaaacgaaaggcaaatccctagcttagtttctaggacttatctgagagtgtgatttcatgcagtggtaataagaagattattaaaagccatccctattctccgttttcattaactttatgcaattgctatatcttctaattgtatgtagtaagtttccttttcctttggttctttcctgatgatgtctcttccttccagttttattagcttgctcttggctgtgatgtgattcactaaccttttctcttaatttttattgtgtttaatttcttctttggcactctaaagcctggctaattgttctaggtttatgaatttcacctcttacatgtaaagggtataagattttaatgtaataggtcaaaaatcagattattttcattcaaatgaggatgatgagtcactgtaatatcaaaaaatccccagcagctgggactgaaggggaagcagagatcatgaagctttctgaatgagaaagtctgaatctttggaacaactcccctgaagaccaatggtggtccgcagaattagcaaactggcaaaatcacattgcaggaaccattttgggaaaatttggacca

SEQ ID NO: 359113 - DNA, 713 bp, Homo Sapiens
cggcacgagctcgtgccgaatcggcacgagggggggtggctcacggggcaagggcaaaggaggttgcccggctgtgcggctgaaagcacgttaccagacaatgagcatcttgcccatggagctatataaagagtttgcagagtatgtcaccaaccattatcggatgctgtgtgcagtcttggagcccgccctgaatgtcaaaggcaaggaggaggttgccagtgcactagttcacatcctgcagagtacaggcaaggccaaggacttcctttcagacatggccatgtctgaggtagaccggttcatggaacgggagcacctcatattccgcgagaacacgcttgccactaaagccatagaagagtatatgagactgattggtcagaaatacctcaaggatgccattggagaattcatccgtgctctgtatgaatctgaggaaaactgcgaggtagaccctatcaagtgcacaccatccagtttggcagagcaccaggccaacctgcgaatgtgctgtgagttggccctgtgcaaggtggtcaactcccactggtgagactgggaacgcttggcttgggcgccagggtcgggggaataatgtgtcatctggtcatctatcctgtcatcctcaaagaggactcgactccttttatggcaatgcattgctctaagcgctatagatcatccgcgcaaagatggcctgttcctgtcct

SEQ ID NO: 359114 - DNA, 654 bp, Homo Sapiens
ggcttggctgcctttggatgttggggttcctcagagctgtgctgatgtcgttgaggagccggggcagtggacccagcttcaggagggcttccttgctgagctggggcagcacctcccagagtagggcatgcagtgtggagagctctcggcccaagtcgatgtaaccctcaaagctactgctgttggttagcgtgtccagattggagatctcatacaaaaactgctgcatggaaccccattccagctccagaaactcattcatgaagcccagaaagtcctcctttgaggtaaacttggaaaagttggccaggttctggatgaccttggcaatgagggtgagggttcgtgaggtctgctcatctgggtactcctgcataagcccaaagagactgggcgacataatcgctgggcagaggaagcgcaggaagagtgaggcgctgataagcctgtctgcgatgtcctcccggcctcgctctgcgcagcgcagccgccacgaagcaaacacctccttcagctccctcgggaacacgcagtgggagttgaccaccttgcacagggccaactcacagcacattcgcaggttggcctggtgctctgccaaactggatgctgtgcacttgatagggtctacctcgcagttttcctcagattcat

SEQ ID NO: 359115 - DNA, 791 bp, Homo Sapiens
ctgcaggattcggcacgagggtaaatggccatacacagcagggtattttttattattattttcagggccctcagcgcgtttaccacaaagctgtgcatataggtggcaccatatatggcgtaccttgacctcgaagagaatctacatggacttttatggacctacgtacacaattttagaaatcataataaatgaatgctggagtcctcaagaccccttccagatttgatttgctaggaagactcacaggactcagcattttgtcatactcaatggctatgatttaccacaccgaaagaatccagagcaaactcagcaaaaggctcaaacccaagtccagaggaaaccaggcacaatctttgagaatcttaatgaaatcacacaggatgtgcttcattgaagctccatctgggacttaaaacaacacacgtgagatgtgttccaggaagtcgtcttgagcacccattgctcagagtttatattggacttgctttctagcacataccacaattgtagacctccagaagaacaggaggtgttcagcgtaagacaatttaggcacacggagctacttctcattactgggaacaatgggaaacttcccaaaacctaaagtacagactccagccaaggatgaaccttgcaagatcaaagaatagcagtctctggcctgctctgttctctttttcacagtaacttaaatggaaaaatgctgagttagcttaagtttctgtaacaaacattaagcaaataaaattttctataacagaaataagccatagctttgagat

SEQ ID NO: 359116 - DNA, 995 bp, Homo Sapiens
atcaggccaaatcggccgagctcgaattcgtcgagagcgggcgggacccggaacgcaggcggagcgcaagtctgtcagccagtcagtccgccagtccgccagcccagtacctctctctcctcggccctcgtaagctgtccgcggtctgtttggcccgaacggcggcggaggcgctgatcatggcgacattcatctcggtgcagctgaaaaagacctcagaggtggacctggccaagccgctggtgaagttcatccagcagacttacccaagcggcggggaagagcaggcccagtactgccgcgcggcggaggagctcagcaagctgcgccgcgccgcagtcggtcgtccgctggacaagcacgagggcgcgctcgagacgctcctgagatattatgatcagatttgttctattgaacccaaattcccattttctgaaaatcagatctgcttgacatttacctggaaggatgctttcgataaaggttcactttttggaggctctgtaaaactggctcttgcaagcttaggatatgaaaagagctgtgtgttgttcaattgtgcagccttagctagccaaattgcagcagaacagaacctggataatgatgaaggattgaaaatcgctgctaaacattaccagtttgctagtggtgccttcttacatattaaagagacggttttatctgccttaagtcgagagccgaccgtggacatatctccagtatactgtagggaacctcagtcttatcatgctggcacaggctcaagaaggtattttttaacagagcccccaagcagaatcaaacgtgaacgatggccatccattagctaaacatggggctaatcagggctgcgcgaatttatttggggacatgcttttcacacagagtgttcattaccccaaatattcccccccaaggggggggcgtccccgtgctttggggtgcccaaccaccggtatgtctagcccaggccctgtctgagagtacccacg

SEQ ID NO: 359117 - DNA, 499 bp, Homo Sapiens
  misc_feature (210)..(210): n is a, c, g, or t
tggcagatttaaattctctgaagtaaagttgaatcattatctctgtattaaataggttgacttctgagtgatgaaccttacttcttccaaggagctttcccacgtccctgctactacataacaaggtttatttaatatgtcttttcttaattttcccatagcacattttaatatttttatcagggatatgtaataataccattccataanttaaaatagaatatgagatataaaaggtaaaacaataatgatggtgtaagtattatagaaaacataatacatgtactatctttgaaaaattttagagctgtagtttgcacgatagaaaatatatatcaacatttcatcacatcagaaatatatgcaatgttagatctattacattgtgacattttaggaaaaaaagaactgggattttacttttgtattcctaagattgtggccagattttgaatgactaatatttatagaattgaattaaatgtatttctaaaagttt

SEQ ID NO: 359118 - DNA, 840 bp, Homo Sapiens
  misc_feature (561)..(561): n is a, c, g, or t
  misc_feature (603)..(603): n is a, c, g, or t
gagggagcctctgagcctactctagttcaagaggctacctgaaaaagaataaataagataaagggtcagcaacaacaaagaaaaagacaattacagaaaataagcaagatttggaaaggaagtataatggcacttttttcctcaaaggaagttcttgttttcacataaaatatgaaaagcagatcctgcaggagtaacccccttctttaagagccaagtatttgccagtgcttaaattacaccataccgttctaattatatataatcttttgttcttcagttttttgttttgtttcctttttgttattgttgccgaaggtgagtagttttgcatttctgatgacagccttggaaagtatatttgtaactccatgtctggtaatgccaacccaagtcgacatgggtcttaggacactgaccacctcacatgccataccctcagttaagcatgttaacatttataggaagcaaaaaatcaatttgggagaaaataaaatctcaactcaagcatagagcgtctggtactcaggccttctaaaaagcaggttaaaatgctctaanatgagaaagcctgtggttcacgtatttatagtgactcactgngacattgcaaatgagtaacactaattcgctgctctgaactctctgcaaacagcccactgtatatagcagacgagatgcaggtctctcctccctgcgttagaagtatgagagtcgctaaatgctttgagctttctttgctataagtatgcatttatatctattcatatactattgcatggtttatttaaaaagttgtgctacctttctccaaaaacttaagtagatgactggaaatgc

SEQ ID NO: 359119 - DNA, 694 bp, Homo Sapiens
  misc_feature (50)..(94): n is a, c, g, or t
  misc_feature (163)..(163): n is a, c, g, or t
  misc_feature (183)..(183): n is a, c, g, or t
gatttgccagtgcttaaattacaccataccgttctaattatatataatcnnnnnnnnnnnnnnnnnnnnnnnnnnnnnnnnnnnnnnnnnnnnnccgaaggtgagtagttttgcatttctgatgacagccttggaaagtatatttgctaactccatgtctggntaatgccaacccaaggtcgnacatgggtcttaggacactgaaccacctcacatgccataccctcagttaaggcatgttaacatttataggaggaaaaaaatcactttgggagaaaataaaattcaactcaagcataaagcttctgtttactcaggccttctaaaaagcaggttaaaatgctctaaaatgagaaagcctgtggtttcacttatttatataactcactgggacattgccaaatgagtaagcacttaattcgctgcttctgagacttctctgtcaaaacagccccactgataatattagacagaacgagaatgcaggggtctcttccctcccctggggtttaggaagctcatgaggagctcggcttaaaatgtctttgatgtctcttcctttgtctcaaaaagtaatgtcaattttatatactatttcaatattactatctgcatttgttttaatataaaaatgtttgctgcctacctttttctcccaaaaaaatctttaagtaaagatgatctgggaaaatgt

SEQ ID NO: 359120 - DNA, 972 bp, Homo Sapiens
  misc_feature (82)..(99): n is a, c, g, or t
  misc_feature (112)..(225): n is a, c, g, or t
  misc_feature (249)..(368): n is a, c, g, or t
  misc_feature (524)..(524): n is a, c, g, or t
  misc_feature (542)..(542): n is a, c, g, or t
  misc_feature (890)..(899): n is a, c, g, or t
caatgtcagggagtcaaaagggctgtagcacaggatggagtttgatttatccctcctcccccaacacctaggaactgaatcnnnnnnnnnnnnnnnnnngagatggagtctnnnnnnnnnnnnnnnnnnnnnnnnnnnnnnnnnnnnnnnnnnnnnnnnnnnnnnnnnnnnnnnnnnnnnnnnnnnnnnnnnnnnnnnnnnnnnnnnnnnnnnnnnnnnnnnnnnacacaccaccacacctggcccagnnnnnnnnnnnnnnnnnnnnnnnnnnnnnnnnnnnnnnnnnnnnnnnnnnnnnnnnnnnnnnnnnnnnnnnnnnnnnnnnnnnnnnnnnnnnnnnnnnnnnnnnnnnnnnnnnnnnnnnnataagccactgtgcccggcctgaatcttgtcttttgacaataccaaagaaatagggggtagctagagtaaagaacctagggcctggacctgggctggacagtgtatccctttaggtgtgggaactgggtatttccctggggtctgtagccctttgnctggtcattggcttttanggccagatgccactttttcccaccccttttaaagctacaagtctatcttctttcttgacccatttcaggagggagccctctcctttatcctgatataatatttaaaagacagaacaagaaagcatgtaaccctaatgataggagattatcgcatagaggtcagagactggaaactgaattttccctcgactttcactttgtgggtaaatcacccaattttaggctcttttctgcaaggatggccaaaattaatcatttttaaaaagtagattcatgcccactgcccttgggtgagggggaagaatacgggggttcccagaagcccccatgtgatccaagggtttgtannnnnnnnnnaagtttgttcatatttgtatgtacatgactatttaaagccaggggattatctttctataaatgtataactggc

SEQ ID NO: 359121 - DNA, 1165 bp, Homo Sapiens
  misc_feature (54)..(54): n is a, c, g, or t
  misc_feature (111)..(150): n is a, c, g, or t
  misc_feature (522)..(530): n is a, c, g, or t
aacagaaaggtaatgggcccccagaaatacccacagcatagtgacctcagaccntgatactcaccacaaaacttttaagatgctgattgggagccgcttgtggctgctggnnnnnnnnnnnnnnnnnnnnnnnnnnnnnnnnnnnnnnnnctctgctggggaccctggccacccccctgctgctgtcttggtgcctgtcacccacatggtctgccatcctaacacccagctctgctcagaaaacgtcctgcgtggaggagggatgatgcagaattctgaagtcgacttccctctggctcctggcgtgccctcgctcccttcctgagcccagctcgtgttgcgccggaggctgcgcggcccctgatttctgcatggtgtagaactttctccaatagtcacattggcaaagggagaactggggtgggcggggggtggggctggcagggaattagaatttctctctctcttttaatagttttattttgtctgtcctgtttgttcatttggatgttttaatttttnnnnnnnnnctttgctgatatttataattttgtatcataagaatgttttcctctacagtatttgtcatgccagtttataacagacagaatttttatttgtatagagtgcttactaatgttaaatagttcagagtatataacatttacattaaggactcatggtaggttttagggtaaggagtttaaaggaaataaatattcaaactgggtctcattgccaattttggtggaaatgagtttgtgtcatttcaattacaaagataaaagtatgccatataatttatttatatgaagatttatttttgtagtgtacatagtagtcatcaagtcttttgacagaagtatatttttaaagaatttatatgtgatgaatccataatgtctggaactttgctgagacatgagtgggcacagttttcattgtaaattacagcaaggaaagaaaatgtttaacagtgttaagagagtcagagcagagtggatattcatgcgattatgaagtgtttattagttaccattggcgacctagcatgcttctcatttcaaaccttggaaggtgaaaatgtacaaactctctaaataattaatgttcaaacactgatagaaattctaacatgaataaaaaataatataacttgttggtt

SEQ ID NO: 359122 - DNA, 388 bp, Homo Sapiens
  misc_feature (44)..(44): n is a, c, g, or t
gtcacaatggcaaagggagaactggggggctggcaggtaattanaatttctctccctctctcttttaatactttcattttgaatgtcttatttgttcatgtgtatgttttaacttaaaaaattctttctgatatttttaatttggtgtcataagaatgttttcctctacagtatttgtcataccagtttataaccacagaaatgcagagattttatttctattggaaacattactacagctatgttttacttttgaacagaatttttacttgtatagggtgcttactaatgttaaatagtttggagtatataacatttacattaaggactcatggtaggttaaaaccctaaagggtaaggggtttaaaggaaataaatattcaaactg

SEQ ID NO: 359123 - DNA, 848 bp, Homo Sapiens
atcaggccaaatcggccgagctcgaattcgtcgagagcggttcggatgctttggagtcatgagccgggagggcgcgggggcagctttggtagccgaggtgatcaaaggaaggaacattgcaatttttccatttcagatcgcctttgttttgccattctctacagcagaccaaagagtgcatcaaatgtacattatttcagcatagataatgaacttgaatatgagaacttctacgcagattttggaccactcaatctggcaatggtttacagatattgttgcaagatcaataagaaattaaagtccattacaatgttaaggaagaaaattgttcattttactggctctgatcagagaaaacaagcaaatgctgccttccttgttggatgctacatggttatatatttggggagaaccccagaagaagcatatagaatattaatctttggagagacatcctatattcctttcagagatgctgcctatggaagttgcaatttctacattacacttcttgactgttttcatgcagtaaagaaggcaatgcagtatggcttccttaatttcaactcatttaaccttgatgaatatgaacactatgaaaaagcagaaaatggagatttaaattggataataccagaccgatttattgccttctgtggacctcattcaagagccagacttgaaagtggttaccacaacattctcctgagacttatattcaatattttaagaatcacaatgttactaccattattcgtctgaatcaaaggatgtattgatgccaaacgctttacggatgcctggattcgatcaccctgatctttctttgaggatggcagaacccc

SEQ ID NO: 359124 - DNA, 535 bp, Homo Sapiens
gctctaaaggtttattttattactacaggtgaaaaacaagcatcctgtaattagcaatcaatagatttataattttcccaggccatcccatttataaccatacctttagattcttcaaaaacaaaaagttaaaatcttttaaagagcaatacttacttctcatattcaagttcattatctatgctgaaataatgtacatttgatgcactctttggtctgctgtagagaatggcaaaacaaaggcgatctgaaatagaaaaattgcaatgttccttcctggaggttacaaaaaacgtttcatatatcatgacacaactcttttcagatgaagtcaatttttcatttttttcatgcacgtttcagatggtaggagtggtaatgggtaattacaaaatattctggctatttgggtgggaataatcaatgagcacatttttaaaagagaaactgcctttaaccgtaagtttcaaaagtggtgatttttcatgtagtgatatgacttctaaacaaacctatttttgtaaaagtttagctc

SEQ ID NO: 359125 - DNA, 698 bp, Homo Sapiens
  misc_feature (36)..(36): n is a, c, g, or t
  misc_feature (277)..(285): n is a, c, g, or t
  misc_feature (478)..(500): n is a, c, g, or t
  misc_feature (510)..(643): n is a, c, g, or t
aggatccgggggggtaaagtaagaggaaacccgggncacctatattaacccctacctgaaacatgccttaaaaacccgtggccctaaaaacctgatttggaggcaaagtcacctgcccgagcctcctgaggcctgcattggacacctgcctactgacctcaccctctcccttcccccctggaataagggcttcagcttccccctatgctgtgaaagacacccatttgtaagcactttgaacataagcactgtgtgacagcgctggatatcatgcttnnnnnnnnncctctccctgactcccatcccccataataatgagttttgtttggaattgtaataagtaatgaactgcatggtttagaaaattataaatatttgatcagctgtcctctctgaaaaaaattgcacccctttttcttttttaaaattttgttgcatcttcgtagtaatgtaattgtattttatgcctgcttttttnnnnnnnnnnnnnnnnnnnnnnntggagacatnnnnnnnnnnnnnnnnnnnnnnnnnnnnnnnnnnnnnnnnnnnnnnnnnnnnnnnnnnnnnnnnnnnnnnnnnnnnnnnnnnnnnnnnnnnnnnnnnnnnnnnnnnnnnnnnnnnnnnnnnnnnnnnnnnnnnntttgggcgcccccccccccccaaaaaattttttcaaacctttttttggggcgggg

SEQ ID NO: 359126 - DNA, 1295 bp, Homo Sapiens
  misc_feature (1248)..(1248): n is a, c, g, or t
cacccactagaaagccacccgggttctccttcatccccaacgctcctcacctagcccctgtcctgagggtgcccctaaccctggagccagctttaaaggggcaggccccttctcctgccccagccccagccccacccaccgggcccacattctccgtcttccaggtccagcgctcccgtcacagaactcccccgcaccttgtctcgctcgctccgtcccctccttcccagccacagctagaggtcccgggcgcacctgcagagccggaggcttgctggggcatgcgctccatgaaggctctgcagaaggccctgagccgggctggcagtcactgcgggcgaggaggctggggtcacccgagccggagccccctccttggcgggggcgtccggcaccacctcagtgaggccgcggcgcagggcagagagacgccacacagccaccagccgcagcaccaggatcatgattcatcagaaagtggcatgctgtcccgacctgggtgattggctcttttacactattgctgaaggacaggaacgaatccctatccacaagttcaccactgcactaaaggccactggactgcagaccatcagatcctcggctccgagactgcatgagcgagatgcaaccgcgtggtccaagagtccagtagtggtggcctcttggaccgagatctcttccgaaagtgttgcagtatctcaacaaaatggctgggaatgaatacatgggtttcagcaatgccactgctttcctaagggggtggacatgatggctgcccttgatctctacttccagctgtgttctgtggaggtcacttgtgaatcaggcagtgtcatggcagccaccctcgccaacggtgggatctgccccatcacaggcgagagtgtgctgagtgctgaagcagtgcgcaacaccctcagcctcatgcattcctgcggcatgtatgacttctctggccagtttgccttccacgtgggcctgccagccaagtcagctgtatcaggagccatcctcctggtggtacccaatgtcatgggaatgatgtgcctgtcacccccattggacaagctggggaacagccatagggggaccagcttctgccagaagttggtgtctctctttcaatttccacaactatggacaaccttgagggcactgtggctcgggaagtttaggacccacgggcgttgaaaggggggcagaaatttcgggaaacaagactgtgggtcaacctgtttattttgntgcctattagttggcgatgttttcaggtttttcggaaggttttgttt

SEQ ID NO: 359127 - DNA, 799 bp, Homo Sapiens
  misc_feature (433)..(453): n is a, c, g, or t
  misc_feature (667)..(690): n is a, c, g, or t
actgggcattggaaaaagggaggtaaagaaaaaaagggaccgtttaccaaaaaaccagtgtcctactccttcccccttgtgaagtgtttaatccatggcctaatgaaaaaaagagaaggactcctgggttttgtgttgcccatgttaagcatggagagggatgcttgacagcatgcctaattgaagccagagcaagtatgtccttcatcaggtaatcaggaactcttcagttgaagctgaggaactaactgattagttgttgatcataatataattggttacaaagtggaagtgccagctggcttaagtacccaaagaaaagaatgcagcagcctaacttagtgttaccatatgttactgaatttgaaactgaccttttttcccaccctacttcacacacctaaaactcttttcttgtcagaccaaagagcgnnnnnnnnnnnnnnnnnnnnncactttaccaatctgtcactcaggtacaattttgtggtgagatttttgtctgttctctttgtattgctcttaagagtcctttctcagcatattattctgccattgcctctgtcttccttggggcacctcagctctggatgctacccctgggatatctactgctgttatgtgaatgataggaggtaagtgaccattatagtaagggctctttgtnnnnnnnnnnnnnnnnnnnnnnnnggatgtatacattttatagtctggccatcagtttgatatcctgctgtcaagtatgtttctcaatctgtatttatccatcccatcaataaatgttaatggtaaaacactc

SEQ ID NO: 359128 - DNA, 3046 bp, Homo Sapiens
  misc_feature (481)..(551): n is a, c, g, or t
  misc_feature (2238)..(2257): n is a, c, g, or t
  misc_feature (3000)..(3000): n is a, c, g, or t
tggaccggtccggaatttccgggatcggagccgcgtctgactgaggcgggcagcaagcggccccctcgctccctccctccctcctccgcgccctccccgccgccaccagccgtcaaacgccaaccgccgctcctggggaggagccgcggctcgcggggccggagccaggcctgcgtccggacatcagccggagccggagcgagagccggggcctcggcgtccccgccctctccccgcctcggccagcgtccgccgggcccccgcgcgtcgcgccatggactcggacgagggctacaactacgagttcgacgaggacgaggagtgcagtgaggaggacagcggcgccgaggaggaggaggacgaagacgacgacgagccggacgatgataccctggatctgggcgaggtggagctggtggagcccgggctgggcgtcggcggggagcgggacggactgctgtgcggggagacgggcggtggnnnnnnnnnnnnnnnnnnnnnnnnnnnnnnnnnnnnnnnnnnnnnnnnnnnnnnnnnnnnnnnnnnnnnnnatgagcaggaggaggattaccgctacgaggtgctcacggccgagcagattctacaacacatggtgggaatgtatccggggaggtcaacgaggtcatccagaatccagcaactatcacaagaatactccttacccacttcaattgggataaagagaagctaatggaaagggactttgatggaaacctggagaagctctttgctgagtgtcatgtaattaatccaagtaaaaagtctcgaacacgccagatgaatacaaggtcatcagcacaggatatgccttgtcagatctgctacttgaactaccctaactcgtatttcactggccttgaatgtggacataagttttgtatgcagtgctggagtgaatatttaactaccaaaataatggaagaaggcatgggtcagactatttcgtgtcctgctcatggttgtgatatcttagtggatgacaacacagttatgcgcctgatcacagattcaaaagttaaattaaagtatcagcatttaataacaaatagctttgtagagtgcaatcgactgttaaagtggtgtcctgccccagattgccaccatgttgttaaagtccaatatcctgatgctaaacctgttcgctgcaaatgtgggcgccaattttgctttaactgtggagaaaattggcatgatcctgttaaatgtaagtggttaaagaaatggattaaaaagtgtgatgatgacagtgaaacctccaattggattgcagccaacacaaaggaatgtcccaaatgccatgtcacaattgagaaggatggtggttgtaatcacatggtctgtcgtaaccagaattgtaaagcagagttttgctgggtgtgtcttggcccatgggaaccacatggatctgcctggtacaactgtaaccgctataatgaggatgatgcaaaggcagcaagagatgcacaggagcgatctagggcagccctgcagaggtacctgttctactgtaatcgctatatgaaccacatgcagagcctgcgctttgagcacaaactatatgctcaggtgaaacagaaaatggaggagatgcagcagcacaacatgtcctggattgaggtgcagttcctgaagaaggcagttgatgtcctctgccagtgtcgtgccacactcatgtacacttatgtcttcgctttctacctcaaaaagaataaccagtccattatctttgagaataaccaagcagatctagagaatgccacagaggtgctctcgggctaccttgaacgagatatttcccaagattctctgcaggatataaagcagaaagtacaagacaagtacagatactgtgagagtcgacgaagggttttgttacagcatgtgcatgaaggctatgaaaaagatctgtgggagtacattgaggactgagaatggccctgcataaaatgaactctgaaaactttaccatctagagtgctcatgcaattaaaacaaaacaaacacaaacaaggaggcactaagcctattctgacaccactggtctgtagtaccagaattgttttgttaatggaaagtttaagtaaattatattgtaataaaaaggtagataaaccattgtacaacagtattctaggccgccaacaaaagtgtgacagacacactaaaagccctccaactttaacttgtaacgtagcttcattctcaaagctgactccnnnnnnnnnnnnnnnnnnnncctgagtgtagtacagttaaaatttcaaacagctccttgacactgcttttcatgttcaaaccagccattttgttgtactttggtaaaggacctcttccccttcctcccctacacatacagatacacccacacacagactgactctctttctctcataccccaaggtcatgagtgaatgatgcttagttccttgtaaagaaaatcttgggatggggaaaggggtaggcagcaagaggattcaacaaacgaaaaacataaaaactttgtatatgacttttaaaacaagaggacaacacagtatttttcaaaattgtatatagcgcatatgcatggacaaagcaagcgtggcacgtgtttgcataatgtttaattacaaaaaaatatttattctttaaaaatcttcaagattatgtctatttgctgtgcattttctttcagtttgcttatctttcccgggttggggttgggataaaggtgtgtcggtttagcacctctggaagacctatctagagctctttcactttcctgaggttattttgccccttctggtgttggtatgtctgttgccggccatgggcttcatgccttgaattcctgctcttgatcagggacaagggaggtcaagctctgactaatgccatgacctggatttaagggggtacagcagggagttttgtttgctacagcttcatggaatttaacctggtcccaacctaaatccccctccatgggcatccaggccnctacccaagcctttgtgtggcccatggttatggcacacagctgttt

SEQ ID NO: 359129 - DNA, 737 bp, Homo Sapiens
  misc_feature (54)..(288): n is a, c, g, or t
agcagccacaggtgcgcaactgttggaaggcgaatcggtccggcccgatatacnnnnnnnnnnnnnnnnnnnnnnnnnnnnnnnnnnnnnnnnnnnnnnnnnnnnnnnnnnnnnnnnnnnnnnnnnnnnnnnnnnnnnnnnnnnnnnnnnnnnnnnnnnnnnnnnnnnnnnnnnnnnnnnnnnnnnnnnnnnnnnnnnnnnnnnnnnnnnnnnnnnnnnnnnnnnnnnnnnnnnnnnnnnnnnnnnnnnnnnnnnnnnnnnnnnnnnnnnnnnnnnnnnnnnnnnnnnaaagataaatacatatacaatcaaaccataaagtaattaaaaaataagataaactttccagatcacaaaagacatgtaccattgggaatgaacatgcaaaaaatttcaatttattggctagaatttccataagttgggaacaggctctgtagatattcagtctactgtatctttcacttaactatataataaatattctttcacatgaataaaatatttagcaaaaatttcctctagagtataaaaaaggttataaaattataaacaacctagatattatccataaatagtttaataaattaagtatttctctgaaatataattttgtacaaccattataaaaactatatacagtcataatatattttctgtggttacagaaaagaatgcatagaatgatcctgataatataaaattacacattaatatttatatatgtgaaatacaat

SEQ ID NO: 359130 - DNA, 243 bp, Homo Sapiens
  misc_feature (136)..(146): n is a, c, g, or t
atacaggggaatattttattcaaggtaaaattctaaataaaatataattgttttttatcttttctacagcaaatttataattttaagattccttttcttgtttatcagcagttgttattacatccttgtggcacannnnnnnnnnnaattttgtaaaggtgaaaaaagcttttatgagctcatgtagcaatcagattttcctgtggattgataataaatgaatatgatatatagttaaaaaaa

SEQ ID NO: 359131 - DNA, 768 bp, Homo Sapiens
  misc_feature (192)..(486): n is a, c, g, or t
aaataagggatggtctatgaggcatacagtagatttgatgtgatccttttctccctcccttccataatggatcgtggtctgtgtgactgaacccacacagagtgtcatgggtgacagtttctggttgaagtagctccacgcctggcttctgtggacagcagattcttttccttctcacaaggggctcatttnnnnnnnnnnnnnnnnnnnnnnnnnnnnnnnnnnnnnnnnnnnnnnnnnnnnnnnnnnnnnnnnnnnnnnnnnnnnnnnnnnnnnnnnnnnnnnnnnnnnnnnnnnnnnnnnnnnnnnnnnnnnnnnnnnnnnnnnnnnnnnnnnnnnnnnnnnnnnnnnnnnnnnnnnnnnnnnnnnnnnnnnnnnnnnnnnnnnnnnnnnnnnnnnnnnnnnnnnnnnnnnnnnnnnnnnnnnnnnnnnnnnnnnnnnnnnnnnnnnnnnnnnnnnnnnnnnnnnnnnnnnnnnnnnnnnnnnggtattatacctaagttgtatttgcaggcaaatgagatggagccctctctgtaaagaagagtcatttgtgcaagtagacggggtctgtgggtgcaggccctggaggggcacacaattgcctggaggcttctgtgagatcgggagagggaggagaggcagtctcttgacaaaataaagtatttttattcatttgtatttattaaatgaaaaaacaatcccatggtgtccctgttgtgtggtggaacctaatgactgttgaaataaagttctgtgttttccctg

SEQ ID NO: 359132 - DNA, 933 bp, Homo Sapiens
cggtccggaattctcgggatgcgggacagtggaagactggctgaggctggagtttggagtttgacccgcttggaggctctctcagcagcgggcatataggaggaagggtcactgctgtctccggaagctcttggctgcaaagagagaggatcccgggtatctccctccttacaaccaccgccacctcctagtgccttagaagccactgacagcccccagggcaggtgagccctgcatctggaataagtccacagtgaagaccaaaagagacacagtgaaaggctacttcctggctggaggggacatggtgtggtggccagtgggtgcatccttgtttgccagcaatgttggaagtggacatttcattggcctggcagggtcaggtgctgctacgggcatttctgtatcagcttatgaacttaatggcttgttttctgtgctgatgttggcctggatcttcctacccatctacattgctggtcaggtcaccacgatgccagaatacctacggaagcgcttcggtggcatcagaatccccatcatcctggctgtactctacctatttatctacatcttcaccaagatctcggtagacatgtatgcaggtgccatcttcatccagcagtctttgcacctggatctgtacctggccatagttgggctactggccatcactgctgtatacacggttgctggtggcctggctgctgtgatctacacggatgccctgcagacgctgatcatgcttataggagcgctcacctttgatgggctacaaggttcgcccgcgttggtgggatggaaggccgcacgggaaagtctcttggccctggtagacacccgagtgagacaccagtgcggcttgcccggaaatgcttccatttccagaccgtgcctcttttccccggcggggcccatgaagtcaccatcctg

SEQ ID NO: 359133 - DNA, 492 bp, Homo Sapiens
ccgttgtcagtggatctcggaaaatatggaaggcatcttcccggggcagcccgcagctgctgttctcactccggttgcgtagccagggccaagaagtacttctccttcagtccttccatcccaccaaccgcggcgaaactgtagcccatcaaggtgagcgctcctataagcatgatcagcgtctgcagggcatccgtgtagatcacagcagccaggccaccagcaaccgtgtatacagcagtgatggccagtagcccaactatggccaggtacagatccaggtgcaaagactgctggatgaagatggcacctgcatacttgtctacctgtgaagaaaggaggttgatggatgaacaaatgaacgaatgaatgaatgagtggacatttgcagcacaggttccctgggatcagggcctagcctagatgctgacaaacacagaagagtcatacgtcatcccttgttaatcccctgcatcccaggagtaccgagct

SEQ ID NO: 359134 - DNA, 699 bp, Homo Sapiens
  misc_feature (38)..(38): n is a, c, g, or t
  misc_feature (58)..(58): n is a, c, g, or t
  misc_feature (72)..(72): n is a, c, g, or t
  misc_feature (74)..(74): n is a, c, g, or t
  misc_feature (130)..(130): n is a, c, g, or t
  misc_feature (214)..(214): n is a, c, g, or t
aagaccagtcaagcacagtcagggcaaggtctgtctanctggggcctcccagaattancttccacatagatnancattgtttattaaagaataagtatttctagcttaaatcttgcgtgtatataatatntattaaatctcaatgggaaccccagaaattgttttgaaattagatctaccaaagatgttttctcaaggaggagtattttatttntgaattgtttagaattgctggaacacagtgataatagtagggcaaatcatagccaatttgttattgttattaaattctctgtagacaatgcacactcttgtctgtactggggaagactgcaccgtctgctccactctttgtacactatgtgtcagctttgacttaaccatttttactacatttctgtattagattccaagttccaaagagaaggtatattgtatactgtcttcttccctaaccttatatccttttgctccacattttattacagccatgatgacccattttacgtcaaattgatcagatcatgaaatatccaaatatttggtgaaaaattatcctaggtgtttctgtgagagtatttttggatgaaattaaccttttaatcagtagagaaaattgccctccataatgtgtgcgggcctcatccaatcagttgaagaccccaaaagaataaaaatattgactgtcacttccctgag

SEQ ID NO: 359135 - DNA, 859 bp, Homo Sapiens
  misc_feature (179)..(191): n is a, c, g, or t
accatccaccagacagaccacctgactccttctcaactctgtaacatggacgcaacctcaacccagcgcagttacaacttcactatcagcggaaggggagaaaaaccgattcaaatcaacttgtacatggaaacagcaagcattatggtcaaacagcaaaggccataaccttttgggannnnnnnnnnnnnaaaatactttagggactgttgtaatttcctcatatggtgctggaaaatggttgggctttgtaacatttgaagtgtttccatggtagcgtgagcattaggtgacgtggctagcggaggactacccttgctcactgacttcctgttgtaacacactttccttacggagcctggctgtttcacagtatttcatgaatttacccacacaggtgtgatcctccttgagcattgaggaggcacatggagaactaaatcttttgtagtagctgagatctgcaatatataacgggacagtcaaagggcaatgtttttctgtaacatattggaaaaagaaaatgcagttatattcctttttttatttggtcctttagtttgttttggttcagcagtcagcagttaagtatataacatggcccgcaaggacaatgaatccactcacattgcagaacaattccgaaaatggcaaactactactactactgttcagttttttaaaagttttgatgctgcacttacatttaaaaaaacaacaacaacattttttcaacaatttcaacaatgacacccagcacctcccccgcaaaccgattcgtcagtgttggaccacgggatccaagctttgtaaatatccctcaacagacacagtcctggtacctgagataaaagttgca

SEQ ID NO: 359136 - DNA, 841 bp, Homo Sapiens
tttaaactaaatttacccttgggatctttctataagggccaccaaatccagatcccacagttactggatgttccaaatgaccatgtgagatggcgagttgcaaaaataacctcataatccaaaaattacctccgcctcagttggaggattgttttcaaatgacttttatttgtacccaaaactaaattggaaaatttgcttggctgacactgtaggaaagttaatttctttttttctttgggagggcttgacttgagaaaaagaaatttagttaagtttggtggtgaaattttatatacagtattttcatttggtgaagatatgaaggccaggactaatagctcttctgcctaggatccctaatatttcacactaggcctgatagtcgctcctacagagatgacatttttcttttagaatgcagtaacacctaccaggcctctgtaggaggcaggctacatacaataaggaagtgtttttatgaggagaaaaatgatgctcagagacaaagcatcaaagtcttattttctgaagtgattctaacatggaagaatttggaaaagataatcccaagactcagtccattgtgagtctcccattggtcccgcttctcacttggtcaccaagttctgcacactatgagacatatacttctgaaacagccagcttcccaatcccaaagatacctggtactctcaaaagcagggcatgataggctagggcagaaattggttcctggataaaacaggaccctactcacaaaaagcgataataaatacattaagaaagactaccaaacaaacctgaaatggttttagaaatggaggtgatagcttctccc

SEQ ID NO: 359137 - DNA, 689 bp, Homo Sapiens
  misc_feature (71)..(93): n is a, c, g, or t
  misc_feature (95)..(450): n is a, c, g, or t
tgggaggattgcttgagcccagtagttcaagaccaaactgggaaacatagtgggaccccatctttgcaagnnnnnnnnnnnnnnnnnnnnnnncnnnnnnnnnnnnnnnnnnnnnnnnnnnnnnnnnnnnnnnnnnnnnnnnnnnnnnnnnnnnnnnnnnnnnnnnnnnnnnnnnnnnnnnnnnnnnnnnnnnnnnnnnnnnnnnnnnnnnnnnnnnnnnnnnnnnnnnnnnnnnnnnnnnnnnnnnnnnnnnnnnnnnnnnnnnnnnnnnnnnnnnnnnnnnnnnnnnnnnnnnnnnnnnnnnnnnnnnnnnnnnnnnnnnnnnnnnnnnnnnnnnnnnnnnnnnnnnnnnnnnnnnnnnnnnnnnnnnnnnnnnnnnnnnnnnnnnnnnnnnnnnnnnnnnnnnnnnnnnnnnnnnnnnnnnnnnnnnnnnnnnnnnnnnnnnnnnnncctaggtgatagagctaataattacgttatagaagaggcattaacttcaagataactaaatgaaagcctggtattaacaaattttaaaaaagtacaaataaataatgatctaagctacccagattagtttctggaaaatttgtttaaccaagacaatctccaaggaaagtcaggctaataattgtgtctcagccgttactctgcttttaggagggaaggtacaggatggagtgagaaag

SEQ ID NO: 359138 - DNA, 1487 bp, Homo Sapiens
  misc_feature (402)..(402): n is a, c, g, or t
  misc_feature (533)..(541): n is a, c, g, or t
aaaaaagaaacactcaaatccagctgctttgtcaattgtcagttctgactccttttgctgtggccttatccgtactatattgtgggtagagtaacttctcagaaaaaaaggaaatgtctgtattggttggatgaaactccaccagagcacagcttagctggggcgagatgcatgtgaaggcaggcagtgccaagattccgcttcctttgtttgccaaatactagaaacacaaggaaatgcaagttacgctaaatggcagtaatactacccaactgcctttctgttcattttgtttgaaggaaattgttttgaccaaacagaaaattacttggaatggtgtggtttacagtctacctagaaaatagatgggacaatatttttcaactgtatgagcacgtagantaaccgagagaatgtggccacctgtgttcaagaagccactgatactggtttttgttaaacattggaagttcaggcaatggaataaatgtaggaacatacagaatgttgcactaatttggtagcctgggaannnnnnnnnattgtgcagtatgtatttaaattttgtctatgttaattaccagcatttacctttatttaaatgatggtaaggtggaatattgaataaaattaggttttgtgttttgttctttgtagtctgataaaatctccacctggtcattcattgtgtgtgacttgatacccgttaacttgccccttagtatcagctgttacttgacacaaatgtgtgtgttattcagaggttttcagtctggacactccataggtgagtgtcgtgtcttcgtgagacagcacagttgtctcatgttgtgcatagttcatgtttcctcaccacccagtcctttctcctgctcatcaaaatcagcatacacattttttgactgtacacactataaatggcatcaaatttggataatttttcttaattatgacatggcaaggtaatgtgagtcctgccagtattctggtggataaggtcttctgagtatttggttgcttgtcacaacattctccaagcagtgatatttctaaagaggagatacatgttgaaaacggttttaatttacacttccatttcctgattacatttggaaatactttgtgtaaaccatcccccttccacctccatttgtctgttgaaagattttaagttggaaacagttcctgtctgaaaactcttctgagaaccacaaaccttgtgtatggattcggcatggagccctcagctggcggctctgggtgctgacggccgctggagaggtgggctcccctcgtgcactttattgcctgggcagttttgcttgatcttttgtgactttgagccttttaagtagtttgaatgataagacttaaaatgtttcataattatgttttatgtaacagactttgacattatttaaacgagcatgtgtaatgtaacttttctctttgaatcatataaaacttgattttacattgaaaaaaaa

SEQ ID NO: 359139 - DNA, 717 bp, Homo Sapiens
  misc_feature (22)..(22): n is a, c, g, or t
  misc_feature (25)..(25): n is a, c, g, or t
  misc_feature (55)..(55): n is a, c, g, or t
ccaccaacccaggccaataaanctnccttttagagtagccagaattctgaatccntatagcaacatatgtggcaaaagtgatggatgttactaccatggttgtcttatattatgtaaggccttctcactaaatagtcttcttctcctgtgggcctgaagaggcaacaaccatagtatgaactacctattgagaggttcatgtagcaagaaacttcaggcagtcttcaggatcagagggcctaggtcctacacgagcaaggaactgaattctactaataacctaagttagcttggaaataggtccttccctactctgacctccacatgaaaactcatcccagctggcactgtgagttcattatggagagatcgtgaaggagaaaacccatctaagctgggtccagacttctgatccacagatactgtaacataacaaatgttatcttacatttatcttgctactaaatttgcaatagcctaaatgcagcaaagaaagctaatgcaacttttacctgcatgggtaaaatactgtacattaatataatctttattaataattcaattgaaaaatgttaaggactttgattctttactcagattattctatttcttaaaacagttaattatttcaaaactaaattagtatgcattcttaaaattatttttctcaagtcagagaaaagaatccaaaaaaacaaagtcgagacgagtaaactc

SEQ ID NO: 359140 - DNA, 701 bp, Homo Sapiens
  misc_feature (210)..(221): n is a, c, g, or t
agaaagcgtggcagaactgggctacagtgcaaataacgttggatactgagaagtcggaaaagaagccaggcatggtgttgggccgcctgtaattccaagcggttagggaggcccgaggcagaaaaatcggtatgaaactgggaggcatagtaaaccaagatcgcggcatttcactacagactggatgacaagagcaagaattcgtctttnnnnnnnnnnnngaaagaacttcacaaaaaggattatgtactgcaacgcattgggcatcttgttaaacgtgtctaactaatatttaaaactgataattattctattccttagatgtatttgaatttatttaatcagaggataattgtttaaatgtaagaatgcagttccatctattctgtaagctagagatcacacatcaacaacatttactggtgaaatttcgaatgaagtgcttcatttccacaagccagtgttctgactataagagaaaaattgtgtagttgacgtttttggcatgtggaagccactggaaaattatagataatgaaggatgttatttttatcataaaaggagaagggtaattaaggacttcagtgtaaacttagctaaatgaagaaaatagtcaggaatacaaaaatattaaagagtttaaccatcaaaacttttcagattaagattatttcattctagtacaataacaaaaaatgca

SEQ ID NO: 359141 - DNA, 714 bp, Homo Sapiens
aagccaacagaaccacggaacccaaacatgggacaaaggccatttcccccccacaaaatgtaaacaataaaacaagcgtactcttggagctcacaaaaaatttttcaatgacttcctgtcttaaaaagagacttgcttaagcccatatctaggaagtcaataaagtgtaaatgtttcaggatccaaaccaaaaagagcaaaaatttatagtattttaattcattaaatccgcctcccacataatacaatacttccaactcgctaattagcgaaattccaagattctagaaattgatgaaaatgttcacagtgaaattcaatctgtttctttatgaaaattacttgagttattattcaccacagaataatagaaactgacattcagttggctctaccaagagttcacaaacacccagaaacgactccatcttccctctaacatgagggtggattgctcatgatgtgaggtacagcatctgccctcaaaagtaaaacaaataatcataccacatacccacctactttttgcctataaaaatagttttccagagagttgacttttaaagacagtagacataataaaagatgtctgctaattttctctcatctcatcgttttaaaatcctcagcctgaacagcttctctcccaggttacactgcttgtaattagtcacaaatatcttcaagacagataatctcacaagaagcccctgc

SEQ ID NO: 359142 - DNA, 407 bp, Homo Sapiens
  misc_feature (303)..(303): n is a, c, g, or t
cagaagttgtttataacagtgtgcagactaatagaggtataatgtacatggatgcactttggtcaagagtaggccaaggcaggcatccgagcctgcatgactcagtgagtttagggcacaggtgcatactccatttgttataaccggtttgtgtaagtttgtactaggttctggaccactattgtctgtaaaaggtataacttgcctgctgacgctatacaggtgctcgtgcccagaggagagagctagagcttgtccgcttttccgtctttgcagacggacagtgaggagccaggacacagntcgggctgcttatgtccagagagaggagtaagcttgtgaccttgaaggcagggagagccacccacaccaggttacgtgggagcaaccgggttaagcagccgagc

SEQ ID NO: 359143 - DNA, 1134 bp, Homo Sapiens
ttagctttccttaaactaactgagacactttctaaaagttcacactactgaaaagagccgcttttaagaattaatgtattccactgggggtaaatcatttctgatttccctcaggagggtagtaatatctactagcactagtgcccagaatcaaagtttatatcatctaaaaaaactcaacattttatagactctacaatgcatggattacttttattcatatgaaagtaatataaaatgttacctaacttaaataatataaaatatcggtttaaccaaattaacaatcacaaaactgcagacatttttctattaaagttttccagttcactgagcaatatttactgaaaaatatgattatgaacttaaatatgtcctctttaaaatttgctgtttatgctagactgtacaatggtgctccctttatgatttttaaaaattttacttacataactatgtaattccaaaatagaaaagtgagtgagccatcactaaaatttactggaaactaatattctttcatggaaacaactgataaacattttaaagttctatatttatttaaatttggctttttaaaataggtaagcttttcatttcaattattgtttaatactttaaagctagtttaaacaaagataaaaccaaggagaactagtaaagcattccttactttacatacagtgcctcaagtgccacatacataataacatatcacaaaagaatgtatatggtttagcagattacagagcaaacctaaaagtttatacaaagctaaacactgcctcccttctgttccatttattgtcttttaatttgatcttggctctgtattatccttctataataccactgtgtgacatctatcagtcttctaagtgttccgattacttatatatacctttttctttaaacagctttgtaacatttgagaacattcatccaatcttttccattagatatgatatattcatttttctcacaaaatgctcactttcctgagctatattaaacaccttataacaggtgtatgtgtaactgaagaccctaaaatgtcaagttacattttttttaatgcatagagatttacaattcagctcatagtcttcttggatatatactggtttgttcttt

SEQ ID NO: 359144 - DNA, 683 bp, Homo Sapiens
  misc_feature (332)..(395): n is a, c, g, or t
aaaagaccctgtgagcactgtgaaaaagaaataaccgccaaagtaaaatattttaaattcaattcacgaaacatttattgagtatatactgcaggacacatactatttttcagtgaaacaaaaatggggttgacttttaaaaaagtgtaaaagttaccatataaacgtgaccgatatatgagtattttctcccttttagttttttctccttttggggaatatttctgccttattctcatagagaatgtaattttcctcccactttctgtattcttttgaaatgtgcatgattatttttctccatacttactttttcctgtgttgtttaatannnnnnnnnnnnnnnnnnnnnnnnnnnnnnnnnnnnnnnnnnnnnnnnnnnnnnnnnnnnnnnnctatattcttcttttccctctctccttggtaataatatttactccctacttcctcccatccctacctagaggaactgtgggtgaatattggatagtattcttcacttggatcaaataagcagaatgagagtgagaactgggttattctataaaatttacagggtgtaaaatgtgaaaaagtaaccttctagattcattactggaactcttggttgagtttgtaattcagagatgtcaggaagaatgatggcatatgacacagatggctgctcgtgccgaattcctgca

SEQ ID NO: 359145 - DNA, 222 bp, Homo Sapiens
aagggcgaagggtaccgggccccccctcgagccacctgattgcttcatcagcgaggagctggttattgggctgtccaggcctcccaagcagcacagaaatgaggtgaaggagcctgttgctccactctgtaaggagttggagggtgatgtttactcgtttgcagagagagatgccttgtaggcacctcaggatggagagggtcctgattccaatgtcctttt

SEQ ID NO: 359146 - DNA, 702 bp, Homo Sapiens
  misc_feature (39)..(39): n is a, c, g, or t
  misc_feature (69)..(69): n is a, c, g, or t
  misc_feature (72)..(72): n is a, c, g, or t
atcattcatcaggtcactcattcattgatcaaggtgacnacacttagcattcatgtgccctgcatcacnacnagtgatggaaaggaacatgatgggaaatgtgagatggatgacctggttcctagtctattctattccccatctcttcctactctgaagctggagcagtcaaacctctgagcctcaatctcatcatttggaaaacagaagtaataaatcctcttccttcctcatgggattgttctgagagtcaaacgggataatctatgttaagtgagtgaaaattgtagcattttgaaagttcaagtattttttgctgtttttagtctaccttcatttttctcactctcattaatgatgtggggctagcattttaagcacgtatgtcaaaatctggacttatgagagtatatcagataatcactccgttttaatgaagatacttcccagaatgattaggcaaccatttaggcaagtgtgcttaaaaacagatttacagtaaaaataaaaacaagctcatacctaaccttttggggacctggcaagtgtacaaacagaatctaattccatttatcatttatttggggacaattagcatcagttatagatgttggaggtgaataaatgttcatttgttctgcaaattttacagtgatttgaaaaacactgaggaaggagataatgtggaggagcgcagaggcg

SEQ ID NO: 359147 - DNA, 690 bp, Homo Sapiens
  misc_feature (73)..(73): n is a, c, g, or t
  misc_feature (139)..(139): n is a, c, g, or t
  misc_feature (149)..(149): n is a, c, g, or t
cccctcgagaagggctacaaatgcagcatcttgaagattgtgagttctatcccagcaaagagagtttatcatnagtaaatgcgatgctttcctttctaagcatttgtggaccatacactgataggtattttgctgaatntgctatgacnatagcaatgtattacatctagacccttgtgcacagataatatcagaagctttgtgccaataggataaaccacatcaggatggagagctaagttgatatcggtttccacattatgttttaacgtcctgctgaaatgtctctgaagcttcacaagagagtttgctttgatcaacattcctcaaccttcaaaggaatcttggaagtgtttgtgagacagctgtttgctgaaataaccttaattgcttgtactaagaattatcactgcatgcctcatagatttgtgagaagtctgtaaaaaaactgctgacattggcaccaaagttcatctaccttcaatctacaaagtacccccctcactatttttaatgagtggtacctcatctcattgtgcacacatatgtgcccaaatataagtcattggtgatactattttcttatttttaatttttatacaatgtttctagtacaaaagtaatgcatgctcgattatagaaaatttgaaaattcaaaaatatgagaagaaaaaatatcctctctgaaac

SEQ ID NO: 359148 - DNA, 687 bp, Homo Sapiens
  misc_feature (36)..(36): n is a, c, g, or t
  misc_feature (42)..(42): n is a, c, g, or t
  misc_feature (92)..(129): n is a, c, g, or t
  misc_feature (133)..(430): n is a, c, g, or t
ccaaatacatgagctggctcatagtgatactcatcnaacatnttgtgaagtaagatccagtgagtcccaagtctattttaacggtctgtcannnnnnnnnnnnnnnnnnnnnnnnnnnnnnnnnnnnnnttannnnnnnnnnnnnnnnnnnnnnnnnnnnnnnnnnnnnnnnnnnnnnnnnnnnnnnnnnnnnnnnnnnnnnnnnnnnnnnnnnnnnnnnnnnnnnnnnnnnnnnnnnnnnnnnnnnnnnnnnnnnnnnnnnnnnnnnnnnnnnnnnnnnnnnnnnnnnnnnnnnnnnnnnnnnnnnnnnnnnnnnnnnnnnnnnnnnnnnnnnnnnnnnnnnnnnnnnnnnnnnnnnnnnnnnnnnnnnnnnnnnnnnnnnnnnnnnnnnnnnnnnnnnnnnnnnnnnnnnnnnnnnnnnnnnnnnnnncaagtccattttattaggtggaattagctcaagatcattacccttgcaatgcctgttctatatctcctagcaattctacttggactacaagaaacaaaaaaatccttcaaagtccagtttcctcctatttttcttcttgaaacactttctgaccaaccctacaagaagtgttctgtttgtattttaaaatatgttgatacttgttgcttatataattcatttaatacccgcttaatcaccatttcttatgagtctat

SEQ ID NO: 359149 - DNA, 690 bp, Homo Sapiens
  misc_feature (634)..(634): n is a, c, g, or t
tcggtttcccaaagtgctgagattacaggcatgagccaccatgcctgacctgaggacttaattttggaagtgaggatgtacatgcgcgtgggctgattcaatcctcatcaccgctctatgacatagggataaactatggttcccactctgcagatgaggaaccccaggctccaggaggggatgcattgtgtgctgtgttacagcggcagggcaggactgagagctacttggggttggaggggtgggcaggagagctgctgcccaactcattcaggcacccccctccctacttcactccccagtcttcctttggttcctggtctctccctacccctccagaggactagcactttccccagcagtgtttggggtagatccaaggtcccgaagttcctgccacaggcactgtctgcgtgataggaaaggaaatctctgtccttcccctcggtgcccaacctcccgttggctaagccggcacctgggcgggcaagagggtagaatgaggctattcagagagttttcctgatgcaataactgattgcacaacccttgcattccttgagcgttttatggaggttggtaattctaagtggcaccaggaaatcctaaacttacccagctgccagaacacagncttttcagtcaaaccacagggaagaccagtaccccaaggctaggcgtagagacggt

SEQ ID NO: 359150 - DNA, 696 bp, Homo Sapiens
  misc_feature (197)..(240): n is a, c, g, or t
gccagtacagttggaagcctccaggacccaaggccagccctttggccagcttccgtcctgattagttggtgttcttgctgactgtaaaaataatttaaaactcctagaattatgtgtctattactgtatggatcacaatggattgtacttattggtttgtctgttttctgattgtcactagtctaaggacaagaacnnnnnnnnnnnnnnnnnnnnnnnnnnnnnnnnnnnnnnnnnnnncagttgaaaagatgatagaagatagccagaatggaggacctacatttcctgttgtttgaccacctgtttcctgtgctataggaagccattcataactaggaaggaggcagtttatggttttgttttaaatctgtaaaatttttttaaattatactcttggctattctgtcctaatatgtttggcttatattttccttcaaaaatggatattaatttctaggttaggttctaacttcaaacatttgtcatcctctcctacattaatggcctctaataaggcctcctccattaggtccctgaaatctaacctgtggtttcacttaatatgattcctcacaggaacttcctaggctttttagtgccactactttcaacctgtgtagtcctcttcaacctggtctatacttgccgtttcttttcttttttcccatcttgtaaggatagttagttctcttg

SEQ ID NO: 359151 - DNA, 414 bp, Homo Sapiens
  misc_feature (175)..(218): n is a, c, g, or t
agacaaacaaaggacagatagccaagagtataaaaaaaatacagatttaaaacaaaaccataaactgcctccttcctagttatgaatggcttcctatagcacaggaaacaggtggtcaaacaacaggaaatgtaggtcctccattctggctatcttctatcatcttttcaactgnnnnnnnnnnnnnnnnnnnnnnnnnnnnnnnnnnnnnnnnnnnngttcttgtccttagactagtgacaatcagaaaacagacaaaccaataagtacaatccattgtgatccatacagtaatagacacataattctaggagttttaaattatttttacagtcagcaagaacaccaactaatcaggacggaagctggccaaagggctggccttgggtcctggaggcttccaactgtactggc

SEQ ID NO: 359152 - DNA, 828 bp, Homo Sapiens
  misc_feature (110)..(111): n is a, c, g, or t
  misc_feature (116)..(116): n is a, c, g, or t
  misc_feature (193)..(193): n is a, c, g, or t
aaaaagtctctcaacaaagaaagccaggctggaatgccttcattgctgaattctacaaaccaaagaaagacttaacaccagttctcaaaccattctttaaaaaaacctannagagnaagcattccccctaattcattctacaaggccagcattacctgttatcaaaatcagataagggctcacaaaaaaaganaactacaggccaatatccctgatgaacataaatgtaaaaattctcaacaaaatactagcaaaccaaatccaacagtacagaatacatcatgatcaaatgggacttatcccagggatgtaaggatggtccaacatacacaaattaataaatgtgatacatcacatcaataaaatgaaggacaaaaaccatacgaccatctcaacagacacagaaaaagcatttgatagaattcaacatctcttcaaaaaacactcaacaaactaggcatagacggaacatacctcaacatataaaagctatatgacaaacacacagctaacatcgtaccaaatggggaaaaatcggaaaaccttccccccaagaactggcacaagccaagaatgcccactttcaccactcctattcaacacagtactggaagtgttagtgagagcaattaggaaagagaaagaaagaaaaaccatccaaacaggaaaacttgaagtcaaactgtccttctttgacagtgatatgatcttatatctagaaaaacctataggctccaccaaaaatctcttagatctaataaacaaattcagtcgagttgaatacaaaatcaacatataaaaaatcagtagggtttccgtaccccaata

SEQ ID NO: 359153 - DNA, 647 bp, Homo Sapiens
  misc_feature (238)..(351): n is a, c, g, or t
gcatgagccaccatgcctgaccccgaattcttttagatgacaaggtatccaggttaccttcactctttcttactgtgagcctggagccacttatatgagttactcctggctgccacattcagtggggcagcttgtgtactgcacgactcccaggaggcattcacatcacagtcagtatgaatgtgcttcctggaggaacgcagtgagtaagttgtgtagccacaaatagtgaccctannnnnnnnnnnnnnnnnnnnnnnnnnnnnnnnnnnnnnnnnnnnnnnnnnnnnnnnnnnnnnnnnnnnnnnnnnnnnnnnnnnnnnnnnnnnnnnnnnnnnnnnnnnnnnnnnncttagggataggctttgagagatacatcagaaggaaagaaatgtgggaaattatctcagcatctatgctgtccctgcatcctttgctttccaggcttaaatgtccacagtgggtttcaatgataactcagtgaatcattgccgtcgtatgacggccctgctagcgatctgatcatcttttcatcttttttcaggcaggcctctcttgtttattttctgagagctcttatatttaacaactttaacgagagcagttctatcagggcccctcatattgataggggggccccattgggc

SEQ ID NO: 359154 - DNA, 683 bp, Homo Sapiens
  misc_feature (36)..(36): n is a, c, g, or t
  misc_feature (40)..(40): n is a, c, g, or t
agagagtcccaagtacgtccacggtcagccttgcgntaanattgtgtgcttagaggaacccagggtaacgatggggcaaactgaaagtaaatatgcctcttatctcagctttattaaaattcttttaagaagagggggagttagagcttctacagaaaatctaattacgctatttcaaacaatagaacaattctgcccatggtttccagaacagggaactttatatctaaaagattgggaaaaaattggcaaagaattaaaacaagcaagtagggagggtaaaatcatcccacttacagtatggaatgattgggtcattattaaagtagttttagaaccgtttcaaacagaagaagatagtgtttcagtttctgatgcccctgaaagctgtgtaatagattgtaaagaagaggcagagataaaatcccggaaaggaacggaaagtttacattgtgagtatgtagcagagccggtaatggctcagtcaatgcaaaatgttgactataatcaattacaggaggtgatatatcctgaaacgttaaaattagaagaaaaaggtccagaattagcagggccatcagagtctaaaccagcgagggccaactcctcttccagcagttcagatgcctgtaacattacaacctcaaatgcaggttaggcaagtacaaacccctgtggaagta

SEQ ID NO: 359155 - DNA, 520 bp, Homo Sapiens
cacaagcctcactgcagtctataattcataagtttcttacattcatataaaaacaagaggcttatgtggcattagtaacaacctgacaaggaagagaactcacaagaaactggaatatttcaacctagaactctcaagataaaagcctactagataggagtaatacaatgggtcccaaatttgaaatgatctgaggcagagttaaagaaacttaatgggtttacgataaaggtaaaccgacagagtttcttttacactaattaagatgatcacctgaacaaagtctctctacaaaatttaacgagtgttcacaggaacttccgattatgtcagaaacctattcatatgtgagtgttcagtatgttatatggaattaactggataaacaactgctatttcatgtgattgcccttttagacaagctggccattcaaatcctatatcaagatccaccctaataaatctaaaaatggatacaaaaaagggagtattggccggacatggtagctcacacccagca

SEQ ID NO: 359156 - DNA, 652 bp, Homo Sapiens
caaaaaactgatgaaagaagaattgagtttggagtggaaggaaaaaaggaatgtgggtagaggtaggaagagctggaaggggaagacatgaaagtagggcagaggatggagctcaggggaggaggaaggaaacgccagccccacttctcagccctttctcaagagcctgcccacctctctgtggcacagttccctcttttcctctcccatacttttcccagtgttagatccattcactgctctgcccttaggataatttattttaatcaagtccttttcctctgctatcctacctggagagactcaagcaagaacaacaggggaaggtcagctttgaacttggcattttctcaaatgaagtgtggaaagtgatggtgaccaaatatatttttttatttaaaaataaaaacagtattaggtaatgtaaatatctgtcaaagacctagtgttctgctttgagaatcctagttcttggattcatcatattttatcctcttactttatgtcttatatagaaggtaggcattgatgtagattatgctctaaactttttgaatttgatgtttggcatttcaatcattttttaataaaaagcaaatacaaataatatacctgctttggtactgtggtcactatttaaaataaatattac

SEQ ID NO: 359157 - DNA, 401 bp, Homo Sapiens
ggtgactggagaggtaggctgagagtatgctgtggatgggaatggtggcaggaacgtatgctgagtggaagtcagcagctcaggcacagaggcaaaatacacttcacttcgtgagggactggatgcccaggtaatggacaatataggaggaatgatttctcaatttctggttagcactgaactgaatagataatggtgccatccgtggagatagggatcaagaggcccagacttagaaagataaagaatttgctttgggatacgtatactgaacttccctctgaagcatggaataagcagacagatgacggaagtttgtcttttagagtaaaggtggctctgtacaaagaaatttgtgagcaactgacatatattaatagatggcaatggaattgccttgg

SEQ ID NO: 359158 - DNA, 424 bp, Homo Sapiens
  misc_feature (155)..(155): n is a, c, g, or t
aaggtgaacttgagaaagcatgagagtaaggacccacaggtggaatgataagctttggctctgtgttcccacccaaatctcatgtcgaattgtaatcacaagcactatggaagggacctggtgagaggtgattggatcatgggagcagatttccnccttgctgttctcatgatagtgagtgagttctcatgatatctggttgtttaaatgtttgtagcacttttcctttcactctctctttctcttgttctgccacatgaagatgtgtctgcttccccttcaccttccatcattaagcccgaggcctccctagccatggttcctgtacagcttatggaactgtgagtcaattaaacctcctttatattataaattatccagtctcgggtagttccttatagcaatgtgagaatggactcacaca

SEQ ID NO: 359159 - DNA, 665 bp, Homo Sapiens
  misc_feature (13)..(13): n is a, c, g, or t
  misc_feature (28)..(28): n is a, c, g, or t
  misc_feature (50)..(50): n is a, c, g, or t
  misc_feature (60)..(60): n is a, c, g, or t
tcccggcgttggncgaactagcactagnggatttcccgggctgttggaanttgcacgagncgctatgaagaggggaaggaacaactatatatgaagagagcatgagagaggagagattaaggcaatacagacggaaagacagaaatgtcataagagccaaggaggtagagggaacaccggatacctgagctgatcacaggaagccaaagaaccacgataccgatggtcctgccttcccatgcacaggctatagtctcccagccttatttgcagattcttctctattagtcctttaaatattagtctacttcattcagagctctgaccttgggctttcttcaacctattctctttccaaggggcatcggccatggcttcccatactgccaatatactgatgaggcccagatattaatttctaggatctctctcctgagttcgagtcctgcttatccagatgcctggtgaatattgccgctccccaaatacattttactagccctcaaaatgaaattatctaaaatggaacttccctgtcaaaacttcccttttttttagtacttctttttggtgaaaggaaccctcagctgaaaattcaactgggcgtcgttttacaacgtcgtgaactgggccctggcgtacccaactttcggcttgaggctccc

SEQ ID NO: 359160 - DNA, 698 bp, Homo Sapiens
  misc_feature (93)..(93): n is a, c, g, or t
aaacgaacttagcgtcaaacctatgtcttccccttacctcaaatccaaccaagtcctatcaatcacccaagttctattaattctgcttcctanacaatcttccaaatctgtcctcccctcatcaccactatatatgtcaagtcaccgtctttcctctccgaaaacaatgcaaaagtctcctggccaaggcttgctccctgcaatccatcttataccctgaggtcaagtgatttttttcagtacagaagctttacgacttacaatggagttatgtctgaataaacccatccattataaattgaaaatatcgtaaggcagaagtgcttcttcaacttcaccatattttcagcttaaaatgggtttatctgatataactgcatcataaggtgaggagcatactgaatcatttcgcaccatcgtaaagttgaaaaatcctaagtcgaaccatcgttgagttggggactgcctgtaggcaaaacctgtcgttttatttccctgctaaaacaaactttcaatgatttctcactgcccttgggttgaagtctgtactctgtattatgaggtctgtctcactctccagcctctcctctagcattatcccttccccaaaagtctgcagtagaactggaccttgtctgtactctctcttgcccctggacttttgtacctgcagttccctgtttggaacaaactctcct

SEQ ID NO: 359161 - DNA, 736 bp, Homo Sapiens
accaagacaccaaacccaaaattatcaaaaatccattcaagccactgtacccaaccaagaagaccaagagttaatgacttttgtcttttattccctaaacctcaaaaggactttctaaaatggtattattacccttaataaatttttaaggtactggattatgactgccaatccctgaaaacatccaataagtctgtctttatattctgaatatttagtttttaaatatctccatttataagattagcccataatatcattagtaaataccttcaggtacaatgtactcaacagtgtatataagtccatattttaaatagtatttttagtaattctaagctattttttattactgcttcttcatcaatctgatgagatcaccattgtttttatattatgcatttgactgacaagttcataatataaatagaagtatccactctgtttctttctggctgttcacgtgtatttgtattattacttcaatcttctgctgactctgaaacttcaatctgcattttctttgcaggaatctttgtgagccatctgtctatttagcaaagttcattttattcaaatcaggtaatatgatctgaaagaccactaaacccagcagaggtgaactaaaacatgtgctaaaacaatataagcaggtaaaaaagctcgtgcagaattcatgcagcccggggaatccactagtgctagattgccagtagccgcggaagagtatcggtaa

SEQ ID NO: 359162 - DNA, 680 bp, Homo Sapiens
  misc_feature (59)..(59): n is a, c, g, or t
cagtctagagatggaattaaccctaggggcccatagtctgggactacacttgggaacanagagtggtccttagactctggttcccagcttggtgcccatttctagaatcctgtcctggggccccctctagctgccgcacggcaggagctgaacagattcagagggctgcagtgggccaccggaccaggacctgaatgatttgtattggatgcccacgtctgtcattcactggccaaaggcaactttcctcatttatgatcctatccccgggtctcaggagggatgactgtgtcctcccatcccttcctcttgggcctaagcttccccatccgttgtgggatttggactgtgagctactggagagggagtgagggacagggacagagtagccaggaagaatgttgagggatgctgtctgaagctgctggctttgtgacaggggcgctgtcaccagtgcaaggtagggtactggtctctgtgttcatgtcatgacggtgggtgctggcgttggggggtgtgggcaggcggtgagcactgggatgcactgtatatatgtgtgtgtgtgaggtgctagactcaggatggccagtgcctagacagggccagggtcacgggtcaccacatgcccaaaagcagcctccactgttgtaagggtgacactggtgtgatccctcgtgccg

SEQ ID NO: 359163 - DNA, 1101 bp, Homo Sapiens
  misc_feature (773)..(773): n is a, c, g, or t
  misc_feature (779)..(843): n is a, c, g, or t
  misc_feature (970)..(970): n is a, c, g, or t
tggtcctaatagagagtgccatctctaggtaaggatgctgactgagtctgtctggctcatcacctcaatgtgctcttctgtgacagacctccaaagaacaagatcccatgtagtcagcccacacaaggtccatttgacctttctcattcttctctagtctcttgccctgtgacttttgacaaaaatgctcagttcacaatattagctgcctgcttctgatgggtaggaggtatataatcaaaatactcccaccaaagcactctatggtctagacttgatacttaaaatttaattttcagctttcctcaacaaggatagcttgaggtaataggagatattttggtaagtgaaaatgattcctgcttggaacacagcttactgaactcaagatttcatttctttgagtattagacagttctcaataagttgatgtatactgagaaatgattctaaagaagttagtgatatcctgtttaggaatagatttagaaaactgaagttactttccagctctacaattctgtattaggaacaatagggaaatgataaagtgcctctatatggcaatctagtgaatctctgggggatgactgtctacctgcatagtagttgaggagcaagacaaacttccaaacacacaaaaatcaacttgaaataacatcaaattcagcctgggcaatatcatgagaccttatatctacaaaaaattagccaggactggtggcacacgcctgtagtcccaagctacttgcgaggttgaggcaggaggatcncgagcnnnnnnnnnnnnnnnnnnnnnnnnnnnnnnnnnnnnnnnnnnnnnnnnnnnnnnnnnnnnnnnnnagaccctgtctcaacaaaataaaaaacatcaaattcattccatattcaggtaacagtgacatatatctactgaattatttatttttcttttaggaatgtctatatctatggattgtcactataaaanaaagacaaaaccctaaaactgagcttgacaaagggaataaaagcatactttgtttttcttggtgtccccatgttaataaatcatttcttctctttggctcaatgagcagcattttattacaattacgttca

SEQ ID NO: 359164 - DNA, 659 bp, Homo Sapiens
gaaaacagcaagtctggggcacgcctaagtgcacttctctccattcctctccagtcgtgtatataggagcctccgataccggactcaaacagttgtggaaaaagcaagacttcatcttccctcactttaggtgaaggctgtgttcagggtttcaccctgggagcgttaggacttaagtattgcagaaagctttgttcctagtagactctgagaagaggatgaggctatctttccctacctagcatctacttgtagagtgagcaggaacaggctgagaatactagcgccctcttatcacctctgtcttttagcttgcttgtacagcagtcgtttgtgccagaaaaggcaagccaagatgaccagagactcgactcttctcagtgcccactcagagagcaggcatatcatcttgggagaagtgggctgctgtccctgctcttgtgcactggcacagaagttctgccaggaagaaaggcatgccataaggatgaaaactctgcagctccacctgaggggcctacctttatttggaacagagcttcaagagttccatgtctataggcattgtcagaaaccacagagatgctgatggagaacaattaagaagttgctgatagcaccatgtttctggtatcaacatgtcacatggcagagtcaac

SEQ ID NO: 359165 - DNA, 702 bp, Homo Sapiens
agggcgctggggaagttccagaagccccaggtccttgctcaaaagacttctgcctgacaagagctcccactacatgcagtggcccagggcagaggggcttgatacatggccttcagggggtgctcctcgcggggtggacttgggagtgtacagtggaacagggggctgcaggggtcctgccacccccgagcaccaacttggcccctggggtcctgcctcatgaatgaggccttccccagggctggcctgactgtgctgggggctgggttaacgttttctcagggaaccacaatgcacgaaagaggaactggggttgctaaccaggatgctgggaacaaaggcctcttgaagcccagccacagcccagctgagcatgaggcccagcccatagacggcacaggccacctggcccattccctgggcattccctgctttgcattgctgcttctcttcaccccgtggaggctatgtcaccctaactatcctggaatgtgttgagagggattctgaatgatcaatatagcttggtgagacagtgccgagatagatagccatgtctgccttgggcacgggagagggaagtggcagcatgcatgctgtttcttggccttttctgttagaatacttggtgctttccaacacactttcacatgtgttgtaactagttctcaaaactcctcgtaaaagaattcatgcaacccg

SEQ ID NO: 359166 - DNA, 456 bp, Homo Sapiens
cagaaagagccactgtgcctaggcgtcaagaaaaaattaagtaaatataatatagttactgatgatttggatttaagtagaccattttattattagttttctatatattccatctattctttgtctctttttctccattcttgtcttctttttatcaattatttattactccagttctcccatcagcttattatttatacacttaaaaaaatcttattactttctcttgatttactacagtgggccttaaattaactctttaccacttaccaattaacgcaagcaggacccatacagaacttagctccaattactgcctatcttttgtgctattctaatgcactttaatttctactgtgttcgtctgggtcttctgagaagcagatgccacaacatgggatcaaatattttaggagaaaagccctcgtgcagaataacatgcagcccgggggatcc

SEQ ID NO: 359167 - DNA, 696 bp, Homo Sapiens
gagactgaaacaggaaactaagcctctgagatttctgccattactcgcaagtcctttggactgatgacttaatgggtggcaatttcgaaagagcactagatttggaaatgtggattctgttacattactgattggttggttgtttgcctctccctctaatcagcatgagaaaaagccaagcaatggcttagtctcaaggagaagctatgttcccagtgcccacccagccatatttctcactattactatcaggcactcagagttccaggaagtagcagaatagactggagaaatcagaaggtctggtatcacacatgggttgagatgcatgttctgcctcttcctagctatgggatcttgggtctgtgatttaggaaaatgcccaaataaccactgcttaaacaaaataaaaatgtatttctctctcatgtaagggcatgccacctaggactagtatattagctatactcatcaggaacaccaatcccatctatcttgttgctgttctaccattctcacatgtgacttccatttcaaagtgcagattaattgctctagttacagtcatcacaactaacatcccaatcagcagtaaggcaggacaagaaggagaagaaattgctttcctccatataagaacattatccggaagtagaaacatacttagtttctatctcattagacagaacctaaagc

SEQ ID NO: 359168 - DNA, 613 bp, Homo Sapiens
  misc_feature (324)..(327): n is a, c, g, or t
gtgacttctcagtaaaccaatttcagtaaagtggtgggatgtggagaaattagagagtagaaattgtaggcacagactaacctttaaatgcattatagagggaaggaaaggaaagaaggagaaagcagcttgagaagtagcttattctgtcttcagatttggcaaaggaggcaggagtaaaggctgggtatgagacaaggctccaagccccagagcatggttctttgtcacattgaacttcacttgcaaaacacaaattcaaagatttgttaagaattttaacaatgtgaccacagaacatttaatcccaactgtgggactttnnnntagcatggggccccatgccacctgaaggcatgtccacaaagccaactctgtctatgtttcaatactaggaagttcacttgcccatcaatttaagttactactttaatattggctttaccattaatggaggtgatagtttggcccccatttgatctgccactttggtttatttctcaattggttcagatttctggcagagatggggactcctcaaagattctaactttcacctacccaatttttgcttcttgaggggaatcagaggcaacaattaggtcgtatatat

SEQ ID NO: 359169 - DNA, 668 bp, Homo Sapiens
  misc_feature (628)..(628): n is a, c, g, or t
ccgccggggatggttccctctaatccactctggtcgtccctgggacttaggtagtctattcatatgcacgtactgatctgtgttctgcttatgacttgagagggagcctctgaaaatctccagaaattcctatctgtgcagctgtctccttgattctctgccccgaaactcttaactggttggtatccctcatctctcatctcttccactcagagagatctccagatttcactttggttcccctctctgtgtcaaagcccagaaacttccatgaagtcagctggggcagagttagggattaattcatttgttttctgtctctcagaggtcactgacttcattgtctggtgtcagataacctgagagccattgcctcctattgattgtccattttcagttgtctcaggagggagggcaaatcggagactattgctccatcatggctgcaagtttaactattaaattgctcctggaacactatgcagccataaaattgaatgaaataatgtcctttgtggcaacgtggatgcagctggaggtcattatcctaagcgaattcatgcaggaacagaaaaccaaataccatgtgttaccgcttataagcggaagctaaacattgctcgtgagnaataatgcagcccgggggatccactaggtctagatcggcc

SEQ ID NO: 359170 - DNA, 807 bp, Homo Sapiens
  misc_feature (740)..(748): n is a, c, g, or t
gctgacaagaatgtcaaatcaggcacactgggatttattcctttaaaaatacagtcatttttaatcttcctaataggtaatggtctaaagtcagagtccagttacaacatggagataagacacactgccaattggcaactcctcctctggcagtttttttctccaatgtttgagtagatcattgtttctttggtttgaacaccagataaaatgtgtagttggttggatttaggacccatattgtatgacaaatacccatctttaaacaccaggcttagacacagctcaggctatctacatgcttagagctcattggaaaggctgagctccaccttgagttccatcgaaggctcccacagagtggaatccaccctgtttaaatcacttttctctctcctttttttctaattattgctgagtgtatacttaaaattgcataagaatgtacacagtcaaatatatatagtatgctaaagtagaacagaaaggagattcactgccatatacaccaggagcacattcactgttatttttctctctgctaacaactctttaagggcagctattttggggacagagacataggctaggttcagaaaagctactaagtatgcctactcatattaaaagaaagcaaatgaatctttaggtaaggagacatttattaggtcatatccttatactaattattaaatttagacaaattttttataagctgttaatttagaactagtcttgtnnnnnnnnnttcttcaaacctttcatactactttatgcttcctgaatacagtgaaaactgcagagctg

SEQ ID NO: 359171 - DNA, 680 bp, Homo Sapiens
  misc_feature (36)..(36): n is a, c, g, or t
  misc_feature (175)..(175): n is a, c, g, or t
aaaaatattcttggttggtaatgcccatttgagtanagatgatatctaaggccagcatctagtattaagttatgcctagatggacttctgttcatttattctgttactggtggttgttctttactagtgaaataagttaacgaatgcctgcctgtcacatgtggggcctttattntgtgttcagcaggcaccttctttgataattataagagcttagtgactgagagaattcagtaatcttcctgacccctatgccttcccaacaaaggagattatcagtttatagaaaggtcactcaggtaaaactgaaatctccttcaaggcaagataaatatctttatccttaactgtgtctctgacatgccattattttttcttcagtagtagtttgctggcccataagtcttttatgtgaactgcttatggttggaaacttaaacactgtcactttagctcagcacttgtttattgacatactttcctatgtgtatgtactgtgctaggaactgagtgagccctaggtaaatgctggagccaggggagataaaaagagagtttaattcttgtgttctctagctagttattgattacttgtagctaatttcataagaaactcttggaggaaactgaagagtagttgtaggttctacctggatgtgacaggattctatgtgtatgcc

SEQ ID NO: 359172 - DNA, 689 bp, Homo Sapiens
  misc_feature (62)..(62): n is a, c, g, or t
  misc_feature (195)..(195): n is a, c, g, or t
aaaatgattgcaaaggtcagagagcaaaccaggggtgcttgagagttatgaagattaaccantagcattcttaggggtgaaaacagatgagcagccaacaccaatatacacatttgtaccatcaaaagaaattaaaggatgaatgatcaagggaccaacagcatttggcccaataaaaagtcacaatcctttgcncaatatataaacctaggacagccagcctgagtaatcattaattgaagatgaagccagttgccaggagtgaagatgctacaaaatcttggaaggtttgcacagtaatgaatctgccagtcctccaagaggacctatgtttatttacgtaggtaactgcactgataaaagaggtacaataattcaaaaattattgcacacagggcttgagttgacattgatacctggaaccattatagctctcctattagaccagtttgtggtcatctaccttatccttgaacgtatagtcagaatagacaaaattggtagttggcccagcccctatattgggttcttgacctgcggggtaagagccatcttatgcaggaagaccaagtgaaagcaattgctactgtccacccatctcaccctctccccaaggcaaataaagtaaatttaaagaaaaaaacaccaccacaatatctcccaggggtgggagagaaacatgaaaatta

SEQ ID NO: 359173 - DNA, 730 bp, Homo Sapiens
ggatcctccgggctgcaggaattcggcacgagatcattattgctaccatctatgtcaactttggggacctcttgactcaacagctgcagacacattgctttctgctggagctgtagtttttgccccttttttgctgactcaagcttgccaacactttttgctaaggaacccaccacagtgagggcatttcctgccacattgtcaagataacttctctgaaatctcacctgtttttaatgtaacagctaggagagttttccagggcaacagggttgaccacaagaaattctttatatttatttcagtcatttctcattctttagtgggtgacctttattagcattataaattctctgcagtatcctctgaatactatcagtctgtcaattttgggtggagcctaatttatctgtcttaaggaactctccctaaaaaggccaaagctttcttagaggacaggagcctctgcctaggaccctaagacattattttagatagatagttcgaagaaggcctcactgaagaggtgatattttagaaggatttgtttaaattgtgaacatgaactgtgtgggtatttggtggaagagtggtccagaaagtgaaacagccagttaaaggatcctgaaacaagaatctgaggagtacaagagaagaacaacagagaagcccatgtgactgaaatagtgtgaaggaagaaacatgtggtatggtgtttccacatattttt

SEQ ID NO: 359174 - DNA, 578 bp, Homo Sapiens
  misc_feature (130)..(130): n is a, c, g, or t
  misc_feature (151)..(439): n is a, c, g, or t
accaagcttaactccttgaaattactccagaacgtgccacccttcagttgtgatattgacactgatttatgcacttactttcaatttagttaaggagacatgagttatacacatgacacattgagaaaanaatatacatatacgtgtgtgnnnnnnnnnnnnnnnnnnnnnnnnnnnnnnnnnnnnnnnnnnnnnnnnnnnnnnnnnnnnnnnnnnnnnnnnnnnnnnnnnnnnnnnnnnnnnnnnnnnnnnnnnnnnnnnnnnnnnnnnnnnnnnnnnnnnnnnnnnnnnnnnnnnnnnnnnnnnnnnnnnnnnnnnnnnnnnnnnnnnnnnnnnnnnnnnnnnnnnnnnnnnnnnnnnnnnnnnnnnnnnnnnnnnnnnnnnnnnnnnnnnnnnnnnnnnnnnnnnnnnnnnnnnnnnnnnnnnnnnnnnnnnnnnnccaccgtaaactctaagttctatgagatttgaagatacaaagataccccgttggctaaaatcaatactctagatttctaagaaacaggttctgtcgtaggtgctgaaatatgtgtgtccagtacttcccaagaataaac

SEQ ID NO: 359175 - DNA, 696 bp, Homo Sapiens
  misc_feature (45)..(45): n is a, c, g, or t
  misc_feature (76)..(76): n is a, c, g, or t
  misc_feature (172)..(172): n is a, c, g, or t
agtaaaaaattcaagcagaaatactgtgacttctattgaggaaanccaggcaagtgagtaaactcttgaagcaaanaaatgtgaatgtcttctccatctcttaatcctgtagagcacgttgcacggagatggccccagagtagaatactgagaaagtctagttggatcaatnttgaatgaagctgtgagataaaaggaaaaaaaagaggctacttataaaataaatttatagtacggtcacattatccagagtaaggttagtttggtttggtttgaattgtttcatttttagccaggcatagactgtttagaaagtaagcatttaaaaatttgtcgagatgttatttattatttggtaaaagttgcaatgcaccaagatgtaagattttacacccctgagttttatggcatcacccttgctaatttattcatgattaaaccgaagaactctcaatgaggagaagtagattgcagtataaattggtgtcattgtttgtaaatgtgctccactaagcatatatactgctccactaagacagcttctagtaccatgcctggggcttcagtgcaatttacttacgttgaatcactggctcccagactccccttgtgaactaacaggcttagaaaatcattctaaagaatgcatggtttgtgtagtcatagaacaaaacttctcttggaagcttattcccc

SEQ ID NO: 359176 - DNA, 733 bp, Homo Sapiens
  misc_feature (109)..(109): n is a, c, g, or t
  misc_feature (115)..(115): n is a, c, g, or t
  misc_feature (198)..(198): n is a, c, g, or t
cggacaggttgcacatggagtgtataagttagcagttgcatagtctcgggcagcatgtagcattagagagataagcattctcaaaagaagccaggattcaggtcaggcntagtcntaatagcttgagggtccaccccactccctcaaaagaaccccggggattcaagtcctggagtcccctagtgtcctccaagtcancctttatttatttaggcccaactcagttgcagtgaatatcttcttccttgtgaccaaacaattcatcactgagacaaatgggcaaaatcccagtcatttgaaaaacaatccagttatcaaaaaggatcaattctctaacagctctagatggctatcaagttttgcagtttgtgtggtttactgaagtgctttttgttcaatatgtgcatttcaagaaacactccaagctttgattaagagaatatggtttcccacctcaataactaacttttcataaaacagatgtctgtaattttattttaaatatgacccaatagtggaatttgatctgaaggagttgaaatagagtgtttttaaaataacctgtttatgattggttttaatatatctcaacacacacctttttgaaattgagaaattaaatcatcctaggaactacagatttcaaagaaagcccctaccttttactttaaaccaaaaaaaataaatatttttagaaaaaaataacctgcagcccgggggatccactagttct

SEQ ID NO: 359177 - DNA, 719 bp, Homo Sapiens
  misc_feature (76)..(76): n is a, c, g, or t
aagaaaggtccctgtaatctgaggcttcttccccttgacctcgattaagggcagtctaggcagaaaccattaagcnattcccgcaaattcctggtagaagggcaataaagaaggcttataatagtcctcagcaaccttggggtgccggtaagaggatgaagatacggactgaaatgactagcaagcaattgatcctagtaacaacaccttgatgacactggaatctaataatcccctggatttgcctctgagacactaacggcttacctacctatcttttgggtctcaggtttttagagcatgagaggggcaaagccctctatcctgacttattgattggtgcctgattttctgcctttaaataactagctttgtttcccagaactgagttctaggttccacattttcctgccttatcttggataaacttatctagatacaactctgcttctcaagatatgctactgtcatatccaagtttatgtcgttagtcaattctcccagattatgccacttgtttgatttcagcatctgtccaaaattacactagattctgaacctagtgagtagtattgaatattgggtcttacattttgttttagaattacgtttcattaagactgtttatattttggttcagattatagctatccattactttctgggctactgttttgggcaaggactaccctgcctgccaactaagttacactctctta

SEQ ID NO: 359178 - DNA, 409 bp, Homo Sapiens
gctctagaactagtggatcccccgggctgcaggattcggcacgagaaaattcttaaatattatactggaaaatatttcccagcgtctctcaactaattcattacaatcattaggaagtaaaattgcaatagcaactagtttattttgactgaatcagttggtgaattcagtcatgcaatccataatcatggttaattaaattttaaaatattcaaattgggtttatatgctcctgtggccaatgcttactttaagtctccctttgttcagttccaacttccgctctgggaagtttctagtaataggcacagagctgtaacagagcatgctgcagacatctcattaggtcttagacggacctgctgagccaaataggaacccaggttattacacttcttttaagaactgg

SEQ ID NO: 359179 - DNA, 822 bp, Homo Sapiens
agagcctagattaaattatattcaaatgtttattgagcacctactatataccaagcacaatgctgtgtgtgctgggcacaacaggaaccacaaggcttgactctgttctctataagcccatgtcctattggagtggtggaatgatgtatgggaacaatataattggacacccttgttaattgtgacacccttgcttccctttcgaattagcttagcacattcttatcatgcttttgtttctctttgtgaaagactccaaacatcgaaactacgttaagaccagttagagcttctttcattataatccagttaggagacaattcatccaacttgtcttgattatgccacagaagctaagtgattaaatcagaatctgaaaagaagaaacgaaagcattaagtgcatccaaaaataaacttgttgaacctggggatagtgtaagagtaggagactttctgaaagccactttggaaatatgattttaatgagattcattattgtcctttaaggtcaaagttgaaagagtagtctatctggctaatatcaaagaggtttaatttttgttgatttggagataaagcaagtataagcttttcattataaatatgtttttatacttggaaaataagaaatagaagcaatcagtagtcacatatgtgccctgtgatctggttcctgtgaacattttctataaatttaaattatacgtaatcatttatagtccagaagcaggtgcaatgtggatatgcaaagctgttgaaatgctatttttccaaagttggctggaaataataccatacacaggaggatgggtaccgtggt

SEQ ID NO: 359180 - DNA, 685 bp, Homo Sapiens
  misc_feature (467)..(467): n is a, c, g, or t
  misc_feature (534)..(534): n is a, c, g, or t
  misc_feature (539)..(539): n is a, c, g, or t
  misc_feature (614)..(615): n is a, c, g, or t
  misc_feature (663)..(663): n is a, c, g, or t
tctacttccagtagtggatgctgtgcagcctactgtgtttcggtgggcattggactcttaagataggcagctgctccagtgcacgtgtgtgcattccctgggcttagcagctcctggtcaccctgtctgcactagcaaggctcccagtgagtcaacgaggagggtggccccagagcagagggccccaggcacgaagcacctcactcactctctcctgcatcctgccaccccacaagccactcctgcaggcgggcctgccggtggccctggaggagatcacagtggaagaggcccatttccctggatagcaactgtcccacccaggggggtttcaggaggaggatggagggcacacaacaccggtggcttgtggggccctcacactggctgacacagccaccttgcaatcctgacacctgagcgggaccaggcagcatttgtcacgaggtgtgggaggcaagcaacangagcagagtgtgaacagccttcttaagtctggctcctggctgccccatcctccattcccagctacangccgnccagggtaactttcagtttctccaagattttctcactgattttgggtagtttctgaaatggcacactgctttctnngcttcacagctcacccagggtcgattttgcggagcagtaaccgtgcangacacacatgggcttggccctt

SEQ ID NO: 359181 - DNA, 232 bp, Homo Sapiens
ctgctctaaattagacatgtgtatgacacacatctataattatgcaattgcttacttagttatataaatcattcatccaaaataacaaatcagttattgatttatttagaagtcaataatataatcttttgtttatcatttcactaagttgctcctgtctgagtccagatttaatattgtgagccacatagcagtgttccaatgacttctccaataggtagttcccttatgt

SEQ ID NO: 359182 - DNA, 637 bp, Homo Sapiens
  misc_feature (481)..(481): n is a, c, g, or t
  misc_feature (525)..(525): n is a, c, g, or t
  misc_feature (571)..(571): n is a, c, g, or t
gccagctggtcaggctcaggttgaggtacttggcttaacaagcaaagtcacttaataatgttagaaaagaaccttgggttaaaccctggaaaagtgagcttgcaggtctgggtctgtttccttattcagcaatgggcagtaagaacatagagtgatgtcactcagcacatgcctggcccataactgtcttctttgatgcctgtttttttctgtttgtagggccaaggagatctgtcgaagaatgccaagaatgaagctatagaaaacatgaagcagatccagctggcatgcctgtcctgtggactgagtaaagcccccagcagcagtgctgaggccaagagcaagcgcagctgggaagccatagaggagaaggaaagtagtgaggagaatgggaagctgtgactctgggcattatcgacacgttcacccatcttatcaaggactctggtttctcattcttgttttctttctttaaatgttntataagttcacaaaatggggccccatatggggtattggacatangataatttcacaatgtcagtatttcagtgtagttaatttatctaanatagccttagtatcagtggttttctgagacatgtgtcaacacccctgtgtggatgccctgtgaaga

SEQ ID NO: 359183 - DNA, 907 bp, Homo Sapiens
ggcggaagcaggaaaaaaggaaatctttatgggaaatcaattacccaaagcaaggcccagtcacctagaggtgaatatgatgttgttattgtcctcccttagtgtacagcacagtttttgctctcacagggtttttctctttaggatgcgtagacccctatgcattaaatacatagcatcctaaagacaccctactcaccatgagtctgtaggctctttcctgatgaagggcactggccatatatgaatggaaaactcaactcatctcctcagctttagatgttgctgctgttcagctggatttgtgagaaatatctggattactatcaagaacatttagcaagactcaaaagagagaggcaagcagaaccaaaacccaaacctcaaccaatgactagctgaataaacaattctttggaggaataaggaaggtatttctggatgtattctgagaatgctcttccaaaagggaagatggtaataatggacttgttttgatttcatggttgtgatagaatgtacttccatgatgtgaaatacacttctggcagataaaatgcaggttgtaatttgcatttgtacatcacagggtaaaagaatggccatccattctgaggaagagtgttctgttctctaagatgctgcttaaccaatgttatccaaatgccatagcatcatatctccaaatacaagattaaatcataaggattcatgtaaaacagagtatactgagctgttctcagaaaaattaatgatgtgtttattgtaaatctttattgcacagatgagcctgacagtccttcaatgtataattttcccccagcatctagtaatgcataagtacttgtatgttcttctgattaccaaataaaaacaatgagttaacctcttaattggaattggaaaa

SEQ ID NO: 359184 - DNA, 478 bp, Homo Sapiens
  misc_feature (23)..(23): n is a, c, g, or t
  misc_feature (61)..(61): n is a, c, g, or t
  misc_feature (72)..(72): n is a, c, g, or t
  misc_feature (90)..(90): n is a, c, g, or t
  misc_feature (114)..(114): n is a, c, g, or t
aaaggccccccccaaaagggganagaggggtaataaggggacctggttttgaatttcccangggtggtgganaagaatggtacctccccntgatgtgaaataccacctccgggncagataaaaatgccaggttggaaatttgccatttgtaccatccaccagggtaaaaaaaatggcccatcccattcctgaggaagagtgttcctgttcctcctaagatgcctgccttaaccaatgttatcccaaatgccatagcatccatatctcccaaatacaagattaaatccataaggattccatgtaaaacagagtatactgagctgttctcagaaaaattaatgatgtgtttattgtaaatctttattgcacagatgagcctgacagtccttcaatgtataattttcccccagcatctagtaatgcataagtacttgtatgttcttctgattaccaaataaaaacaatgagttaacctctt

SEQ ID NO: 359185 - DNA, 700 bp, Homo Sapiens
  misc_feature (611)..(611): n is a, c, g, or t
  misc_feature (645)..(646): n is a, c, g, or t
gaaatgaagactggctctgtggtttgaatgtatcctctctaccttctccttttcctccttcttcttctttgggctatgtatccttaaatcacttctttagaaaaacagcatgagaagtactttctaaatacaggcatacctcagatatattgggggttgtgtttcaggccaccataattgtgataaactgaatatcacaaaaaggtaagtcatgcaaattttgtggtttcccagtacatataaaagtcctttccccattgcttgttattgttgattttgtcaatgaccagatgattgcaggtgtgtagctttattcatgggttctctgtcctgttccattgatctatgtgtttgtttttgcatcagtaccatgctgttttggttactgtggtcttgtagtatagtttgaaatcaggtagtgtaataccactggctttgttccttttacttagactagttctcactctcgtgccggttttatctggttaatattaagcactggcatggtctttataaaattaggctatttcttcaatttatatcctttagttataacttcacaaagatctaaaccattaaattacattttagaaacattctatttgacactngtatattaacctcgcattcatgtgaataacattnnaaatggatatgaaatagcagcctttaaagaaatagtgttttaaatactgtggtt

SEQ ID NO: 359186 - DNA, 691 bp, Homo Sapiens
  misc_feature (90)..(216): n is a, c, g, or t
  misc_feature (229)..(382): n is a, c, g, or t
  misc_feature (386)..(555): n is a, c, g, or t
gccggcaccgacacctccgggggccagggaacccttctccagtactccaaagaacctggaaagggcgtgtgccacaatcccaggtttagnnnnnnnnnnnnnnnnnnnnnnnnnnnnnnnnnnnnnnnnnnnnnnnnnnnnnnnnnnnnnnnnnnnnnnnnnnnnnnnnnnnnnnnnnnnnnnnnnnnnnnnnnnnnnnnnnnnnnnnnnnnnnnncggcctcttaacnnnnnnnnnnnnnnnnnnnnnnnnnnnnnnnnnnnnnnnnnnnnnnnnnnnnnnnnnnnnnnnnnnnnnnnnnnnnnnnnnnnnnnnnnnnnnnnnnnnnnnnnnnnnnnnnnnnnnnnnnnnnnnnnnnnnnnnnnnnnnnnnnnnnnnnnnnaaannnnnnnnnnnnnnnnnnnnnnnnnnnnnnnnnnnnnnnnnnnnnnnnnnnnnnnnnnnnnnnnnnnnnnnnnnnnnnnnnnnnnnnnnnnnnnnnnnnnnnnnnnnnnnnnnnnnnnnnnnnnnnnnnnnnnnnnnnnnnnnnnnnnnnnnnnnnnnnnnnnnnnnnnngcttttggtgctatttctaagaaaccattgtctaacataaggtcacacagatttactcttgtattttctcccataagagttctaaagttttagtcttcccactgaagtttacaatctactttaagttgaattttgt

SEQ ID NO: 359187 - DNA, 640 bp, Homo Sapiens
  misc_feature (411)..(411): n is a, c, g, or t
  misc_feature (418)..(418): n is a, c, g, or t
  misc_feature (518)..(518): n is a, c, g, or t
  misc_feature (550)..(550): n is a, c, g, or t
  misc_feature (563)..(563): n is a, c, g, or t
  misc_feature (609)..(609): n is a, c, g, or t
  misc_feature (630)..(630): n is a, c, g, or t
gttatgaaggttaaataaactgagccatgtacaagaactggaacaagtcctggcttatggtgagccctcagggcatgttcactattcccctggccgctgagtcttggctcccaccagccctggctaggatgccattcctcttaaggcttccctgaccactgcaccaccatggggaattctcatctcagaacccctggggcactcaaggttgggcacctgactgcacatattcccaactggtctgggacccaggaatcttcctactgttggtgagctctgtccccagagcaccctggctcaggcctaggcacaccgagatgttgagaaatgcttggactcctcccctgcaggacgggcaggccaatggaaagagaaagctgttggtgaccctggagaccacccctgaccagngaccatnggagctaagcagtggagcaggcacagggtctccttcccagctgcacttcccctggtatccaggaaagtcctgtacctgtgacatcacactttattcacantagccggcacatctcagcagcctgggtgcaanctgctctgtcggntgacaggctgtaagtgcgagtcagcatctgcttggtggatgcaccntccttctgacccagagcaggnacgggctccc

SEQ ID NO: 359188 - DNA, 687 bp, Homo Sapiens
  misc_feature (509)..(509): n is a, c, g, or t
  misc_feature (511)..(511): n is a, c, g, or t
  misc_feature (525)..(525): n is a, c, g, or t
  misc_feature (572)..(584): n is a, c, g, or t
ggagacttgtagaagaaacagtatcaagagcctacattggggcttccaagtgatgccccaaggactcactaaaacatcagaaaagaacatttttaaaaaggaatccattacaggggtgctagaaaataagaaaagatgccatctatacagcaaaagtttcaagaaattccaagaagataaatttttgcttagaatctcaactttaaggccgagaactgttctctaaagcaaggttccccttgagcaaggattcttaacctcaggtccgtggggaagcaattgccaatcaagagaattctggaagttcatgaagctggggagggggtgatttacatatttatttgcatttacctttagatgaaatttagcatgttttcaaatacaaatgtaagcaacaaaccagagtattggtagcaataaccataacttgtcatcaatagaaattcatcattttcatatcatctaacagttactacagatatttggaaatatgtatactcgtccctagntngaaatgataatagntactagactcaccattaaatcttggtatcaataaagaaacatagctnnnnnnnnnnnnnagagatgggatctagatatgctgctctgactggactcctttgacctcaagcaatcctcttgcctgcctcctgaggttgggatacatatattattataccacac

SEQ ID NO: 359189 - DNA, 717 bp, Homo Sapiens
  misc_feature (691)..(691): n is a, c, g, or t
caaaaaggtaaaatcaagcaattaatacccagttgaatattgaaaaccatgtcaaccgttccagaaaaattacaatgtgcttaataataaaaaagattcctaattcatcataagaaaatgcaaaaactatgctgcacaccatttatcactaatggattgaactgtgcggtaaaatattcttttatattgtcagcagtagtgtaaaatggaagaagcacaatgcttttattcataaagaagctaggaagaaataaaaactaataaaaattgttaccagcaggagaggaacaaagtttctcagtgtatacctttatacaaggtttgaggttttttctgaactgtatgcatgtatgaagtaatttaaaaatcttcaaagtaagtgatgaaaattaatttgtgaaatgaaccatggtggcggacacctacacaaagagaaatacaccataacaacttattatgtgtgcactacaaccaacaaagatccgataactgagaggggtgagttcagtgactgctattaaaaaagtatagtacatagagcaaaaaactaaaacattgagaagatttaaaaaattgaaagcaacagactgttttctccacttttaagaatctctgaaacaccatacatactacctgaaaaggtaatgtagttgtaagtttctttctcataaattattgcattcagaaatanaatcctcgtgccgaattcctgcagcc

SEQ ID NO: 359190 - DNA, 694 bp, Homo Sapiens
  misc_feature (238)..(238): n is a, c, g, or t
  misc_feature (243)..(243): n is a, c, g, or t
  misc_feature (247)..(302): n is a, c, g, or t
aaacggaaagggtctgcaaggccatagaatgcaagccagtcaaatgtctaattcaccttcacaaaaatgtggattcaattgtcctctcaaggcggcattcttaacccagataatattaagagctaaggaagttatcccatccagtctgtgattgaatctgaagagaagatggtctaaattggctcgacatccttatgagttccctccctgttaaccaaaaagtccccaggcccctccntcatnatgnnnnnnnnnnnnnnnnnnnnnnnnnnnnnnnnnnnnnnnnnnnnnnnnnnnnnnnnccgcctgccaccccacaacatacaccttaggtttgggtcagccaacaactcgtaaccccagcgcagctcctgaagccccagacaactaccttctcacctaggaacttaggcaaagctggaatttccaagtttgtcacaagacagtttgttgggtgcatcccaccccgttgctcccctagcgaattgcatttctctgtgatgactttactcttatggaccttctacattctcaggaatttaatggccctaatttgcactagacccatctaactccaaaagtccatggcaagaagcaatttgtcatttgctgagaactctctctaatgttgcactagggaagaaggttggttggtttgtacaatcaaaatttcttactgaggcttagtaacctc

SEQ ID NO: 359191 - DNA, 693 bp, Homo Sapiens
  misc_feature (45)..(45): n is a, c, g, or t
acggctggctgaatgaagcacacagaggtgtgctcagccccctcnccaaacagtgagggctctgcgtgcaatgggggtcacccagagcaaagagcggaagaatcgcatcaatgtgccagcgtcaaagacagaggcaggtcttcgccatgctgccctctgcttccgggatagaacagcaggtctgggaagcggctcaggtgtggagtcggccctaagtagatttgtaaggatgaagtcttgccacagttattgaatactgggcttgcccatgcaaatatctttctttcgcctcttccatcaccatcctgcctcctccctttcagctgcagggaccaagtctgtgttctatccttgccagttcctgccagaagaatgcctgttaggacaatcatgatggcctccagtgccccttccgcccaccctgttccctgagatggcttcacaaggacaggaatccaactcctgtgggaatccaggaaacgcagttccttcacaatacagaggttgctagcgcagcatcttaggcacagctcctaagaggaatgtgggaaaaactacagctccatgcacgtgggaacttcttgccactcttctccaagcctagcttagctccatgattacatgataagcaggagcgaggttttagtccaagaatgtaaatgggagattcgagtctacaaatgcagacctcac

SEQ ID NO: 359192 - DNA, 706 bp, Homo Sapiens
  misc_feature (74)..(74): n is a, c, g, or t
  misc_feature (81)..(81): n is a, c, g, or t
  misc_feature (150)..(150): n is a, c, g, or t
ggtacaaaatgcctataaattaggtgcctatttatggatcttcacacatacgagaatatacttgagcatcacanccttttnccaactttcaataattagagtatttgaaaaggtttagctttccaattatttttcccaagttaaaattcnatatttccatctccattttcttttctctcttaaggattcttgattttattctccagctcggaaatgccaagcactttgatttcccatgagatgcttttggaaactactttaatatccagattttatgatctgtaattttctaggttcataagaaaaacaaaggactattcctcacatgtatccaaattccctgagggggtagggaataaaaggtagggggagcagggaggcgattaaccacaggctctaggtagaataccctgaaaaaatacaaataatcttgagtagaatagatctgtgctatttctaggcactatgaaaatttgcgtctttgtacaaacacagaataagatttttaaaatgtgcacccttaagtaaatataaatacacctcacccacaaagccctctgtgttccaaggtcaagtttaaaaatattataaagtcttcagaataagtgctgaaaagccaagcaattgaacatgaacctgttatatggattcttttcttttgctgaggcagagggaggggggaaaaaggaatttcaaaagaaatctg

SEQ ID NO: 359193 - DNA, 697 bp, Homo Sapiens
  misc_feature (49)..(49): n is a, c, g, or t
  misc_feature (59)..(59): n is a, c, g, or t
  misc_feature (160)..(160): n is a, c, g, or t
gcccacctgtcgcgtgcggctggcctcagttgtctgcaagcgagaagcnaggcctgtgnccacgcgggacgaccccggcccaggggtcgctggagtggtctccacacggtgccccactttgccccagagggtccggcggccagagactgcgtgttcctgnaggctagtggccggggtagcctgtgctcctggtgctgcgacgccgaccgggcgtgcgtgggctctgcgccctggcacggtgctgcgctctgtggtggaccagtgcactctctggctttgcgctcttcggctggcgtgcaggtgtccccccgaggccgccgcggcccgcgggggttgacacctacgatccctccttcgcgcttatgccctggtgggcgcgttcagctgcagcttcgcaagcatggtgcagccaaacttttccaacgtggaatttgcacctgccccggtgctcccggactgcctgctgggcccgagccgcgtcatgagcagcattctgaccaaaggctggtcccggctcagggcttcgcctggactgaggtggcctaggggcgcaggtgcagggcagtgcaagacctgtagagaggcggggcgcccatgggcatgtttagcttcggcatcgcccaaggcgcaggcttcgggacccaggccgtagggcagccggcggcagatgagcagccctgagggcccaagggtttgg

SEQ ID NO: 359194 - DNA, 659 bp, Homo Sapiens
  misc_feature (25)..(25): n is a, c, g, or t
  misc_feature (98)..(98): n is a, c, g, or t
  misc_feature (473)..(481): n is a, c, g, or t
aaaagcccccttgagagtaaaaacncaatcccagtgttctgaaccacatctggaaaaagagctaaaaagtggcagtgaatactaaattcatagatttntgtgtaaccctctagctttcataatggaagcttaactcccaattagctttggttgcctactctaaattctgtctggatcaccatatctagagggtaagtgttccatcttctgccagaattaagaagggacagtcggataaaacaacatgatatatgtgaactttatttgcgtaactatgaaatattaaacaaatgccagattaatcaacatataagaacaaagtatactcagaatttagaagacaaaactaaacatgaatctagaaagggtaagcatataatggatgacatctctatctataacagtcatccaccataaaaagaccatttgagttcctctatcccaagtccaacaaggtaattaggtatttcagnnnnnnnnngtgactaatttgtaattactcacgcaatatttaaaccacatgttaaaaacgggatacatgttaaaacatgttaaacatgttaaaaatgggatagtgtctacccatgtacctacaatcaaacataagaaagagtcctccatgcagttaaatgttccttatatgtcattgaatgattgcc

SEQ ID NO: 359195 - DNA, 432 bp, Homo Sapiens
agaaggatgagatttcaataggtgaagatacgggactgcgcagcgaaaaaggggcatttcatgagcaacacgtagaacttagactctggcgacaaccaaggttcctattccattattcaccagctgcagaccctggagaaataactgaatgtcctacacctcacttttttcatcagtaaaatgggatactagtaacatctttttcctaaagttggagtaaggattatggaataatctatataaagtatttagcataatgcttagtaagtggtaaacatccaacagacagcaaatgttagctagtagtctatgtgtttaaagaatggtaagcagtcaagttaggcttccagtcctcttaaagcaaaataagaaatgtggtcgaaacaataggttgcagtcagattgagaatgaagttcatgtctaccttagaa

SEQ ID NO: 359196 - DNA, 462 bp, Homo Sapiens
caaggggtagtgtattggctgccctaagaaatcaatacaaagaatgaatgaattagcaaataaatctgaatgtctgggaatgagtaagaagaacccaaggtgagaaaggaagtgtagggaggagtgaaaagaagttttgcgatctgtctgcacaactcaactcaaatagaatctctgctcccgggttgggccctgagcctgggactaataaggagatgactgcagctctacgacaaaggcaagcattgggctgccttcaagtatccgggctgtaaggagcccaggatgaggttttggtgagtatgtgagagagagacagatgggtataaaatggaaaagctgacttgggtttctgtacctcaggtctggaagacactcaggttgggctgtctcatggaatatgatgggggaatccatatccaggcagagaactctaagaaactccaatcgagactagttctc

SEQ ID NO: 359197 - DNA, 621 bp, Homo Sapiens
ccgtgatgcgagagaaccttgcttggccacccctcactgtcagacacgaaacaaggaagccatgtaagcagttgtttcgttaatcccaaataaggaatagcaagttgtcagtaaaaaatagaaatgatggagtataggtaggatattataaaaatattcccatttgctcaaatcataaatgcacattctagacgtgtcaagtggaaattaacagcatataaatgcatttttaatggtttgagtctcagcttattacctaagtctatagaaagttatcacttctgtcaataagagtcttttgaatttgatacaaaatacttcaaacctacagagagggacattacatatagagacattaacatagagacatcaatatagagagggacgttgcaaacaccagtatactcatccccagatataacaaatcttactatttaccatatttgcgttaggttctttttttagtagatcaagacatccaaaatttcatggaaattttatgtgcattgctaggcccctgggaataagataataaaccttacatttcttgaaacccacggattcataggtcttaagcttcctatgtactttcaccaaaagcaacctgtgtgcctcagcctg

SEQ ID NO: 359198 - DNA, 696 bp, Homo Sapiens
ttctttcagctctcctttctcagacagaggtaggctttgcagactcgccagccggtctttgtgcaactgctgcaagggcgtgttcagggtttaccactgcaactggttaatgccaagccaaaaagcctccgtggagagctgtattcgggtgctgtctgatgtagccaagagccgggccattgccattcccgtggacctggacagccaagtcaacaacctctttctcaagtcccacagcattgtgcagaaaacagccatgaactggcggctctcagcccgcaatgccgcacgcagggactctgttctggcagcttccagagactaccggaatatcattgagagattgcaggacatcgtctccgcgctggagatgggagcaggtgagacgcagagccccagtactgagaggaggaagccctcttacagggccccttgcccaccccaagtccgtgtctgaaacacggagcgggtgctgcttcaacccgcatttaatgctgtgtaagtagcgataaccacgtacgagtctgtctggttgatttctaatgtgactcctctggtatttcctcctggtaataaatacaagtgtgacctttcagattgcatatctcaaaagtaacattgctaatgttttataataaaatatattatgtgtgttttggttggtgaaaataatacagactacattttaaaagataa

SEQ ID NO: 359199 - DNA, 1018 bp, Homo Sapiens
  misc_feature (763)..(826): n is a, c, g, or t
  misc_feature (828)..(860): n is a, c, g, or t
  misc_feature (862)..(866): n is a, c, g, or t
  misc_feature (879)..(891): n is a, c, g, or t
ggctccacagaaatacctcatcctagcttcagggttctctctcctgagcctagatttgccagggtcttggtgccacgcaaatggtttcaaactgatctctatggataaatgctgatgttggttaaagaactgaaaaatgtgctcaactgtttcatcttttctattttatttttgtaatttatattgtacacaacccaggaagtaactattttggacatgtatttttataaaccaggtaatttactattatcctggaatttagactaggtttgtttcatttgttgacttagtttccagccaagaaggaaacgactgtctcccccatgtccaggtctcagtttcaagggcagagtccagagagcagacagagttctgtgagagcaggagagcagtctggaaaccctggctgtgcataccgtgtcagccgtgggcctggagatgggagcaggtgagacgcagagccccagtactgagaggaggaagccctcttacagggccccttgcccaccccaagtccgtgtctgaaacacggagcgggtgctgcttcaacccgcatttaatgctgtgtaagtagcgataaccacgtacgagtctgtctggttgatttctaatgtgactcctctggtatttcctcctggtaataaatacaagtgtgacctttcagattgcatatctcaaaagtaacattgctaatgttttataataaaatatattatgtgtgttttggttggtgaaaataatacagactacattttaaaagatnnnnnnnnnnnnnnnnnnnnnnnnnnnnnnnnnnnnnnnnnnnnnnnnnnnnnnnnnnnnnnnnannnnnnnnnnnnnnnnnnnnnnnnnnnnnnnnnannnnnaaaattttttagnnnnnnnnnnnnntcgaaaaatttttttaaaacatttctcttggggggccggggccccatgagggaagggaaactcggcctttattgtttctcccgaagaaaacaccgggcctgaaaagggggggtgggtttctcccccc

SEQ ID NO: 359200 - DNA, 695 bp, Homo Sapiens
  misc_feature (111)..(111): n is a, c, g, or t
agcggagagtgctatgaaatcataatgtgctctcccaaggatcgtaatggatgaagttgtggttcccccaaaatcttatgttgaagctgtaatccataaggtgactgtagnagacagggccttaaaaaaggtaattagggttaaaaaaggtcgtaagggtgggccctaatccaatggggctggtgtctttcaagaaaaggaagagacgacaaaagatgtgtgagcattgagaaagggccatgtgaagacacaggggaaaggtggccatctgtaagttcaggagtgaggactcagagcaaccaaacctgctgacaacttgatcttgaacttctggcttccagaactataactaaatgaatttctgttgtttaagccagctagtccacagtattttgtcatggcggcccaaggtgactaatacagatgctttacttcctttgccctgaccttccttctttcctattgctgtagtaaaacacctactcatctgcctcagtcaacccctgagcaagtctcatgaaatttatctgttattaagtaaagtcactattaaaagttaacaccacttggtttgacagcaaatgcaacaccagctacatgctgctgcttaaaagcaaaacacccaaatgacaatgtttttattttaaaataaaaggatgaacaataaaataccaaaaagatgcaccagaaagtac

SEQ ID NO: 359201 - DNA, 709 bp, Homo Sapiens
  misc_feature (582)..(582): n is a, c, g, or t
  misc_feature (586)..(586): n is a, c, g, or t
  misc_feature (643)..(643): n is a, c, g, or t
ctcagcagcggccctgggcctaggagcacagcacaataaagccaggaaggtcccggctcaagacctcagtctaagacgtcaggagcccagaggagaatgtcacagcctcagcagagagctgggggctgcatggcttgctggggggtgcagggagtggggaacatctcactttcataccacccaggcctcctataaaccccagctccagccagaggcccatccatggcgctgcactaaaccttggatgcagtgcgaagtcatttcgttgtcattgcctgttaggaccttatagacaccatagagcccaaccccacattttaccctagggaaactgaggcccaaagaagggtgatgacaactcaaggtcacacatagcggtggcaccccctccgattcccagtgtactcactctgactctcattctgactttacgacaagacagggagagatgagcctaactctaccgtccaggcgagcccaggaaggaggagctacccctttccaccctcacccctccacaccttctagtccaacttcacaccagacggagacctgaactctcctcttccgagagacaagttntcgncccggccccctccaatagtgcttttggccagccctggggagcatccatgccccccgngcccactgctctctcctcccactctagctctgcttgcacctggctatatcttcgcttctttggctg

SEQ ID NO: 359202 - DNA, 211 bp, Homo Sapiens
aaaacacaccaccacacgtaacttttattatagtatattgctataattattctattttgttattaatgttgttactctctgtgcctaatttattttaactttattgtagttatgtgtggataggaatatagtgttcgtagggtttagtactatctgtggctccaggcatcacctgaggtcttgctgattcccctgcagacctgtggctccg

SEQ ID NO: 359203 - DNA, 627 bp, Homo Sapiens
  misc_feature (96)..(376): n is a, c, g, or t
accaaaacctaactgaggcccaagaaggacctccacaaaaggaatggcaaaaaaaaccttgtgtgaccaaaaccaagggatttgtccattaagggnnnnnnnnnnnnnnnnnnnnnnnnnnnnnnnnnnnnnnnnnnnnnnnnnnnnnnnnnnnnnnnnnnnnnnnnnnnnnnnnnnnnnnnnnnnnnnnnnnnnnnnnnnnnnnnnnnnnnnnnnnnnnnnnnnnnnnnnnnnnnnnnnnnnnnnnnnnnnnnnnnnnnnnnnnnnnnnnnnnnnnnnnnnnnnnnnnnnnnnnnnnnnnnnnnnnnnnnnnnnnnnnnnnnnnnnnnnnnnnnnnnnnnnnnnnnnnnnnnnnnnnnnnnnnnnnnnnnnnnnntgacatttcttccatttaagtaaaagtagttgaggaaacgaccaggtactgatgcaattaagtttacaagtttggcaggaagaatttgaatgaatttctaatgatgacttctgttttctctaagtatcaggaggttaagtattttgctaagactgaagagaagggactgaagagagtgaaggtcagaaacaggcaccgtgaagactaagtgagctgaccacaaaaatctaggcagatcaggcaatgttaag

SEQ ID NO: 359204 - DNA, 664 bp, Homo Sapiens
  misc_feature (425)..(458): n is a, c, g, or t
cagggagggacctacttagaaaaatagcagggacctcttattgctgcagagaaatgccaagcttcccatcagagcgaaccagtgagcaacaccctctcattcttgctaaactagccagtgaagcaagcgttgatgggagagccatggctgggcagcatataacactctcacatacctccttcctgggactgctctgttcacatctagaggtgtctccatatatgtgaatcagtgatagcaacttaatatggtgaatccctcaagtgtttagcactctgagaagatttccagtgaaatgaaatttttaagtgcagggatcctcccaccacctatgacttgttaacaggcacctactgtccacctgaaacagtattaggttggcggaagatttaaaatcagagatatctgggtatgcccctagttgnnnnnnnnnnnnnnnnnnnnnnnnnnnnnnnnnncagagattactttcaaatatgttgtctaatggctaatgaggtcatccaaaacaacagaaggcaagcagggcagggattgccatttcattgtacagagagggaaaaaggttcaaaggtaaagtgatttgctccagatcaaagttcaggtcttgcttttctcacttccttactagcttgcctaaacttaaagagcatatagtcttttg

SEQ ID NO: 359205 - DNA, 725 bp, Homo Sapiens
  misc_feature (482)..(482): n is a, c, g, or t
  misc_feature (618)..(618): n is a, c, g, or t
  misc_feature (688)..(688): n is a, c, g, or t
  misc_feature (709)..(709): n is a, c, g, or t
ggatcccccgggctgcaggtcatcccgccgaaggagttcttcacctgccccccctgttgcagcaggatcagccacggactttgcccgcctgcaagctgcgtggccacgtcggtgaactgtgcaggcagcatacgcatggcggctttatactgcccgacggaaatccccgctttctgtgcagccagcgcctgtcggctcagcgactgttcaacgactgccgctgtttttttcgcatcactttccgtaccagaaaaatgacgcctgactctggccatctgctcgtcaaatctggccgcatccagactcaaatcaacgaccagatcgcctaccggttcagccataccggactcctcctgcgatcccttctgatactgtcatcagcattacgtcatcctccgtcatgtccgccacatccggggaagcggggataacttcattcccgtccgggccaaagcggacacctccggcaagccctgccgctntctgcatcagcacatcatcttcaggctcttcgtcagcctcgcgccggttcagcagactgaaatccagcggatgcatatccggatcgctgaaaaacaggctgagcacggtgtacgtcagcccggaaaagtgcatatncagcagaacatcatgataatgggtactgtgcggtgccagtcggcatactccgtggatgacaatcccgcangcatggcacgccagtcgggtncgcccatctcgcgccg

SEQ ID NO: 359206 - DNA, 360 bp, Homo Sapiens
  misc_feature (18)..(18): n is a, c, g, or t
  misc_feature (28)..(28): n is a, c, g, or t
  misc_feature (35)..(35): n is a, c, g, or t
  misc_feature (44)..(44): n is a, c, g, or t
ccatatgccccctgtttnaatgtttctnacatctngtttttacncatttctgactggacaaagttcttccaaacaattctgagaaacaaaaacacacacgcagaattaacaattcttttccctgtgcttcttatgtaagaatcctcctgtggcctctgcttgtacagaactgggaaacaacacttggttagtctcttttaagttacaaaaagccaattgatgtttcttattctttttaaattttaaatattttgttataaatactcacaggataccttatttccctagctatcatctcctgacttaatgttttttaaacccaccaatataaatttaattaaagatatatgttgtaaggat

SEQ ID NO: 359207 - DNA, 682 bp, Homo Sapiens
  misc_feature (25)..(25): n is a, c, g, or t
  misc_feature (44)..(44): n is a, c, g, or t
  misc_feature (437)..(453): n is a, c, g, or t
gcccacaggctcgggctatcttccnattctctcttataaaatcnactttaccctttttcatgtcacatcacgctgtgtctaaacctccgttctaaactccaaattcctgcggccagcaagacagcatcttgtcagatctttagcgccttgaaggcaaggcaaagggactagttacgcattatatgaagatgtgtttttaatgatcatcacattgactaagttcatgatgtgctcacgaaatattgtttaaattaactggaatgcgatgtgtttatgtcttctttgatccttctcccatcgaacttaaagtttatagtaaaactaggaaaggagttcaataatgggccagaaaatgaaagacacactaaccaacaaaaccatgaacactgcttatttaaaatcactgtttcagttgagctcagtactttctggtaagnnnnnnnnnnnnnnnnngtcagcaccaggcatcacgtctgaggcaggagaggaaaataaacacaagatacaagtatccaccaaggaatctagaaaaacctgcagaaggaatggcatgggagaaaatgtgtatctggtttacaatgcactctgtggttcaacaatgagtacccactagtaatcttattttgtgtggtatctggagtactgcatggaaaagaaattgcaactagacatatatacaaac

SEQ ID NO: 359208 - DNA, 682 bp, Homo Sapiens
  misc_feature (42)..(42): n is a, c, g, or t
  misc_feature (98)..(98): n is a, c, g, or t
ctgcatcaaggccccagctctggtgccctgggacagggaggnacctctgatgaagacagggctctcccagccaggcttgagggagtcgggacgcagcnccagagctctccagtgggctcccaggcaagaagccggagtgggtgaaagaagggggtctcttcgacacagacgcctcactgtgcacaggacactggaggggacgagccagggaatgagagcagctgcagcacatgctcctcaggccaggaggaacgggttacagggcctctgggtcagccagcagagccactggagggggatgggaaggctgtcgagggccctattcctctgctgccagccccaggagccaggtctccactcatcctcctgtgcgcagaccccgtgcctagcatcgtggacatgagaggagaagcgcaggccctgccccaggactcccagttagaccctcgtgcgggactctgctgcgtgggacagtgaggactaccctgctgggcggtgcagacccagccctcctccaagcttgcatgtcctggccatgggaggccccacagggccgcctgcgggacatgcactccagtgagtgccatggaaaaagcaggggagggagaagacacagaatagaaacttggctgagggcgctttcaagccaacaacgtgagggccttgggactgaggatttcac

SEQ ID NO: 359209 - DNA, 701 bp, Homo Sapiens
accggggtgccatatccaagtgcccacttcttcctgagtgggtggaatcagaggccagctgaaggtgtaggcatcctagggaaccgtaggcgtgggtctctggctcttgagggtctgagtccctggggcaaagacccactctctttgttggtctagaaaggcaaggtggatggtcacaggggctcaggactgaagctggatgggaacagtggtgagataataatcaggagttcccagggttgcctgtggacaaggcacttccttgaacccgtagcctctgttatgttatctatataacgggtaaggtctctggagacccttctgttctggcattctgttgcactctggctctgtgaaggtggaatctgctccaccaagatatagcttgtttgcctggtgctggagggggcacagctttcgggatccgagtcttggaaggccgactgaagtgggctgggcaagaggcctgggtggggcagcagcctgggccaggtctggacagcgcctggctgaccaagctaaggctgcctcgggctccagacagctcgccctgctgctgttccacctccggccgtaaagaatggtggggacgctcttgcaccgcgattcgagcgcaccgttgggcttgccaagcccttgctcaatctccacgtagcgggagcttttttgcacgacctgtactccaggagtgggactcgtgc

SEQ ID NO: 359210 - DNA, 667 bp, Homo Sapiens
  misc_feature (65)..(65): n is a, c, g, or t
aaagtataggtaatccaaaataactgtgtgcctatatggggtctgaacaatgggcatcaaagatncagcagtacaagcaagagttcccttcttaaaggaacttagagtccagtggaagaatcacacaaataaattaataacgagttgtaatttttttctgtttgatgaaacaatcaccatctctcaagattacatcataagaacaggagtatgttgtgtttttgtttttaaggttcactgatttgttgcaagcacaaaggacagtgactagcatgtcgcaagtgctcaataagtatatttcttgaatgaacaatgaataaactcaagtatcagttcctttttgaagtgttctttaatttttcagtgaataaagcagacccatctttttccatagtacttttgctgtggaattgtgacagatgacatattagcatctagaagggcaagagttatcggacaaataaatatagaatgaatgagtgaatactgaataaacgaatatagaatgtaacggaaactagcagacagatctactaggtatatggactcaagttgtagttcaacaaaacattttccttctagtcctcccataagttaaacacacagagaccagtatctttaaacacaatagaattgcataacattaatattttataaaaactttttc

SEQ ID NO: 359211 - DNA, 1448 bp, Homo Sapiens
gaagcacaacctcaacccagccagaaagtacttcccccagtgggaggctcccaccctggtagatgaacagctcctggagaactacctggatatggagtacttcggcactatcggcatcggaactcctgcccaggatttcaccgtcctctttgacaccggctcctccaacctgtgggtgccctcagtctactgctccagtcttgcctgcaccaaccacaaccgcttcaaccctgaggattcttccacctaccagtccaccagcgagacagtctccatcacctacggcaccggcagcatgacaggcatcctcggatacgacactgtccaggttggaggcatctctgacaccaatcagatcttcggcctgagcgagacggaacctggctccttcctgtattatgctcccttcgatggcatcctggggctggcctaccccagcatttcctcctccggggccacacccgtctttgacaacatctggaaccagggcctggtttctcaggacctcttctctgtctacctcagcgccgatgaccagagtggcagcgtggtgatctttggtggcattgactcttcttactacactggaagtctgaactgggtgcctgttaccgtcgagggttactggcagatcaccgtggacagcatcaccatgaacggagaggccatcgcctgcgctgagggctgccaggccattgttgacaccggcacctctctgctgaccggcccaaccagccccattgccaacatccagagcgacatcggagccagcgagaactcagatggcgacatggtggtcagctgctcagccatcagcagcctgcccgacatcgtcttcaccatcaatggagtccagtaccccgtgccacccagtgcctacatcctgcagagcgaggggagctgcatcagtggcttccagggcatgaacctccccaccgaatctggagagctttggatcctgggtgatgtcttcatccgccagtactttaccgtcttcgacagggcaaacaaccaggtcggcctggcccccgtggcttaagcctaagtctcttcagccacctcccaggaagatctggcctctgtcctgtgcccactttagatgtatctaattctcctgactgttcttcccaggggagtgtggaggtcttggccctgttccctgtcctaccaataacgtagaataaaaacataacccactgaaacaggttttgtggagccgcttctcgtttgctggtctttttccttcacattactggggttagaacaccagggcagggatgaaaatgaccacatccatttggatggcacccaacatagtgaccccagcagctgacacttcatgatggagccaagaagacagagaggcttcgggggttgtgctggaagcatcataaaaagacctgggggtcaaaatactgggctaattgtcttctcatagaagggacaca

SEQ ID NO: 359212 - DNA, 688 bp, Homo Sapiens
  misc_feature (78)..(78): n is a, c, g, or t
  misc_feature (81)..(81): n is a, c, g, or t
  misc_feature (94)..(94): n is a, c, g, or t
  misc_feature (97)..(97): n is a, c, g, or t
gaaatgctcagagaaagctcgtctcaaatctttattatttcccccgaactggtaccatccaccattttcctcaattcnatncaactctccctcnttntgttaagttgccatgtgctgtgccttttccttgtaaggcctctccatttgtgtgaagtccttcctcttggacgtggactaccttctactctgtattgtttgtgaacatgtggctgcatctgtcctgctggataagaagccactggtcactggcccctaaagcccctctgagcatgtcgaggagggagagttttcatgagtggcttcatggagactggcatctgaggcatctagggtgagtgtggttcttccctgtcaatcctcatccctggtgtcgtccaaacagcagcaacaattttcttcaactcaagattaccatattgctcctatttataaataataataataaacatcagaaagtgactttgtaatcaataagtcactctaggataacaagcatcttggacacaattggtagtactagttgagggccacagctattttttgtggggaggcggggaataatgtagaaaggagtaaaattccatttttattaaatcttgcaaaaaagtctaggcatagaaatgaaattgggatgcacgttgaggcaggggtagagatgaaaataattaggattgacatattatctgag

SEQ ID NO: 359213 - DNA, 426 bp, Homo Sapiens
aacaaggacacaaaatacaatcaaagaaagaacattgaacaacagaaaagtgacaggaaacaccaaaagcaaggacggagaaggaaagttgcagtctgtttggctgggattgggtgggatttggaaataagcaacacagagagtgataagtgagagacttccagtggcccacatccccacagtagaactgtgcaatcttgccaaggggagagccccttgaacctcctagtccctgaaactaacacaggaagtttccaggatactgtgagatgaaactgctctagcgagtgtgcttgcactgcttcccacaccctttctgcgatctaagcagctacaacaagttgtcattttcaaacctagcctttggcagactgcacactcttctggggcccaacagtattgggtctgaggtgtctggaaaaatta

SEQ ID NO: 359214 - DNA, 509 bp, Homo Sapiens
  misc_feature (461)..(461): n is a, c, g, or t
  misc_feature (465)..(465): n is a, c, g, or t
tgcaaaaactaaaataaacgacacagtgcagtgtatgcaggaaaaacacaaaaactaagataaatgacacagtacatttccacagaatgggtccacatggcagacttgccataggaagataacagcctccttctctcaccctcctcagaagccgtgccccggtggtaaccccagcctttccctggctcatgaggaaggcacaaacacataactgaagaacgctgacaatcctgtgggtcttattgatgaatcacagctccgaatcacagccccacagccctatgtatttttttcagatgacaaaccacatactggggaacagataagagcagcaagacttccgagaagaaagcagtcttataagggtgggtccatgaatctctatctatcacaagtttagagggatgactaagttcccttcagaacattggctgagatagaggttaagagggtacgatggntggntgtcaaactggctggtaatccaagtcatcactgagtgagaggca

SEQ ID NO: 359215 - DNA, 422 bp, Homo Sapiens
  misc_feature (123)..(357): n is a, c, g, or t
aaagaattcatgtcacctataaagacacatatagaccaaaaataaagggatggaaaaagatatctatgcaaatggaaaccaaaaagagcaggagtagctatacttatattagacaaaatagannnnnnnnnnnnnnnnnnnnnnnnnnnnnnnnnnnnnnnnnnnnnnnnnnnnnnnnnnnnnnnnnnnnnnnnnnnnnnnnnnnnnnnnnnnnnnnnnnnnnnnnnnnnnnnnnnnnnnnnnnnnnnnnnnnnnnnnnnnnnnnnnnnnnnnnnnnnnnnnnnnnnnnnnnnnnnnnnnnnnnnnnnnnnnnnnnnnnnnnnnnnnnnnnnnnnnnnnnnnnnnnnnnnnnnnnnncatcagagttaatctttactatagaacaatgtatctaattgatatttctagaacatttctcctgg

SEQ ID NO: 359216 - DNA, 540 bp, Homo Sapiens
agggccaaggagaccccaggccaggaagaagaaccggacagaggctggttgggggtgaaggttggggaattctgaaccagtggatccgaccctctgctgagttgcagggcctacaggcagccaggcaaagcaggcaagaagccgtcccctacacaaagggaaattggcccctcatggtgggacaaagcccagaacacaagctgggccctcaaccacccttctttcctccacaaccccctcccagggatggtggcatccgaagccagcctggcaagggaactggttgccacgtggggacttcccggagctgggggtgatgggaaacagggtgacgggaaacgtcctgaggttgcttcctccccttttgtttggatctcagactgacctgggaaccaactgggcagccatggggtattctgatggtggggagttggaggggaagaagggacctgccccatcccctcaggctgctttgcaagttaaaatagctgtgaagatctatctcccagaattctaaaagctaaaataccttttgaacca

SEQ ID NO: 359217 - DNA, 678 bp, Homo Sapiens
ctgatttataaacaaggttcaatatagaatgatataactgctgcaaccggcgctgccacaactacctgtgcgcattgtccaggggcctgaggattgatagcccccacccctgtgccactgcatctagcgcccatgtgcaccattggggggcctgagaataggcccactctgcctgcactggcacatgtgcacatcatctgagggtctggagatcaatatatgccactcactggcatctgcaggcaccgtctgcagaccagaggtaaggccagccccacctgccacaagtgcactggcacctctgcacataatatgggggcctaggaaatgacccaccctgctccctgccactggcccctgtgcacaccattgggagggcctaaagaaaagccaaccttgcctgtggcttccattaccagaaccaacatacaccttttagggcactaaaactaggcttgctttacttgttactgccacttgaacaggtcgtttgcttggggataaaccaatccttccaacaagaaccaatgtgcacaattttgggggctctaaggaacgggcttccttgtgtgctactaaggtcaatgtttcttggggcccttgggatttacccaaatttctttatcaccattggtgtcttgttggacttttgggcctcatggatctttcttcttgcct

SEQ ID NO: 359218 - DNA, 726 bp, Homo Sapiens
cgccccccaatcacctctctgtctatacgaaggattataccatctttaaatgttccaaaacctaagcgaacttgttgggaacctccgtcaagctttaagagggaagtcacatcctgtcagatagatctttattatgtgcttcaaaacctaatgaagaagaatcctttcctactcacacttccccgatgtggggtgagaataaagtcatgctttggcaaatgtggtccctgagaccatctgtcccttgggcagcattacatacctgcccaattcctgctcctcatggaagcatctgggttaaataagtgtaaacagaccagctgagaatttgagattgtttctttccacttaagacttagagatctttgcttttgttcttgttttctacgttttattatgtcctatttggctctcttcaattcagaaagtgttttaaaataatcaaatagcctccatcctgtgcctggctttgtgttctagggacactgcatagggacaatttaagcccaagagcagcccacaatgtgctcacagtccagggaagagatggccacgtagacaaggaagacccacaagcttgcagagccacactatctgggatcgtcactggcttttcattttactagcatgagtttctctgaagttgttctttatttatagcactttaactttgctcgtgccgaattcctgcagcccaagggatccactagttctagatcgtccacc

SEQ ID NO: 359219 - DNA, 449 bp, Homo Sapiens
agttcatcaagttcacaaaagacaagatgaacatacaaaaatctattatttttatatatattagcaatgaacccatgggcatcgaggtcaacatatatcatttacagtgattcaaaaataaaatacttgtgtgacaaaacacagagtaattaaatgttgtcaactacacaacactgaagaatgaaattaaaaactaaataaattatgaatatatatatatacatatgtaatgttattggattagaaggctcaacatagcaaaaatgtcaattttccaaaaatgatgtagagatttaacaccatttttatcacaatctcaggaattttttaaaataaatattcgagtttattttaaaatttatacggaaagtctaaataactaaaatgactaaacacttttgaagaaacaagaaggtctaaaataaaaaatacaaacaacctcaaacaat

SEQ ID NO: 359220 - DNA, 449 bp, Homo Sapiens
gatgaggggacaactcaggaccagctctaagcagtgcagatcaccacctaaggggagggtcatttgaattgactgacatgccagcctcccttaggatcttaaatgccacccactgaaatcatttttcctgggatcttccatgtttagggggctgcccaaacccccgggtcagtatacggaacctaatgacaacaatagacaagagttagtgagtccttccatgtgtcaggcccaatgataagagcttaacattaatgttcactacaaccatatctatggtattatccctttcacccccatcattctcactcccttaactgtgctgcatgtttttcatagcatgtactcttgctaaaattatatatttatttgttttattttttgttacctgactcaaacttgtgagctctatgaaggaactctgtgttgttccctcataggcggttgct

SEQ ID NO: 359221 - DNA, 679 bp, Homo Sapiens
  misc_feature (459)..(459): n is a, c, g, or t
aaaaaaagcatcacatctagaggacttgataccaactgaagatatactctaccttgggcttctgcccaaggtagaagagataactcttcagatatctctttggtttttctatgaggaaaatagtccatttatgtgtgtagacacaatctataacttttacatcatcattatttaaataaaagagacaataaggtcattacagattagttaatttgaatattttgaataaactcaaatgatgtagtctctctgaacactttcttttccccttagaaaatctctagaggaaaaacatgtgggtctcaccaagaacagtagataaatgccaagtaatgtgaaaagcctataatgtgaaaaatatattctaaagtaacttgaacaataaattatgagtttcagattatgaaatactgaggtaagataggtaatatttaagccagaatgaaggggggaaccagncccagcttctcttctctaatcatattcccagcaagaagggccttatccctcctgttagaaagtccatgcccaagaagtcctgaggctcaaaggcagagagcctaagaatggaagttgatattctggatcttggatagatcatcttagttctggagttttaggttagagtacaggctttgatcaaggcctgaatctatgtcagaatctatgtcattctcct

SEQ ID NO: 359222 - DNA, 639 bp, Homo Sapiens
  misc_feature (451)..(451): n is a, c, g, or t
  misc_feature (544)..(544): n is a, c, g, or t
  misc_feature (602)..(603): n is a, c, g, or t
  misc_feature (623)..(623): n is a, c, g, or t
gtaaagtatttatgaaattgagacggactctttgaccactcttggtttttgaggcacattcctgggatacagttatttaatgtaacctaaatgtgaaggtcctcatttgcaaagtgggtgcagattgacctcattccctggaacaggcttgcctccttgaggcaattcagagatgaggaggatgtttagaaggtatttctacaaaatcctggtgtgaaatcaagtaagttgaatctgagaacaacctttgtttaaatttaagcaaaagaagcaaaccactgatattctttggaagacttgctaaataaccacactttggaaatgttgatctgatgacttttaaaaagagtagcataaccaatccctagttgaccaagtgcatgtttatcccattagattcaagtgggttctaaaggcttgaaaacaaatatttcctgagaacagtccttgnggagagttattttgtcaatggaaagatttccaaatgtaaccccaaatctgtagaactgtaaataaatcataccataatgccatcaagacattntctggtaaaagttaagtaaatgctgtttactgagggtcaaatacccaagcactgacannatgtacagtgattcctcaanttgcatgtgctctcat

SEQ ID NO: 359223 - DNA, 673 bp, Homo Sapiens
cacgaggggggtttgaggccttctggatggaaggcaagggttctgccagctactctgggcacctagctgggtgtctttgcacctctattcctatggaaggggggttgaggccttctggatggaaggcaagggttctgccagctactctgggcacctagctgggtgtctttgcacctctataccctagggaaggggggtttgaggccttctggatggaagggaagggttctgcctactactctgggcacctagctgggtggtctttgcacctctatccactggggaaagggggtttgaggcattctggatggaaggcaaaggttctgcttgctactctgggcacctagctgggtccagagagcagggtggcattgacagagcaagagcctcccagtgatatgatctgagccacaccgtcttgtttactgccatctgcctgaagactgagctgaaggaacaatttctttgtccacacgacagaaagcctgctttggtcccagctttctgttataactcttttttattggagcagaaagaacagcacaataatggtctttgctccgcgttttctatggatcaagaaggacacaggcattttgggcaaatcgcaaagcctgctttggtggctgaagacaaggaggtgaggctggaagaagcgcttatacagatatct

SEQ ID NO: 359224 - DNA, 710 bp, Homo Sapiens
  misc_feature (444)..(515): n is a, c, g, or t
  misc_feature (528)..(528): n is a, c, g, or t
  misc_feature (542)..(542): n is a, c, g, or t
  misc_feature (571)..(572): n is a, c, g, or t
  misc_feature (583)..(583): n is a, c, g, or t
  misc_feature (612)..(612): n is a, c, g, or t
  misc_feature (621)..(622): n is a, c, g, or t
  misc_feature (631)..(631): n is a, c, g, or t
  misc_feature (644)..(644): n is a, c, g, or t
  misc_feature (663)..(663): n is a, c, g, or t
  misc_feature (671)..(671): n is a, c, g, or t
  misc_feature (689)..(689): n is a, c, g, or t
  misc_feature (695)..(695): n is a, c, g, or t
aggaattcggcacgaggccagggactatagtcaaaagccttagaagtctacctggtatcctgttatactgacctggtgtcctgttgtactgtggctgagctggcactcaaaccatgagatgcagtccttcccacgttttcctctcctttccacaggcaaaggagcctcacctcatggccaccaccaccacagacccacagggagtactgccatgctactgtccatgttctcctcaggccccaggaacctccagtcagcttgttgctacctcacttgggactctcctttcatagcagtaagcgtccctctgaatgtccaagacccaaggcctggaataaggaactccaagagcccacttggtgctatacctgtggccaagctggtacctaacgtgcaagagtcctcattgcttttccccctgcttttctcaagcagaaggaactnnnnnnnnnnnnnnnnnnnnnnnnnnnnnnnnnnnnnnnnnnnnnnnnnnnnnnnnnnnnnnnnnnnnnnnnaggtccacagttnactacttaggtatngatgctggctattcaaggcctaagagctnnctagtcagcangtaatgggctctgtctgaaatgggctttncccttaagnntagcagttnccctctggaccangatgtatctagttcatttnggagctanggccatgagagatggctnacactnttctgtggtctgtcc

SEQ ID NO: 359225 - DNA, 806 bp, Homo Sapiens
caagcagtcagggtctcggtattcagtgaaatcttatatcccttaccgtcctcaatcttcaggaaaggtagaacagactaatagtctaaaaacacacctcaccaagcccagccaccatgaatattgtacggtaccataaatacttgaccacctgtagtacataaaaacccaatccacatcaaaaccccctccccatgcttacaagcaagtacagcaatcaaccttcaactatcacacatcaactgcaactccaaagccacccctcacccactaggataccaacaaacctatccatccttaacagtacatagtacataaaaccatttaccgtacatagcacattacagtcaaatcccttctcgtccccatggatgacccccctcagataggggtcccttgaccaccatcctccgtgaaatcaatatcccgcacaagagtgctactctcctcgctccgggcccataacacttgggggtagctaaagtgaactgtatccgacatctggttcctacttcagggccataaagcctaaatagcccacacgttccccttaaataagacatcacgatggatcacaggtctatcaccctattaaccactcacgggagctctccatgcatttggtattttcgtctggggggtatgcacgcgatagcattgcgagacgctggagccggagcaccctatgtcgcagtatctgtctttgattcctgccccatcctattatttatcgcacctacgttcaatattacaggcgaacatacttactaaagtgtgttaattaattaatgcttgtaggacataat

SEQ ID NO: 359226 - DNA, 628 bp, Homo Sapiens
  misc_feature (298)..(308): n is a, c, g, or t
  misc_feature (548)..(548): n is a, c, g, or t
  misc_feature (583)..(583): n is a, c, g, or t
  misc_feature (607)..(607): n is a, c, g, or t
agaaaattaatttacaatgaaggtacagggttgacctgataatgttagtggcttgcttggagcctcataacattggtggtgctttcaagattcattacccttatttttaaacaggataaggaagagcttggaaacctatttctagcaggtaccagagttaaatcaacagcataagctttgaatttcaattaattttgttaacttttttattttctagtataatatttagaacaaataaacaaatgaagaataaatatggatcttatgagaatatgcaacttattacaaactctaaagnnnnnnnnnnncattttaagagttacaggagcatagtattgtcagaatcccttgaatataatatcctttatttgtttattatattcatttatgggtaaatacccaaagtaagtgtcagtaggatagataataaaatttatcaatgacatcctgtccaagatagaagcaacatcccattcagcatggatagacacatgttcaaggatacatttatctggcctgagtctaggtgcatctacctcagatttcanaacatcctgaaacactatgagtcacggattaaatnaattattttaagactttatatcanatacttggagattcaagattt

SEQ ID NO: 359227 - DNA, 410 bp, Homo Sapiens
cacccctggggaacggactccacgccagcagccacacgcagtctctgccctgtcctcaggagacagcagacctggcccctgcagaccctggttgggcccttcctgtgcaaggttccttcttcctgcctcctgccacaggccccagctggcggctccccccagggcaggtgtgcatctgcagagcgctcatctcccacgtgctgagtcatggctttgcgcagccctccccatacttaggaccctcaaaggatcatcttcattctcccaggcactgagtcgcagagctgggccgggcctgcccgaggccaggtagccaatggtggggaagccagagagcaaagccaggcctggagccccaggtggcacagccgggcagaaacgatccttgcgtgggagcgtcagtcttctcg

SEQ ID NO: 359228 - DNA, 721 bp, Homo Sapiens
ggaccgaatggggagggccgggaacgcagccagtcctagtccccgccgtggcgatggccgacccagccgcggacgctgaaggccaggactccacgcgctgaccctccagcgtcccacgtccggtgggcgcctggccgaacagcccaagactgcggaatcacactggccactgtgcactcggacgccatctgcagacccagcctgtgccgggcttccggaaacggaaggacgggcttccggaaacgccgaccaatgggaaacgcgatcagatgttagtaggcggacagtctgtttccaggcaacacaaaaggaagggacgctctcggttagcctcaaatagacggagctttcagtcaatggatgtgcaggttcgctccacattagccaataagaagcgcttgggcctgacccgcctacatgcgcagcaaaaactttcttgcgcatttcagcgctggaacgtctacccgctgcgccaaaccaaaactttgcagtaatagttgatgctgtttcctgcactttggtggagatttgcaccaggcgctggagaccgtcccacctggccaatgcccacctcccggtgaacacagagacccaactttgtgcaccgccagtcttgttatcaaaaaacaggctagtgccaggcgcggtggctcaagcttgtaatcccaacactttgggaggcggatgcgggcggatcacgaggtcaggagatcgagaccac

SEQ ID NO: 359229 - DNA, 694 bp, Homo Sapiens
  misc_feature (662)..(662): n is a, c, g, or t
  misc_feature (666)..(667): n is a, c, g, or t
gaaagtatacgattgaaaatggcaaagtgatgtgttcttgtatcaagatattttttctactttaagaaaccgtactcctcattattgatatggttttattcaacatgattgtcagtagaaagagttttttactggaaaatatataatggcatatacatgactaatggactgatagttggtagaaagtgtacttcaatagttttaaatcccattttgaatttagttctggaaaattaatacagacagtccctgactaattaaggggggaagaaatctttaaaatggcattaagaaaaaatacatttttactatttgtaggaattttctgttattttcaaaatgtaacttgcaaaattagactggaatattcacaagggagggcacattctcaaaaattatatatggagatgcttaatggacagaataacagcaaagaaagaataataaatggagatttcttagaactctaggatgactaatttaggccatttgaacgtgggcttatccaaggaatacaccactatttctgattatgactttgatagctgagaattattttccatttcaagtataaaagtgaatgctttaataaaataaaagaaaacaaagattaacatggttctagaatatgaaaaaaattcgttttgccttttttcagtaantaannattgttgcttgtggttgctttcacgcc

SEQ ID NO: 359230 - DNA, 715 bp, Homo Sapiens
cccaatagggccagagtccaaggataagtcccagtatgcacgctgacaatctgcgaaagccaccaaaaaactcagtcctggggcataacaggaccaaaaagcatatactaagtcataaggaactggcaaagcaagagtcccaattagtatctgtcccagccatatgccaatgggcaggagaagggctggaggttatttgagctgctagggtaaaaacaagtatcaatttcaggggatatctacaagagagcccatgtctctgctgctgcatatatgcagagagccgtgggcacaagaataacaaggagtatttgtttaagaagtcacatggcatgcaaagtgaaagcaaagacagagacttgcccctggaaatggatgatctggcaggtacgcaaggccatctcggaatacacacattgaaaagaggagaatgggaggtgcaggtctttgggaaagagctgaagttgaaaaagcagaggaaacccaaaacattgcatggttttaggccttagtcctaccacttgagcctcctgtccaggagggtcattttagtaccttagatctatttggtgcagaacctaatttccttcccacccctgtgagccacccatcagaacgagctgagaaacccaccaggaggtgggcagagtcacttacggtcaagaagaattgttctggaggttggttagtaaagaggagagagaaaaaagagaag

SEQ ID NO: 359231 - DNA, 699 bp, Homo Sapiens
  misc_feature (642)..(642): n is a, c, g, or t
  misc_feature (659)..(659): n is a, c, g, or t
  misc_feature (683)..(683): n is a, c, g, or t
aagatttttatttgagctcttgcttctcaggaagtctataagttttaaagtaaaacaaggtttttcacaagtgaatggcagaagggaagaggttggagagctcattcattaatagacccactgataatcacaggcattttaagctagaaacatctttcagagataattgtcaatttccaggctacatttaaactaactggttaagaaacataaaaaaatggaaaagcagtggaagactggagtcaaggagcaaaggcctagattttcatatgagagctggaattatgctgtcattgactggttgtgttactctgatctggtaacattatctcattttcataatttgaaaacaaagagattatgctatttttaaaattttacagtatttttaaagtaatgtaagaacactcttccccaaatgtcttgactgagtttttctttaaccactcttattctctgaaataacctaaaactgtcctatattttattactttttcttcttgtcctacttacaatctgaaagagaagattgccatttatttacaactttccatatatctcaaaatgtctacctgatcaccttgctgccttcttcttactagaaaaactattcattatttcattaaaaactttaaggctatnttctgacccttaatctntgatatttcttcatctgttttagntcttgcagtcttggat

SEQ ID NO: 359232 - DNA, 751 bp, Homo Sapiens
  misc_feature (44)..(44): n is a, c, g, or t
  misc_feature (507)..(515): n is a, c, g, or t
gacccagaatatgactgcaggggtaagagtcacataggttagtntttataaaatgaaagagttgtataatgtcagagaacaggctttcattctaaatgagattctttctccttctgaggttaagctaagtgaaatgtcttttgggcagaatcacagaacattagagactacttgttgagattatctcaccttttctcattgtctagatgaatacataggaccaaagagaaagaatttttgcacttattgtaccaagatatgttcctttctttcatgaaattgagagtacaacaagtaattggcagcacttagtgtcagtattgctcttatgcatttaactataaacagaagggagaatatttttaatgttttctttacttaaaaaagaaatcctacaaacaagttgatattcttgtgtcacaataaaaatactctgtctgttcccaatttgtcaaaaggacaagaattttcaagctctcgacaggacccttagaatttaatcatttnnnnnnnnntgttttaagtttctactgagagttcttctcaattatgtccagtaggtggcattactttaaccacacaaagcaagaaaaccatgaaaaagccagaataattctgatacagatcagaagctctcaaatgttggcttcagactagcagtgtcaccatcaccttggaacttgctcaaaaggcagattcttgggccctaccgcaggcctattgaatcataacctgcagcccgggggatcca

SEQ ID NO: 359233 - DNA, 716 bp, Homo Sapiens
  misc_feature (31)..(31): n is a, c, g, or t
cagcagaaaaataaataatgactgaaacccnaatctgggagaagaaaatagacatctagccgtaaaagcaaaatcgaatgaacccaaataaatgcacataaggatacattataatcaaagtgtcaaaagtcaaaaagtaatgtttaaagcagcaagaaagaaatgatttgtcatgcaccaagtaatctctgtaagactatcaacagatttctcagaaagaatatttcacactagaaaggaatagattatgtatttgaagtgctgacagaaaacgtaaaactgctaatcaataatactatatcaggcaaaactgtcttttgaaaatgaaggagagaaaaagtatttgccagacaaacaaaagtgaagaaagttgattatcactagacatgccttacaagaaatactaaagggattttttcatgttaaaatgaaaggatgatatacggcaaggtggtagcataaaatattttctatatatttactttttaaatgagtatcgtatttcttactaatattcattagtaaagacaaatgtataggttctgtatatagaataatataatggtaaattacttttaatcattgtacaaaagttaaaagacaaatttttttaaaactttaacaataaatatgatactacatatacaaaataaatagatggaaactacaaaaatagtgtaagtaggtaaggaagactcgtgccgaaaaccgcagcc

SEQ ID NO: 359234 - DNA, 212 bp, Homo Sapiens
ccacgtattcacaccgtttctgataatttgttttccttaaacaatgtaatgtagacgattcttgaatgttaggacactgaacacaatgatcctatagtgccagtttatccctcagatattcttattctcgcttgtttctacgacaaaatactctttcttcaaatttttatctgtttaattatgagaggttatgtagattaccaatgagttct

SEQ ID NO: 359235 - DNA, 727 bp, Homo Sapiens
aaaataagtaatcaaagaagtactggggctggaaaatgaaacggaaagcacaggatcatgagttgaagcactgtagccacgcacccttaccctcaggatttctctggagatgtaagcgatccagtcttctttgagtgtgttccctttggtgttcttcacaaggtctgtaatggacccagccccacagaactccataacaagctatagggcagacaagacacaaggtgagcaacatatcttggagaaattgggaaaaccagtttaaccgccatgccctctcctaaagacctagaaacgtgatgctcctcaataattcataataatttggaggcacctaaataactgaaagctcatttcatagtccagtgtattcgctccatatatttggtccagaagactgacagtgtctggtattctacggcacacccaagtgcagcaattctgaagtgctcattctctctcagaagcacatgggcacaggaggaccactttgctcttcatcactacccaattatcaaatatctgactcaaatattccctaacattctttttcattttacctcaaaaacattctacttttcacattatgatcctcaaactattatattttatattaactgggtctaatgtgaataaaaaatggtatttttaagcagttatacaatttttaatgcaatatttacagtatctaaaagtttgctcgtgccgaattcctgcagcccgggga

SEQ ID NO: 359236 - DNA, 679 bp, Homo Sapiens
  misc_feature (66)..(66): n is a, c, g, or t
  misc_feature (111)..(111): n is a, c, g, or t
aactcaaatccatctacaacacagaaagttagggccaattaatctaataactgaacagaggaatcntgtaaccagcagagagaagttttaggagaaaattttaagggaaanagagtataagaactttagaaagatttgaaaagaaacaataaataaaacaaaagagagaggatgatagataagaacatgtatttttgtaaagatgcattgaaagagtaaagccaagtggctttgctgttgcatgtggctttgctgttaaatgtggctttggctttgacatttaagtaaagagttaatatcagcatctttgagccagtactttaagtagtactgtgtgtgtgtgggtgaagccaaggctattttggattatttttgttatttatttaatatcttacttttaccatctctcttataccctaccagtcagtgaagatggtgagagctaacattatttaggagcatgcatttgagacaattatccattattgtagtaactgtttataagaaacacgctactcatcaatttttttcatgtaaattgaatctataattttttatcacaattaaataactgattattggggaaagtaataaatgtggcttaggtgttataaacacaatgttctcatctcactaaaaaactgtttaaatttttttgtttccttgataaatgttttta

SEQ ID NO: 359237 - DNA, 681 bp, Homo Sapiens
  misc_feature (399)..(417): n is a, c, g, or t
  misc_feature (579)..(579): n is a, c, g, or t
  misc_feature (595)..(595): n is a, c, g, or t
gaaaaagccccacttaactttagctgatgtaaacaagtatatttaagaagtgtacgtaaacaagtttatttaaatataattcagcatattctcctcgaaaacattgaattcccaaacagaataataagtttaaaattaatgtggtttattaacaattaaaaatgataacacaagctgaagaagattggaggtgaaatgttgagtttcctttgataggtagagtaattacaaagtgtgcttttgaagttcaagaagacagccttaggacacaacatttttaaagtaaaaattggcttgcactctgttcaagtgatttattttgcactaagaaatgggtgtgagacatgatgtgatttaaaatttcatcccttgatggaactgcttgagggtgacatgaannnnnnnnnnnnnnnnnnnctcagcctgctcggcctatgaagtttcctatctaaaagttaatcttctgaaattacttaggaatgtaaggaaacctaatcttttggtgtgtaaacaaaaaggactaagtatatcactccccctctgacacccaagagcccagaagtggggtgcctgctaatntaattaccttcagaanactgcacctttaccatctttctctggctaagaaaggcttgaagatgttgcgaattggaaagggaggtagaatgtccttcgagggtt

SEQ ID NO: 359238 - DNA, 634 bp, Homo Sapiens
  misc_feature (572)..(581): n is a, c, g, or t
aaacccggaaagcatcatcacagttgatgcatgcaacgcatcaccgtttgcaagttctgtccaaacagggtaccaaacattactcatttaatcttcgtaacacgaccgctattagatctacactacgccaggcacgtgcggcttccccatccaccttcctgcccatgaaggcaagctgcgttacacatgaaaaataaagagctatgtcaaaatagatcaggactaatttccattcacctaaagtttgtctactgaatgtgtttctctgtccaaagaaatcaattaggctataactagataggtagaaaataaaaaatatacactttttaactgtgaagttaaaataaattgtagaatgggctgcaagaagcacaaaggcatttcatttcatttttcaagtaccatttgcagatgtgtttcacatatttaatatcttcctccaatgaagaagaaacaataaacaggaaggctcaaaatgggcttaaaaaaatcctttaaaatcaccaggtattatcagagccagtattgtaatcatcatgatacggcgtcaaatgtagccatatcgaccttgnnnnnnnnnntggcaccaacaaagcccaaaatctctcgtaccgaattcactgcagcccggggg

SEQ ID NO: 359239 - DNA, 720 bp, Homo Sapiens
  misc_feature (421)..(421): n is a, c, g, or t
  misc_feature (587)..(599): n is a, c, g, or t
  misc_feature (692)..(692): n is a, c, g, or t
ctccgggctgcaggaattcggtacgagtagaagttcaaattgactaaatcttaaaagtaataaagaacttcaaacaaaagcacatcatgaaaaatgagtatatttgtcttatttcataagaactatggagtacaaagaagtctagaaatcttttttataatggcttggccttctcctatagagagaaatattaggtaaattgcttttctatgtgtcactgcagagtataaataattatatgaaacgaaagaataactgtgggaaggaataaaaatgtgtgcgaggtctctggtgacagagtaatggctcgccgacatccacccactcttccccttgatggccagtgcctccatctacccaagaagcagcttgatttgtcaggaaattatgctctgaaagggtatttcaaatggcccaccgnccccacgctcctccactgtgtcctctggaaatgacttattgactgtcacaatctttgctggacagctgcccaccatacagtgttctcaaggtgcttgctgcaagaggagcagactacactagatggccaaatgacagcatcatttttacttaatacttgaatcgannnnnnnnnnnnncccctgaagcattttctctctggctatctttcctcataaagcccttgagacttgtttgcgaaatgtttacatattaggaaacgtatacagggnaattaagcatctaagtggttcctctctc

SEQ ID NO: 359240 - DNA, 720 bp, Homo Sapiens
agattatcagcatacaataaccaattaatgcctgcaggtttcattacacacaagaaaggtgtgcgtggtggtggtaatgataggggttgtgccgatctaagtatatgcgtatttcagtctttttatttaaggaaaagaacagaaaagttttccaaacaatgcgcaatttaactgcagaaagtcacgctgcccaaataaaacatcaactgaacaatctgaaggtgggcccagaactcagtcttcagggcccaaggcatcgaacggtgggtgaaaagagtgtgctttttaaaagagctccgcagcgtcccctgctgccagctcctaatatttaaacacagctctctcctctctggcctccaaaaggggaggagagcaggctggcccttcctgagcttcaatcaagggtcaggcgcctgctcactggacccgcttaaaggaacccaagcccactaggcttctgtagagaggatggagaggctagcggggcagtgagagaatatataaggggaaagagaaagactaaaagatggaaacagaaagagcccaggaaataataccaggacttcccataaaatgtcaattaagcgtaaccaccacggtgacaataaggtatcataaagctctttccaaaagaactttgcgtactttcaaaatgctatgtgcaacataccccacgttcaaagagaagagaaaactgatctcgtgcgaaaacctgcagcc

SEQ ID NO: 359241 - DNA, 676 bp, Homo Sapiens
  misc_feature (53)..(53): n is a, c, g, or t
actgataatccctgcaaaccagacttcaatactcactagtacagaaaaataangagtgagaaacgtaaaaacgcttctttggcatagctctttttgaacttaaagttgacacccaattaggtgttgagaacaattatattagcacatcaattaccaaaattgcctgataataagacttaggtgaggaacgtgtaaaatcatagaatccaaagcccttcacctgaatgttgatatttatttagttaagtggcatgaagctatggattttgtctctgttactgacccaaggttgattataacatcagatcaattcgaagatagtacatcaaactataatattaaagcagcctcaacaataaatttagagcattcacttcagaatttaaaaagggaactgatattttgatgaaagaggtgtttgattgtgatatttattgcattgcctttctgttccctttgttttcgtgtttacgcttcttttttataattatgctgcgaggtcattttgtgttttacttctcagcaattaaacactttcctataaaaatttgaatgacatatgtctgtttatttctaaactctaacatgtgctatgcaaataatagaaaattgccatcaaatgactcacccagctaaaggtaggatatgaatggtaaatacttttgtttagatattt

SEQ ID NO: 359242 - DNA, 716 bp, Homo Sapiens
cgaggaaaatgaatgaaaaagtaacaggataataaggacaactataatagaaagagagaacattattgttatggtaaatgttacaaaaaaaattgggcatgctaacaagctggtcaagatggaaaaaaggcattcacaaagtgatactaaagttgattgaaggatgtgaataagccatggtttgaaggtcatgtggcaagtcaatgacatcagttactccagggtgtaaggatgggactgaacgggagacaggccatcatagagggtaatgggtgccatagtagaaatctgtaaaagctgcagagcatactgacccatgggtcctgccctccagaccatgatgagaatccagtatggtcttcacggctctgtgtggacttctctcctttccacaatccctctctcccctgcacccccaactacagccacatcagctatcttcaagtgcctcaaacatcttcctatctcaggagctttgcacaggagacttccttcagcctggaatgttctatctctatcccatcccctctcttctgcccagttaactgccaaatgttcttcaggcttcgactcaagtgtccccacctccaggaaaccttccttgactaccccttggatcaaactggtccctctgtcacacacctccataataccatggaaatctccttcagagcactgtctacaattaggcacccaatgtacctcgtgccgaattc

SEQ ID NO: 359243 - DNA, 340 bp, Homo Sapiens
aacgccggcggtcactagaggcctgctttcagtcattgaaaatgttaactctcagttcattactgcatatatggaaaaaatatatatggtttactcatggtcactataatattgatagtttgaccctggtaatttaaactgataatcaaattgttcatgtttgtggataagaaagagacgggatggtgtggagagtgagggagaggaagagaaagagaaaggccacatttggggaactgtcaattttcaaactgtataatctactggcaaagaggaaggcacgctctgaagatatgcaaactaatttccagggtcgctatgtcagtacttatattaccac

SEQ ID NO: 359244 - DNA, 530 bp, Homo Sapiens
cgggataaaagccgagagaaggcagagcaggacggaggctgtagctccaaagaagacggggttcattccgtaaaccagggcgttccaggtccagcacctgggctgaattttgcttgtctaaaatcatctgcaaatttaattccccgctgattccactggccatgggctctgtggtcttaacagtcttagggactaaggaactgcaagcactgaggggaacccaagaatctcagactcagggtctggcctcacagacatgtgagggaacaactcaaaggcccattgcccagtggcaagaggaggcaattcggagtccgtcagacctgagtgcagtcagatctgattctcactctgtcacttactagctgtgtgatcttgggtaagtcacttaagctctctgagcatcagtttccttatctctaacattaggataaaaatatctattgtgtagggttggtgtaaggattagcaaaaatgtatatgatgtgcagtccatggcacataatgggaactaaaaaatagcacttgtt

SEQ ID NO: 359245 - DNA, 661 bp, Homo Sapiens
  misc_feature (355)..(365): n is a, c, g, or t
  misc_feature (503)..(503): n is a, c, g, or t
  misc_feature (547)..(547): n is a, c, g, or t
gtcagaagtagtgatggagtaaatcatataataaaatcttcaagaaatgaataaggctggtctggggattagttagatgactacaacaaactgggttagtgggtaatctgttgacataaacttcaaaagaaatcaggggcttggaaggaggaaggaagaagaaacaaaggtctgaaggtagcaagaagaatcaggaaagacaattatcctaactccagaccaagtagtaagagagacatgtgagagaaaaccaccactgtctgagaagactctaagtgtccttaatggagagccagattttgttagagaaacagtgaaggaaatcctctgaggagaggttgagtaaaaaggggannnnnnnnnnnaatgactgactgtgctccagagagtggagaagaatgaattgggagctgaggaggaatggtagatggaggctaattacaggatattccaagatgcttgagaatcaacatccacatgatgagatgacctgggtatcttgngtttcttgtgtgactggcagaaattcatatacagaatataaggnggttaataatggcattctctaagggggtggaagttctgttgtatcgtgtggggaagtaaccttgacaggcatggagcttaacacatcacttatttcagcccctgaccattgggc

SEQ ID NO: 359246 - DNA, 635 bp, Homo Sapiens
gtcagccattctggaaaaaaacaacacccaccagtgtttgttttctcaaaatcctaggatatatttctcacttctaagagaagtaaatggtgtctgtttatagtgacctagctttatgacagctgcacatccccatgcatttctcctttttgagaacagtcctaattaaaatatactattctgttgttcctgtaagtacatttgaatttgtgaaaatatgcaaaatagatcaccatattcagatggctcacaagttcttagtgctttcatctttcttgtatgtttgttgtttattatgggatgtgtgttatggtgccaagcaggtggctgaatttcaaggggaacttgtgttgaatgctactgtatagaagacatacatgcagtaaggaagtttatacaaaccttttgtaaatttggtcctttgggcttttatggtgctatacagcatgctaaagctccaaactgagctgatttgtattcctgacgtcatccctgaaccacgtggaggccaagccctaataaaggtgagtcctaggtggccactagtccttctcttaactctgagggacaggcctgacccattggcagccgtgtttagtggctatacccgtcttgggattgatgctgccaccctt

SEQ ID NO: 359247 - DNA, 650 bp, Homo Sapiens
  misc_feature (220)..(220): n is a, c, g, or t
ggggaaagcattcctaatttaaagcttaagtttgagggttagttgaaaaaccagggtcactactattcatgaataataggtagataaaagctttaaagaatttataagtttctttcttatcaatatcaacagaaatgcaaatcattttttactactcccacatgtgccaacacagatacaagccactatatctactggctctggaaagctggctgcaacntataaatgcataaatgaataaataaataagaagccaaccaattccaagataacccagtatacttagcttgtttttttaaagtatacataattttatgagttagatttttttaatagagtgaaaatacttactttctatacaaaattttaggatcagtttttagaattaaaaaataagagacttttcacatatactataacttttgcaaactaaaatcttggaaacattattttgatgataaaaatactgattttggttaaatgtatagtttctagaaaaatctctcaaaattattgaaagatgagaccataatatattattttcatttaaatgatcaattactacattcaaaaatattattgacaaatatgctgtctcaaaaatcgccgtttagatcacatccatagtagcatacaaaaaatttgcctcg

SEQ ID NO: 359248 - DNA, 698 bp, Homo Sapiens
gagagtcatcttggcagcagcttctctccatctcgtgctccatatatctcagtgctgcttggtctcccacattgatagtttgggaactagtatttgggaactattgctttcttgatgcatctgtctgtacactggcctctgaagaagggggtattagaaaagttacacttcttttttattgcctaatattttagtcttctcctgaaggtacatccttaacatctccacatgacttcctgtggttttaatcatctttgcccaaggaatggggatgattggtggatgttacaacatagaagaagaaagatacaaaattgatgttgtgaccatccccttagttcaaatgaaaggagctaaaaatatttaagccctaccctttctttgtgtagctttgttccctgacttaatgtcggcccttcaactttggacagagctcttcaaaaacctacagactctttacctgctcccaccaaattttaccctataggatttgggattcatcttcctttcaacgcaagaaagtctttaagatgcattaatcctatagcagttctcactgcctgtagtgtcacctaaaataatatctggaagtggagaagagaaaaataaaggtatttgttttctttgtgtttaggcaaatcccctaagtatcaagtgtggggttatttttttcagctgctgtttatgttcattataac

SEQ ID NO: 359249 - DNA, 773 bp, Homo Sapiens
  misc_feature (55)..(55): n is a, c, g, or t
  misc_feature (67)..(67): n is a, c, g, or t
  misc_feature (81)..(81): n is a, c, g, or t
  misc_feature (262)..(262): n is a, c, g, or t
  misc_feature (434)..(555): n is a, c, g, or t
aaaagggcgccaatacaatgcaaattgtgagacagttgggttctgtaaactcctncatcatttcctngcaccttctcatanaatgactgtgcactcgacttgaaagcttctgctccttgcatacatgccatctacacatatgtaccatcataggtgctgaaatccctggcactttcatctgactctctcatttgaaacccatcttttagtaaagctccattacttttcaagtctttagtctacacagaatataagcattgcnatttagtctctgttttgaacctatgctagtggcctagagagggaaagagatgtccccaggcaatgtaatgtctatatcctctcttcctacatgttactatgctgtgcccctgactcaaccttttcattcttctatacatttcctttagttatccttttaatcatttcattgnnnnnnnnnnnnnnnnnnnnnnnnnnnnnnnnnnnnnnnnnnnnnnnnnnnnnnnnnnnnnnnnnnnnnnnnnnnnnnnnnnnnnnnnnnnnnnnnnnnnnnnnnnnnnnnnnnnnnnnnnnttggtaacattatcacccagttttccttcttttttcctctttctccaggcaatcaaatgtagacactcctcaatgttattcccgagtgtggcttcgtcatgttctgttttgcctccccagcaaccttacctcctcccatggcttcaactacctttcacaacatctatctccctatactttgaattaagcttttacctgctcaagaaattttagaaact

SEQ ID NO: 359250 - DNA, 724 bp, Homo Sapiens
  misc_feature (34)..(34): n is a, c, g, or t
  misc_feature (59)..(59): n is a, c, g, or t
  misc_feature (68)..(68): n is a, c, g, or t
cgtgaaaccaagttgccaggccaatcactttcanaattatgcaattagagctgcagtgnagaccacanggatggtgctgagcaagctccccaaccccttgacctggcacgcttaaccccccatcgtcggctgaagggcccctgtccatcctcaccactccctggaccagttccacttctgggggttaatgagcctcccacccacactctgtgtaattggcatgaaagctgctgggcgggtgcgattcagctccgagagccgggccaggatggaaggacgtgcctctcgaatggatcagctgctgcaccgacgagcagggcccggtcagccacaccggcccgcagcaagccaggcctgtccttactcggggcggtccgcgcccaggaggactccctggcggcaatggctggacagcgagggaaacaggtgccaaaggtggtaggaagtggctctcggctgccttcttgagcccttgcaaacccttgctggccccatcagctttcctaggcccagatgtgaacagacaacagcctcctcccacctcatctgcctccatgcctgtggccccaacaccccaaacctgctgtgccgccaggtggacttctcagctgccctggccctgtggtctctggtctcaggtttgctgccttgctctgtgggctgttcccatgggggccgaacccccaggaagaataaaccactggatggtgcattgttggcgccg

SEQ ID NO: 359251 - DNA, 669 bp, Homo Sapiens
  misc_feature (63)..(63): n is a, c, g, or t
  misc_feature (71)..(71): n is a, c, g, or t
  misc_feature (85)..(86): n is a, c, g, or t
  misc_feature (103)..(151): n is a, c, g, or t
  misc_feature (163)..(163): n is a, c, g, or t
cagatccagaagtcagaggcttagttgaaagccagaataaagaggtaatagaattagaaagtnttagtcanaatctggaaatatnnatacatgtacatgtacnnnnnnnnnnnnnnnnnnnnnnnnnnnnnnnnnnnnnnnnnnnnnnnnnagaagacagaancaattatcagtcattatgaaaaaaattagatctatatgcagaaacagtgactggcaatttaaactagttcaatttctccaacattgggtttttctccatttgaatgttacttatatcttcctataaaatatacctacatggcataaacatgatcaaagctgttaatttatagttattctgaaacatacatttcaaagtaacagactgtagaaggctgctttgccactgactagttagggtaaggctgggactagatttaatttctgctacagaatattattccaaatacatctgtgaggtatctatacatatctgattaaatcctaaccaggcttctcagatctgtgtcaaaaatagaatgctactacagttagaatgtttatgtacatatatatacagacacaatcacaacagaaaaaaatcgtttaatgttttcacattttaatcttcaacagtcagtatcattttgacagtcagttacaatttcagtaagaggttacttactt

SEQ ID NO: 359252 - DNA, 663 bp, Homo Sapiens
  misc_feature (71)..(158): n is a, c, g, or t
acgcgcgcgagtgaggcgggacgccgtccggagaggccggttgagggaagaccaccccgtggattgagggnnnnnnnnnnnnnnnnnnnnnnnnnnnnnnnnnnnnnnnnnnnnnnnnnnnnnnnnnnnnnnnnnnnnnnnnnnnnnnnnnnnnnnnngtaagcattaacccctcattcccatccgtattgttgtaacctgtacctctcatatttaccatctatacctcactacttgcaattttccttaacatgccatgctgtttcacagctccctgtttgcttccaggagtgcttttctgcattgaaaacctaacaaatttctactcatcttttaaaatctattcacacattgttactcctgcagaaacgtattccctccactaccagagttaattatcccctttcttgcagtgccctctaccttgtacacactccctcactgcccaaatagcccttgattataattatgtatatacatgtttgcctttcttattggactctgagatcctgacagattgggactataacttacttgtctttttatctttaatgctaagtagactcattctttttagttattatctatctctgttcttgacacagtagatctttgtctaatgtttgttaaatgacaagtgaaaacattctaagtgaaaatggc

SEQ ID NO: 359253 - DNA, 674 bp, Homo Sapiens
  misc_feature (172)..(172): n is a, c, g, or t
caccaaggtaaaaacagggttccccacggccatagcccggaatcaccacacaccgaaggtaaccagtgttagaggaaaattacctaccccttaggttcgcttcctgtcagataacaggtgccatagagttctcataggagcgcatgacccctattgtgaacggcccagggtnagggatctagggttgcatgctcctatgattgatttaaagtgaaacggtttcatccccaaaccatcccccacccccaatccatggaaaaattgtcttccatgaaaccagtctctggtgccaaaaaggttggggaccactgctccatagcatatcctaattatgggagctatattcatcatatagacaggtcccacccatactcaagaagaggatattacacatcagggagcagggaccttggtagccaagaattctgcctatcacatatgtatcttcaccattttatttccagtaatcaggacagtgcctggcctacaataagttcttaatacaatattctatgatagtttcttaatttcatcttatatctgttttctgggctacagcttgtatgaccgtctgccaactttacttctccatttagattcctagtagccaacaaatattattgtgacaaaaacagaatgcagaatttatgcctaccactcctcaagactcactt

SEQ ID NO: 359254 - DNA, 621 bp, Homo Sapiens
  misc_feature (114)..(114): n is a, c, g, or t
  misc_feature (238)..(238): n is a, c, g, or t
aaaaaatctcaataaccatatatctagatggtgatcatctcatctaatcaataattaatttggtttaaataataagactagcctgcaagctccaaaatggggttaatgtgatcntacagtgtgcctagggtcaagttaaatgcttggcctctcaacccagacagttctgcctctaccacttaatagtagagctatcctgaacgaactaatgattcacattcagtatcctcatctgtanaatgggggataatagtactcacttcccctggaatgacaacccagtgatctgagagggatgtgccataaatgagatgacaagaaattggacacaaataattagaaggaaacgaacataaaagaaatcaaataattcagaactagatcctgaaaaatagaagagttgcttagtttacttgatgcctgtctggagatagtattgtcagggattagaaatggtctattttgtttgagaaacctacttttcatcattactctttatatcatatgatgattcttactaaagtaaaatgaagcaggttaggatgaaattaaaggatcatcataaggctaaaaataataaaaatcgagccacaccaaagtatctttcactctctctcgtgc

SEQ ID NO: 359255 - DNA, 547 bp, Homo Sapiens
  misc_feature (209)..(209): n is a, c, g, or t
  misc_feature (280)..(280): n is a, c, g, or t
  misc_feature (340)..(341): n is a, c, g, or t
  misc_feature (395)..(395): n is a, c, g, or t
  misc_feature (417)..(417): n is a, c, g, or t
  misc_feature (460)..(461): n is a, c, g, or t
  misc_feature (490)..(490): n is a, c, g, or t
ctataattatgtcagtgtgtagaaaaataataagttgtaaatcattaacataccaatacaataatataaacccaattgataatctaaagaatgttgatgatttattttaaaaccaagattatattggcttattattatttactatagttttatagttatttatatatgttcttgtggatattgttgagatacaatttacatagaaacanaaatacaatcggaagatataaagtatactttagtctacattttgcgttttggagtttgcttttattagctntgaagtagttactacaggaaagagcagtttcaaaaggaaaagcgtgtgaaacaagagttnnatactcactgcatctcagaaaacttccttgcacaaaagtaaatacttaacaagntcctgaagtttacctcattgtngacttatgtagtattttgattaattttattacttcctatgaanntaagcacgtacccctcttatatgtgggcnggacatgctgtgggcaacatcttttcaggaccctttttggtttctctgggctggtgg

SEQ ID NO: 359256 - DNA, 585 bp, Homo Sapiens
cggcaaggggcagccaggggtgcagcctccagtatgccacctcacccccaaccttggggccactgcttccaggcccccccatcaacaagcctacatttcctcaccctcgtgccctctcttcccaagaaagcccctccacctgtcccttccttaaaaatatggaaagccaagaaggtcttcttcaggccattcctctcaaccaatgcacttcctccctcccttgcaagcttcaaaggaattgatttcaaaagagacccttcccagttgccccacctttccgtcagcctcttccaggaactgtcctctgacatctctctgtctaggtctccttgtcactcttgtgcacaccaagactgttctccccctgtcagccactgagtccactcagatatcttctgcttcccaaaattaaaattacaaaccaaaacagagacagcttccatgaccttacacattgtagacacttggctacagcagtgaatgacataaacaaagtccctttcctcatgtagccctcatgctagtagagtgaaacagataataaataaactagtcaaatgttcagcatgtgagttggtgatgaca

SEQ ID NO: 359257 - DNA, 668 bp, Homo Sapiens
  misc_feature (250)..(288): n is a, c, g, or t
  misc_feature (312)..(361): n is a, c, g, or t
  misc_feature (436)..(502): n is a, c, g, or t
  misc_feature (631)..(632): n is a, c, g, or t
gtatgggagacctattcgtgggccagggaaagagcttatttgacctgtgaagggaagatccccctctaaatttaagcacatacccatgaccatgtaaggctaaataacccttcccctgttacttttgggagagaatgaagacactgaggatgacttcatttcccttattttcttctgctaacaacagttttgagataagcagtactatagagcagggatctgcaaacggggccaaatcccattcataccnnnnnnnnnnnnnnnnnnnnnnnnnnnnnnnnnnnnnnnagacaatgccccaccctgtcaatnnnnnnnnnnnnnnnnnnnnnnnnnnnnnnnnnnnnnnnnnnnnnnnnnntgggttcaagtaattctcccacctcagcctcctgagtagctgggactacagtttcacacaaccacatctggctannnnnnnnnnnnnnnnnnnnnnnnnnnnnnnnnnnnnnnnnnnnnnnnnnnnnnnnnnnnnnnnnnngtaatgacagcatttcaccatgttgctcaagctggtttcaaactcctgagttcaagccatccaccttgctcagcctcctgagtagcttgaactacaggcatgagccactgcgcccgaccgcatacctgnnttttgttagagctttattggcacagccatgcccatt

SEQ ID NO: 359258 - DNA, 681 bp, Homo Sapiens
gagagagagaactgcaccccgactcccagaggggctactggacattctcagtgggacgaggatagggaaccaaggaacactatatgcatggaagagctcagaaatacactctcggcacggcgggaccccgagtctctgacaaagtaccgggcagggacagggcgggggtcagggagcctgaacccacactgcctctcctgcaagggggctcaggagtccatagccttttggagggagttgggtctctctgggagtgggggcagaggctggattctgcccacaggagacggccagacagctattgtactgctggctccaagcccaagggtccacccttagcaaggcattcattcctcagtgtgcagaacacccctcttgagggtgaagacagaatcacaccctaccctggaaggaggctgagcccagagctttgagcattcctgctgccggggagctttatacagccccaccctccaatacctcgccctctagggactcctccctcttcctagcccttgccttccctggggggctgccctcagcccagcctgctcaggagttcccccacgctatcccctaagcctggagaggaatttcctgtttgcttggcttgctcagggtggtggctgaccacagagaacagtgcaatagcaaccagtggaatgagtgaatggtcgtgtc

SEQ ID NO: 359259 - DNA, 705 bp, Homo Sapiens
ggatcccccggtctgcaggaattcggcacgagtacatgtcaaccctttaacaacccagtagttagccatgatcattgtattaggctgcttgggttgctgtaactgttaataccatagactggctggcttaaataacagacctttatttctcacagttctggaggttgcgaagtccaagatcaaggtgctggccaattctgttcctgcctctcttttctggcttatatatttctgcctttttgccgtgtccttgcaaggcagagaaatatcttctcctactccaattcttccttctactccttctttttcttcataagccactaatcctatcatgacagccctattctcattacctcattcaaccttaattatctcccaaagggcccacatccaaataccgtcatattgagggttaaggcttcaacatctgagttttcgggcagacacaatttcgtccagagcaaccatcattttgctaatgccatctgccttggaaatattaatagcaagcttaagacttttctcaatattgaggaaggctcatagagacttcgatagcttttcgctcgcttgggaatatatacaagctgcacagagcgttcagcgtctggacgctatcacacccttttttaacatctactcccatactttgaccgcccattacctgggctatgcccctctcttgtgctcgtccggttcctgccg

SEQ ID NO: 359260 - DNA, 618 bp, Homo Sapiens
tggatcccccgggctgcaggaattggcacgagctgagagttgaataaaaaataagtgaagtagttgttcattgtcaggtcaggtttgaattctctcatacttgaaatccctgcaactgtgaaattgcctgtaggaattgcaggttgtgctaaacaatcaaacgaattggtaggttggctcccataggcaaaatcttgaggctgtttggggctccaattttctggggaagcaaattgcattgcactttgttttattttaaaaaatgatgtgaaaatacagagcatcacagcacagacaaatatcttacaccagttttcacaataaaatccccaaatgtgaaagctctccctttttgcaaaggcactttggaagcaataatgtttgtgtgcatagttgagtttatcagagtatactgattttttatcccatgaggttttcaaggaaagtgcagctggtcaacctttagtgttttctttgccacagggtatagttctgtttctgtccgctcaaatacagtctttcaggaaacgaattctctgtaggatacctttgtctttgtgttgtacacagggtagggggcagtatgttataggttagtgtggatacgtgggtcctgtc

SEQ ID NO: 359261 - DNA, 677 bp, Homo Sapiens
  misc_feature (493)..(493): n is a, c, g, or t
  misc_feature (547)..(547): n is a, c, g, or t
ggcagtatgccacaggtcctgggcaagaaaggggacatcagggatccccaaacccacagcctgtagtttcttcctcccctgcgattaccccattttatagccgtggaaactgaggctcagggtggatgtaaccacgcattcaaggctccaatagacttttgccaagttgctaagcgtttgtcttactcgtttgggtttggagcccccagcaccaagtgcacagccgggcaggtcctggaagcccaatggacaccttcttggcatccccacatacgagtatcggcacctcaagttccttcagtcccaagccagtgcacggctcactctgtgttggcacacccccctctcctctgggacattttctgatcccggatggcagcccccaggccgcacgcggtctcttgagagccctgcagagccccaggcactttccgcgggaccacccagcactcaggagcctgtccatgctctcagtcccctcagccaccgtccnctggcagcccctgccccgccttcacacctctgattccacgctctccggagcctnccttcacgcagcagccaaagggggctttttgcagtccgcggacgtgttctctcggatggactctcctttgcttttggccgagggttccgaccgctgccctcttaggcctcaggcctggtgcccggccctt

SEQ ID NO: 359262 - DNA, 572 bp, Homo Sapiens
  misc_feature (63)..(202): n is a, c, g, or t
  misc_feature (213)..(291): n is a, c, g, or t
tgcaggttcaacatgtttctgagatttgtcttcactgaattatgtagttgtggtatacactgnnnnnnnnnnnnnnnnnnnnnnnnnnnnnnnnnnnnnnnnnnnnnnnnnnnnnnnnnnnnnnnnnnnnnnnnnnnnnnnnnnnnnnnnnnnnnnnnnnnnnnnnnnnnnnnnnnnnnnnnnnnnnnnnnnnnnnnnnnnncaagagtttcnnnnnnnnnnnnnnnnnnnnnnnnnnnnnnnnnnnnnnnnnnnnnnnnnnnnnnnnnnnnnnnnnnnnnnnnnnnnnnnctgcctcttgacatttgcgaaacatttgatgtgatcagatgtttaaaattttgcctgtttgatgggtgtgtaaatttgcctttccacttttattagtgagggttgagcttaattattattaaggttatgttaattattcttaattaaggattattgagattgagctccttttcatattgatgattcttctgtaaaatcactgcctgtttatatattttgcccatttttctatttagatgtcttctcgtgccgaattcctgcagaccgggggatccactagt

SEQ ID NO: 359263 - DNA, 1779 bp, Homo Sapiens
  misc_feature (1120)..(1128): n is a, c, g, or t
  misc_feature (1731)..(1731): n is a, c, g, or t
agcggcttgtgcgattcaagaggcaactaaaaataaaattaggacccagcaccttgtttgacacacagtttgaccttcgattttcctcccttaacttccctcttcccttaatatctgtatacaagtgttgcttcaaagtaccaaggtcagaaattgattcagtacggtttactaaagtcatgtggaataaagccattggaaacaaatggaaagcctgtcgggacttctgggctcagaaccagctggctcacgcactccacttgtcagctggacttctgccttgtgaaatggaagcagcctttgttcctttctggctgagcaagctcctgaggctgggagagactaggaaggcttggtaggaggggaaaaaagtcaggaaaagatatcaaatcagaaacatggaagaagaagggaaccgatttgagttggtgggcaaaactctaaaaatctaaatctgatgcttatgtaagggttgagcgaattagggagattgctagtggaaattggagggaatttgttttgcatcatttgtctaggatctatgcaaatatagctccactaaaggaccatagggaagagccagccttgccttttcttatatgattttgtttacaaaattttactgggacttttaaatctagctatagagttgggaaaaaatatttccacttagatattttacatggttttgtttaaaattaccattacttgttttttaaaaacacatgaccacatatgtatatgtatatctacctaaacattgtatcatggtttcagtatgttattcatgtgttactgggagatgctaccaagaaaccaacccaaagaaaattctgaaaaatacatttctatttatagaataaatgtttcatttatataaaagcaaaagaacttagagttctaataaatgggatgtctaataaattatgaagttactgatttgaatatattatatttttataacttccttgccaaagtcctgatttagtacattagagaacctgtgtttcctctctcctctaccattcatctctcttccatacagtcatttgggctttttactcaaagagaatcaagaaataataaggtataacaagcttggcaaagtgttggctttttnnnnnnnnntttttttaatctctagcagtttggtaatttagcagcatcatttatttgggattcttttatctgatttcaacagtgaaaaacatccctatgataaagcctaatgacccatttcacaaaagatggaatttgcccttcctagaaaatatgacggagaaaagtctgactcagagaaagtgagtctgaattttataaggggtagtaagaattggacaattcctttgcatatctgaacttggcaggtaccgttctaaatctgaaacagggtgatagctcaaagttgccattcatccagaatagatggttttagaatgtagtgtttaagtgactgtttcattaatacacctacaccctttctttgaaagtttgcaacctaattgcatctaaaactatgaataagttctgtggtaaaatcttaaactatggaaaattacaaaaatgaatttttcttccctgaaatcagagcttacatgtgtgtttttttataacattttcagataaatgtattcaacatgtaatacagtattttcacattcacctcttattttatattgaaatgtattacagtattaaaactcagtgttcagtatttatttcactatgcantttatttaagagccaggagtgtttaatcctggtgccgtactttgtgtt

SEQ ID NO: 359264 - DNA, 706 bp, Homo Sapiens
  misc_feature (91)..(92): n is a, c, g, or t
  misc_feature (131)..(131): n is a, c, g, or t
  misc_feature (141)..(142): n is a, c, g, or t
  misc_feature (227)..(227): n is a, c, g, or t
  misc_feature (254)..(254): n is a, c, g, or t
accaaagaaaaatgtactagtagaagtcagtagataaagaagaagatccaaaatcagcaatatagatatagatattgacatcgatccagannatagatatacatagatctcaacagtatccacttaagaantttacagaannaaagttccatctttaccaataatcagaaacatgcaatacataagaaacatcctaacaagaaatgcaaaacatcttatataatganaactaccaaacttcactgaggcccaanaaagaaaacctgtttattagtatgataacataaacataaggcaatttaaatgaagataccaatgaaatgcttaagaagtaaactcaatgatttcaatgttcatgtgaaagaataaacaagttataactgacataaattattttaaacgatgcttaatagcataataaaatatgtggaatatctctgtattttaccaaatacagttatgcattgcttaataacaaggatatattctgagaaatgcatcaagcaatgttgttgttgtacaagagtgttcttacacaaacctagatggcatagcctaccacacacctaggctatatgatattgcctattgctcctaggctacaaacctgtacagcatttatcgtattgaatactgtaggcaactgtaacacaatgataaatatttgtgtatttaaacatatctaaacatagaaaaacctgcagcc

SEQ ID NO: 359265 - DNA, 409 bp, Homo Sapiens
gcctaaacttgctagcagcctacaagaatggagaaaagaagcatgtgaataactagaatccagagaattttaaggcctggggcagatgccttctggggtgccatcccagccccccagtcatttccctttctctagaacctgttccacccaccccagggtagggaccagccgcagtagatggcaggcagaaagagattctgctataaaacaccatacacataaaagaaagaacagcaacaaatggacaaagatggagtatggttttgtgcccaaagaatttacaaccccaaaatgagtttcgtgatatgcctgctttgatttctcatttattccaagttatcatttatattgttaatctatacagttttctccccccacgtattagacagcttttaaaaatggttttcaa

SEQ ID NO: 359266 - DNA, 1141 bp, Homo Sapiens
  misc_feature (55)..(56): n is a, c, g, or t
  misc_feature (828)..(837): n is a, c, g, or t
atgataaaatatatactgatactataactttcttatggtatcagttttctttatnnttcttgaataaaattacttctaccttcatttggtctttataatccactgtccacagcatcttcctttaaaccaatagtcccagaagagaccctctgaaattctaggactggatattaaaatgcctgaacctgttatctaaatcctttttaagaaacttaatgttccagctcttgaactacactgtggaacagtaatttgtgcccaatttagtggaagataatgaggctcactgtaaacactacattgtcctgcaaagtaattctgatgagagtttactgacttctagagccattctctttaaccgtctgcaggtctaaggattaactatatttgtgatttgtaataaaactgaattgtacaacactgcctgtgtttgtctggccaagacatttgcttcacttttaaaatgcacgttatctttggagaggtgaattattctacaaaatgcaccctaaatctcattgtttaaaaccttactgatctaataccatctacacaaaaaaatgttgtacttgcagaacttagtttataaaaacaaagaatgtgtatttcttcaatagccgggtatttggattgttctcttgataatatttgaatgtgactcttggatttaagtgcactattattcatggcttatacaataaaattgcactgtatggcaaatatgtctataatgtatgctttgctgaaacctcaagagtgctgtaaggtacaggtttccatattgtgaacctgtgtacgcacacacacatatacatacagtcttagggnnnnnnnnnngcagaacttttgtaagtctgtgtaacattttaatattgtttgtaatattcactaggtgataatttcccctgtaccctataactgtaatcattcaccttgggttggccggtttgtcaagcttggtttactgaatcaagaaagagtcttgtcgaatgtggtactgttcttagtgtgtaatatttgcgtatggtgttcctctgcctcagaggacagttgcacagatggctagtgttaaatttctatagacgatggtaataaaatctgaatatatttaagtgctaataaattaaatctgtgggcttat

SEQ ID NO: 359267 - DNA, 675 bp, Homo Sapiens
gcgatccaatgcagagaacgtggtaatgtataatactcctttgcattcaaagttttcaagaattctggacttataacctatatgtaagctaatacgagcacttgtctcaatccagaaaagtgttataagaatatagatattcaaagcaatttcttgattcagcagaagggcaggaaaaaccaatagatctatcaccccctcttcatgtaaatttaaatggtcagatgttcagatgtttttctattatacttgtgtccctatttaaagtacttgtttatgtcaaaactttgcttaaaagaaaactgaatgaaatcttcacaaatagatgagtctgtaattaatcatagtctgatggactcaatatgagtatctggtctaaaagggcctcatttaaccatggtttaagggactttgcccagtatataacaatagatctggagatcattctagccaccactctccaggctgattcctgattcaacagaaccccatttggagagatcagaggaaacccacagagatgttgctatgtatgatattagagattactgaaatcagagaacagttcctaattgtgagacaccactaattccaaaagtgttgaaataatataacacttcctcaatttggatttaaaactatatctctcctacattatgttaaaataatctcgtg

SEQ ID NO: 359268 - DNA, 296 bp, Homo Sapiens
gtggataggactgggcacatcccaactctgcccctgattgagctgctgagtaactcttctgcctcctgagcaaaataaggatactggcttttaattcctaaggtggttctgaagatgacatgagacaatgtcagtaaaatacctagcactaagcttggcacatagtaggcatagaaaaggaggagttggcagcttgattatggtcaaatctaagaagatttgatgcagacccaacttcctagggccactgaggattaaataggtatatataaattagctcaataaaagtgattatt

SEQ ID NO: 359269 - DNA, 721 bp, Homo Sapiens
  misc_feature (657)..(657): n is a, c, g, or t
gcgcagcatagcaagtcaactaaatctttctgatccaatgaggtttgctcattagattaagtgaaaatgaacttgcttcactgtcacaatcacatgaatagctgggtaggttttccaataatcaaatggtccatcattggtcacacatcatagatagggctggaattaaccattgcagaaagtataagatcaaatacatgaagccagtaatacaaaataataccagacattaacaccagtcatcatagaaaactacactcctgagagatttcattagcttccagggaatacagaactgcggaatacttgctcaaagtagaaaaaatattgggatgaaatgattatcttggaagtcatcaattgtagaacaaagtaagatttcaaaattatggttcaaaaatttagaaagttcttaattaaatatagatatgtgtagaattaagacttcttgaccatttgtcattgaaggtgcaattataccttaatgtctacctggtaactagctattactatttttttaatgtactcatcagtgtgttttatttaagttaatcattagcttgaatttgaatcgaggtcagcttaaatcttagaataactgataggttcctaattaatttctacttgaatttaaatctaaaatatctcgaatctaanatatatgcctcaagcagaaatccactgggtgcttcttgctaggagatgtaggagaccttttgtt

SEQ ID NO: 359270 - DNA, 602 bp, Homo Sapiens
  misc_feature (134)..(134): n is a, c, g, or t
  misc_feature (137)..(183): n is a, c, g, or t
  misc_feature (413)..(421): n is a, c, g, or t
agggagggagtggctaaccagaaaagtatgaggggccatcaacatgtctggaaatagtcagctggcaaaatggaccttgaagctggagatagaatcgtagaggtaccctctagtgagcctgtgctaaatttgtntgnnnnnnnnnnnnnnnnnnnnnnnnnnnnnnnnnnnnnnnnnnnnnnnagttttagggtacatgtgctaaaatttttcacctgctccaccctttgtactgagggaattgtcatcttcatactagttactcaacccagcattcgagtaaaatgtgtgtgtggataaattatttctttcttatttgtttattttcatacgtaattttctcttatgtatataatgacagattatatgttttgatatagagactgatgtttggagataaagccaaccatttnnnnnnnnntggctccaaggtaaaataattatgttctgtttgaaagaacaaagcacaattctcagggaaaaattttgaattaagattacattagacatacaatatatgtatatgtacacacaaaaatgtagatataattaagttaatgagattttatttttccaagtgagtcttttttagtaaaatattt

SEQ ID NO: 359271 - DNA, 762 bp, Homo Sapiens
gatttctcagccaaaaatcatcttagaatctttaaatatccattgcatcatttgttcagaatttaacatccattccaatgttggaggcttgtattacttatatttcatcatattctattgccaagtttagtcagttccacaccaagaatgaactgcatttcctttaaaaattattttaaaacacctttattgaaaagatctcatgactgagatgtggactttggttccatgttttcattgtaagaaagcagagagcggaaaatcaatggctccagtgattaatagatgggtttttagtaattgacaaattcatgagggaaagcatatgatctctttattagtgaatcatgcttattttttactcttaacgccactaatatacatccctaatatcacagggcttgtgcattcagatttttaaaaaattaggatagataaggaaacaacttatattcaagtgtaagatgatatcaggttggtctaagacttttggtgaacacgttcattcaactgtgatcactttattactctgaatgcctactattatcctgattatggggtctcctgaataaatagagtattagtccttatgtcatcattgttcaaaattggagatgtacacatacataccctataccaagagggccgaaactcttcaccttgatgtatgttctgatacaagttgttcagcttcttgtaaatgtgttttccttcggcttgttactgccttttgtcaaataatcttgacaatgctgtataata

SEQ ID NO: 359272 - DNA, 709 bp, Homo Sapiens
aagaagagggtaaggacacatcttccatggtcacttcacctaatagcttggttgtagaatcaattaggtctttctgacacccaaaacctacgcctttttctatcacagagtgcaaatcaggatctttccagaggaagttttacgtaggtagctaaaaatcccttttcacaagacaaacggtcttctgagagtctttttgctaggctgatctgaagctccccagcaccaagactgttcaacttcagactcacgtcaacttctttccaattgaaaattcttggtcgaacattcttctaaaatgtcagtcaaactttgctctaaaatatgtcctacggacacttgggatctgaacagatattacagtggtagggagagaggattagggaggagtttactcatccaataaatttgttaaacaggttgaacaaaatccaatgcgttactttttaacttttcagccttatagattagaactctccaaaagatgcatgaagagtttattaaatcttctgatggaacttttgcaaaaactgttacagtctaagagaaaagccacagtcagactagaaaaagaaaaaatgcagataaacttcatcaaaatgatatttagctttagttgtgttttaataaatacagagaatgttaaacatgcatactcagatgttatttaatttgttcatttctttgtaaatggaaagtcatcattggc

SEQ ID NO: 359273 - DNA, 737 bp, Homo Sapiens
  misc_feature (369)..(380): n is a, c, g, or t
  misc_feature (697)..(697): n is a, c, g, or t
  misc_feature (724)..(724): n is a, c, g, or t
ggtcgatctcatagacggatcccctttcattttaggcaaattaattatactagtaatcatttgctaatttccgcatttgttcacaaaaagtgataattgaattctattcttaaagctctgctacattacaccatcttatcacctgattaaataaagtaatgaacatttacaaaggcaccgctgtgtaccttgacagattcaatacattcaagatttcaattcagaagtttctttccaacgttttggaaaatgtactcagaagcagaacgattagtcatccttttccctcttgttactttaaagattttggctgagtttcgtttggcaagaatagcatcaaacttactagcctctcttttaaactactannnnnnnnnnnnaaaactaagcagaatacaaaaatctaaaaatctctcatttggataaataatttatgaaaattattcaataaacttcatagtacaatcttcagtattgtctttttcaagcacagtgatcagtgcatctcaaagatgagggaactgtcaaagtaatatacacactaaaatttaaatttttaaaggaaatcaaagccttcaagttatccaatgaaggaatgaggtttgtatattaaaaaggtagtgtaaaattataaagcatttaaaggaaaaacaaccgagggaactacattttgctacactggggacggaaactgggncttttcggaatggcttctaaccccggnaaacaaaccatta

SEQ ID NO: 359274 - DNA, 684 bp, Homo Sapiens
  misc_feature (201)..(228): n is a, c, g, or t
  misc_feature (488)..(488): n is a, c, g, or t
  misc_feature (574)..(574): n is a, c, g, or t
  misc_feature (588)..(588): n is a, c, g, or t
cagaagcctgcagggccagacaggtaacttaatggaggggatggggccggatgtgcagttaatgagttggaggatccatgtccagtctaagaggcagccccctgttagtgccagctgagtcatgaagaactgtgaatcagtcagacttgatttttcaagcaaagggagatacccagatttttgtgtaagctcctccaaagnnnnnnnnnnnnnnnnnnnnnnnnnnnnaatgttggacaaccagtgaaaagcaaaacaaaactacagacccaaacgttgctgcctgctaccagtttgcaatttcttatgcattccatgaaactgactagttgacagtcttttcagattgacagtccatgaacaggaatttgctaatatttctaagactcagaccttggcagaaagatcggaaagcaaggtagaatttggagaccgggttttataattgtaagatctcacttttgtgaattgctgattagaattcacanaagttagatccatggtgcagtgcctcttctctcatctctaaagttaggaagccctcagcaccttttgaaactgtgtaacctgacangaaagatgtctggngaattagcaaagtctatttttggtttggtccaagtgaaatttcttgacaagcccaccccattctagggagtctagtagactcccttgagctttttt

SEQ ID NO: 359275 - DNA, 722 bp, Homo Sapiens
  misc_feature (177)..(196): n is a, c, g, or t
cgcatccccaataggtgctaacagaaccctagtggtgtaaaaggggtcaagtgcagggaatgaaagtccctccagcctacaagaggtgaacttgattaacttaggtcagtcatggtagtttcttttaccttcatttttgactggtttaggaacagggcatgtgaacaatttatggcnnnnnnnnnnnnnnnnnnnncacgtgagagcaagtgttttggaagtacatgggaaccgttttctttcatcttaaaaagggtgtctaaaagaaaacagtctccattatttctgtgtttgcatgttttgtgagaatgagattcttagaaaagcagcaatcaattgtgaggaaacaaacctgaggacagaaaccaatatccacatcaaagaataaagaaatgttaggtgtttatttgaataattaggcaatagtttctgtaacctaaatgtgagatgtgggtattttgatttgcttctttctcttgcacattgggaattgaaatgagagggtgttttgactaatttttctaactaatgttttgcctcctatgcttgcaattaatttacctttcagtattgtttggtcttttaaaaactggttagaaacttgtaagtacattacaactctatctccttttctgaaaataaatgtgaacaatcgattctacattcttgatacaagaaatgttacagtaaacgctggaataacaaaaagcctgcagcccggg

SEQ ID NO: 359276 - DNA, 634 bp, Homo Sapiens
  misc_feature (47)..(394): n is a, c, g, or t
cggggacaggggttgccccccaggccggcaaaaatggatggaaaacnnnnnnnnnnnnnnnnnnnnnnnnnnnnnnnnnnnnnnnnnnnnnnnnnnnnnnnnnnnnnnnnnnnnnnnnnnnnnnnnnnnnnnnnnnnnnnnnnnnnnnnnnnnnnnnnnnnnnnnnnnnnnnnnnnnnnnnnnnnnnnnnnnnnnnnnnnnnnnnnnnnnnnnnnnnnnnnnnnnnnnnnnnnnnnnnnnnnnnnnnnnnnnnnnnnnnnnnnnnnnnnnnnnnnnnnnnnnnnnnnnnnnnnnnnnnnnnnnnnnnnnnnnnnnnnnnnnnnnnnnnnnnnnnnnnnnnnnnnnnnnnnnnnnnnnnnnnnnnnnnnnnnnnnnnnnnnnnnnnnnnnnnnnngggtcattatctctaacttgaaaaacaccatcccctaggatactgcttcataacctcacccgcccgcgccacttcccaatggttatggacttcatcaggctccacatgcagtggtcctctatccctgctagttccatcccacaaactctttctacttcagaactgaatgatatccaaattgctctcagaagagtcatctcctattccaattttgatttaaaccatactctaaaatatggg

SEQ ID NO: 359277 - DNA, 515 bp, Homo Sapiens
aaaacttgaccctaaattatattatagaggattaatcaacagattaaaataataaaaggcttcactaaggatatgctacatcttgggattgcagtatgaatgaattgagaatcttaaattagtgaaaattatccctaaaactgtgtctctcacaatttatcctgttgttaatcaaaggcaagatcaaccacttgtacatcagcccacaaatctgggtatcttccttaaacctccttctactctcttcagaatccattgtttctcatctgatactgatcctcaaattctgttgattcacaatcttgtaatctacgtactgcctccacatcttcctgtcttcactatcaacatcttaatggaggtggtagtatcaaacctccaccaatacctatccctttttcttccctctcttcctgtctgcctcccacctcctcctcctgggtgtctcatgtttttgcatgtggcagaaataccgcagaagtgatgctgtacccttctcagtgtggaggaatgtc

SEQ ID NO: 359278 - DNA, 278 bp, Homo Sapiens
ttttaagtttagagaagtatttactttggaaaaccacttgtatttgttcaataagaaccactaactttgttttaaaaatcttttttaaattgtgaaatacaacaaatatagataagaaatattttaaaatgtactgctcagtgatttttcagaaaatgaacaccatgcaagcacaacaacagaacaataatagaacattatcaaccattcgagtgccatcctcattccacacttaatcactactcagagaaaaccactattctcacttgcatttcttt

SEQ ID NO: 359279 - DNA, 444 bp, Homo Sapiens
  misc_feature (285)..(285): n is a, c, g, or t
  misc_feature (429)..(429): n is a, c, g, or t
atcacaggacgatttattcctcaggaaccctattgtctctcctgatttggcctctatggaaaccattcttgtctataaagcaaatttctttatgtctaaacaccaaggtagagagaacttaagtcttagtcccagtccttgacccttatgtaacacagcagataaaaataatcatgtattaaggacctttcctaattcttttatctgaagtttctaagctttagcccctgctcatttgagctattacatggaaagtaactcacagcatattctttcattcaacanatatttaatgagcacctactatgtagtagacatggtactagacattagataccacatgattaaccaaacagactattcccctgccttcatggagcttacagtatgagaacaaacagtaaacctaatctattattaccaatgctnatgcatgccatgagg

SEQ ID NO: 359280 - DNA, 125 bp, Homo Sapiens
ctgactagatatgctcatgatatgtaccatgtcatatgacttttgtgttcttttctgcattttatctacttatcatacttttatctgattatttcttctggtttggactccagttcatttttctt

SEQ ID NO: 359281 - DNA, 703 bp, Homo Sapiens
  misc_feature (17)..(17): n is a, c, g, or t
  misc_feature (27)..(27): n is a, c, g, or t
aaaaatgtgtaatattntgcttagganctaaatactttggtagtaaattcattttattttacttttcacttgctttattggaccagaattagggtattatattaaataaaatatatattcttgtcttataaccctttctttccaacaccctattataaaaattcctagataatttaattatgtaataattattgtatcagatgttttaggtgtttggctacaagttcccctactacattcttttaggatttctcgtttgtaatctcccctctcattttctagcttctagtaaaaggcctaaaaatggctgccattgtatgtgaatctatctctccttctacaacagcttatgtgaatttctgacttcctgcatgtatccaacctagaaactctatttaaaatttaaagttttgcctgtcaacttgaatactatgcttctgagtgactcttcttgatattgatagcactttcagttttactccctgtctccctgctcgggtccaactgcctgccactcagaccagtgacttagtcctctacatttcatgatcattgcagagtttaattattcagttctggctgagcattcctttactctcattttcttaacagctggcctgacgagactctatctatttttagatcaactgagttctggtagtttcatcttgatctcgtgactattattaggtgaggcaagaag

SEQ ID NO: 359282 - DNA, 693 bp, Homo Sapiens
  misc_feature (18)..(18): n is a, c, g, or t
  misc_feature (84)..(84): n is a, c, g, or t
  misc_feature (172)..(172): n is a, c, g, or t
  misc_feature (175)..(175): n is a, c, g, or t
aaccttccaaacatatanttcccaacatatcaaccattaggactcaaattttttactaatatgaaccatcatttttttaatcanaagtttaattacatttattttaatgtaagtgagtttgagcattcttgccagtgtctatcggcccttaatacttaattgctggggaccnatnttcaaaggaggaaacacaaagcagtgaaaatatggccagatctttttatttatttattttgtccaatcctggtatcatgatttcacccgtgaaattgtgtcattgctaagtgaatatgataaattgtcataaatgaccccatgaattgtattattaaaactcagcatctaaatatttcaatgattataattgactgggtgtagttaattgagacttgaagagaaaatactttaatgcaatatgattattccagatcaaaagtaagttgcactttttaaaaagaaacccacaaaaaagaaatatattgactctcctttttatttttctctaaatgttccaaaactggagttcaggttctgttcacctctgacgagcaataccgctgtggaaaaattacttaactctgtgaggctaggccttcctgtttacaaaacagaactaatgagagttcctatttcagaggattgaaataataatgggaggtaatgcttgtaaaatgcttattacattaaatattc

SEQ ID NO: 359283 - DNA, 716 bp, Homo Sapiens
  misc_feature (58)..(58): n is a, c, g, or t
ggcaagctgacaataggccccctcccaaatagatagagtcaatctagtatctatgacnaagcaaggtatagggaactcaaaagttaccacgagcaagaaagggagtctgcgtgtaggtaaatgtggatattcccacccattaggcctccctgttaacatgggtgaaaagttgcattggcattcatgggtggcaccctgcgaggttgcccaggactcggggatataaggacagaagaaagaatgggacaccattactctccctcacgtaccccaggtatttgctaggaagagaaaggacctagggatgcctcccctctttctagatgggtagccattcatcttcagtctgtacttctctcaaatgcctcctgaatcactgggattcctttggggaaaaaaagccttctttttcctcgaactctgtcttctcttcgtggatgggtaattgtgtcctgtactacaggacacttcccttagatgcatcctcaaatggggaaaagttaagatccccaaactttaaactgcttagcttaaatgagctcaggggaagggaacccagaagcctgacatgccccgaaaagggcaaaagttcttaccagtcagacttctggcctccctctccctgtgcaaaccagttgaatgaatgataaaattactgcttatatcctctgtaaagttttgattaatggaaaaaaggatttgtgccttgtcttaag

SEQ ID NO: 359284 - DNA, 708 bp, Homo Sapiens
  misc_feature (32)..(32): n is a, c, g, or t
  misc_feature (44)..(44): n is a, c, g, or t
gcagcccgaaaaggtctgtgtcctggtcagtntggtgtgtcacnatctgtaccttgcatgtgttctgctcagtatcttggagggcaaatcacatgctccagaccctcttgccaactggcttctgattagacccaatgaaagtctgaaggaagatgaagggcagagtaagaagagaagtctgggtattcctcctgatctccagatctgggtggcagctctggctgtgagtccatctgcttcatggctccagctcccttgggcagtccaggttctgggctccctccctttgtttctccagccctgggagcaaccccactggtagggggccggaggggtgacagtttcctgctgctgctcctctctggttggcctccccacccccagatgccttttcaacatttccaaccatttcccctgctgaacctgggtcctggtctcctgtctgggccctgcctggtaccccagactggaaggagacagtcacggtcctcgtctcctaccgcagctgtggatcaaggcagtctcactgggcagagtggcaggaagcacctgggcttgagtgtaggcagaagcccagtcctgccgccaggccaccagggtgccctttcagtgaccatgaacagaattcagcagcctcccagcagaaccccactggatcccagaccaggagccctggcaattgttgcagctgagtctgtagaatctctt

SEQ ID NO: 359285 - DNA, 750 bp, Homo Sapiens
cccgggctgcaggaattctgttacgagatatttatataatgtcttcaaaaaataaatgaaccttaactttgtctttctctctcaaattgggttggctattactatccatattgccataatcatttataaacagtaatcacaatctctactgagcccatgtctctaatcatacaagtctctgtatctttatgattaacatagcaaaaatgttctgaaattataactttaatgagacataaaagtaaaatcttgttttaatttgtagaaaaattcagttcttttaatgccacactcagaaaccaatgacatttcagtgaccatgagaagaaaaggaagggtgactatggtggatgtaagcactgctgcggttctttacatacctaccctgctctcagcatccacactaatttccatacttctcatcacactgatattggttttggccatgcgacttgctttagctaatttaatgtaggtgaaattgacagtatgcctgttctagtccatattcttgagagggattacatgtttctcttgtcttcttggtattgaccatgagacgactatgccctaggaagatgctgccctttagcctgagcctcagaaggacttggcctgtacttgaatccaatctacagcatgaatccaagccttgcttaggtcaagctccagacaactcacccaccttattagcataccacaaatgtcttaaggccaggagtttcatttcttgtttacaccgattgggct

SEQ ID NO: 359286 - DNA, 679 bp, Homo Sapiens
  misc_feature (85)..(85): n is a, c, g, or t
  misc_feature (126)..(127): n is a, c, g, or t
  misc_feature (129)..(130): n is a, c, g, or t
  misc_feature (421)..(433): n is a, c, g, or t
aagcggagaaatagatttaaagaatagctttatgtttgtaaaatgtagatcttccatttagtctacttcctcacttatgactacnatataatgtgcagcttaatgtgattgaaaagcgattcacannannattctataagggtattcctataagaaagtagtattcttttcccttctctctttctctctaaagtaccacctacaacaattattttggaactgctatagttcattggggtcacacttttatagctgaaattaactgtaaatgataaaagatgctttaataaaaaaatcagggttgctttcctgaaaatattaatttctatttacagatattgaatagacttgtcactttgcaattagaaaactcagatggctattagctccaaaattcaagggtaaaaatcaccttaaaaannnnnnnnnnnnnacaagaaaacacctacaagtagtaaaaatgatttttgaacactgtaaaaaatgattacctgggattattattttattattacgtggggttattaggatgatacttctggaaatattctaaatttgttttagaaatggcagtgattcttctgcgaagagatagaatttgttaatacaatttctatacagttaagttggcagtgcatctacaaagttagatcaggacaagagttgtatcttattctac

SEQ ID NO: 359287 - DNA, 185 bp, Homo Sapiens
taggggaatcttggcctttccttttctgacctggggcagccatggggtgccaacagtgaaccccagttcaaattggtgtcacgaagcaacgtgactctggcatctcagagtcaacacaagaggagacctctcacaagcaagcatcctgccttaaacaatttcccaaatacagttaacaggaagtc

SEQ ID NO: 359288 - DNA, 553 bp, Homo Sapiens
  misc_feature (103)..(103): n is a, c, g, or t
  misc_feature (141)..(141): n is a, c, g, or t
  misc_feature (224)..(224): n is a, c, g, or t
  misc_feature (256)..(256): n is a, c, g, or t
tgaaaaccgtttccaatcctggacattttcttccctttacctactttgggtctaattcactcttttgcaagcttcttaaggtgaaggtttagattatcaattnaactccctttcttttctaatgtagcacttaagctaaanatttccttctaacacactttaagctgcatttcgcaattttcactatgctgtgtcttatttttaatcccattcatataatttcntaatttccttgaaatttgttttcagggccccncctccttctcttgtcattcagaatttattgattacattttgggtttcattttatgtcccctattgcatttactgactatacatctttgtattgttttagagattgtgctagagtttataatatacatcttaaattaacacagtctaccttaaatactattattttatttataaaaattttacaatggtatactttcatatcaacctgctatccttgctttcatacattttacttttatttacatcataaaactgacaaaaaatttataatttgtctttcacagttatctttttttaa

SEQ ID NO: 359289 - DNA, 168 bp, Homo Sapiens
gcatatgatgatgcaagattgtgtccttaatagaatttaaattatgcttagtgttttgtataagaaggtcatttattgatttcttcatgttagagtctaaaccttgtccactagcatacatattttatctaacggtctttttccagaaaaaattcattaagagttatt

SEQ ID NO: 359290 - DNA, 351 bp, Homo Sapiens
caaaatataaaaacataggaatgatatataccaaatcatggtgctatttgctagggtaagaggaaggagtgggatgaaagagggagaatatagtgcttcacttataacctgtaatattttattttctcaaaagttgagggaggctgtaggtggaatatgagacaagtgtgggaatgcagtaagatctatcctgggtcatgagtatacagtagttgtttattggaatctgtgattctctatacaattgaaataagtaataattttttcattggtttggataagtcttttgattataccctagattgggttattttattaaggtttggggccattagtatttatttattttcg

SEQ ID NO: 359291 - DNA, 670 bp, Homo Sapiens
  misc_feature (142)..(143): n is a, c, g, or t
  misc_feature (232)..(232): n is a, c, g, or t
aaaacggtgaagctgagtgtacatccatccagggaaccactacccagggatcccctcccatatgggtttaataagtttaatataccgccagttacatttattaagtgctatgtctcaccagtaccttagagctttcatcacnntagtcccacatgcatgatctacttaagccagatcctgtccagcttctgttcatctccagaggctcatcgtcacttcaagtaaagcccanagttcagggcatggcctgtaaggctcaaagggtttgctcctctctgacctcatcctcagcacactctgcccatttcaccgggctccagccacaccagcagcctccctgaagctcctagaatacacctgacagcttccccacagggcctgtgtgccttctgtaccctgggcacgaaatgctcctgccccagatcgatgcagttctggctctatcatatgctttaaatgtcatcttctccacgggccttctctgacagccatcctgtactccctcagcccctttcttgctacgtttttctccatcacataccaccatctaatataccactgctattacctgtctgctcattcattgtctgcctgccccctctgcaatgtcagtgccacaaaggcaaggattgttgcctatttagttcactgctgtgtccctaactgcctg

SEQ ID NO: 359292 - DNA, 610 bp, Homo Sapiens
  misc_feature (70)..(70): n is a, c, g, or t
  misc_feature (83)..(83): n is a, c, g, or t
  misc_feature (89)..(89): n is a, c, g, or t
  misc_feature (95)..(95): n is a, c, g, or t
  misc_feature (106)..(106): n is a, c, g, or t
cggaaacgacggcaataaaccatatagcagatttctgcttccatatctttggattctgatatcccaaaanaaggatttaaacncctttntgatcnccatccagatnttactcatggccagagccacctggtttctggctgaggatagctggtggaagatgagaggggcacacgttgcacaaaggagtgtgctgactatgcttgaacacacagaagacagagagagaaaagtgctcggtatgcaatatgtagaatgattttgcacatctaatttttgctattcaggagtactacttagaagaaaaatactaccgttaatcagcatccagtcagaaaaatagagccctcacaaggtagttcaatagaggtaatttagtatagagacctgttacaaaggtcctgaaatctggggccagcatgattgtctgtcaacagaatctttacccccaggctgtttctttcatttaaaaaagaatgaggtaaataaaaattttcttttcagttgctttcttcttagaaattttattcttcgtatagattcattaaaatgtagtttatacatttatatatagttttagtatagttactgtaaatccttttcttacttttcc

SEQ ID NO: 359293 - DNA, 441 bp, Homo Sapiens
agagaagggcaaaaatgcgctattaaataagcatcaagataatagaataaccaatcttgcataataaaattgttgcaactactgtgataaaagaggttgaactgggtgaggagtggtcctttttacattgctcaagaacactagaagaattaaaaatttatgaattacctcctagaaacaatgatctggcacggaaatgtaataaaacacccactctcctgtgtcctcctaagctgctccatgctgcttcattttgtgactgtattagtgtgacaactttctgaacctctagaaactgtcttttggcaaagacgaagatttacaaaccaaaagatgtcttattgaaaatccagaggcagatggtgtagaaaggtaatgttaaaatgtgaaccaaatagaatctcattatgtatgttctgtatatttgtaattttaatttct

SEQ ID NO: 359294 - DNA, 721 bp, Homo Sapiens
aggcgccgggcctctggccccacttgaagagaatcagatggcgtgcagtgtgaacatgtaagttcctgattgagggcgtctcccggatcaaaaataatgaggattgttaaaaatgaatagtgtggaatcctgggcatgaagcagtctctgggatagcctttgagacctcctccttccatgagtgcagctgacacagaggcaggtaagaggacaggtagccgtgtctgctgcttatgagttgtcccagctctgccccagctttggaatcttgggcagtggcagagggttatgtgacagcgtctatccctgagagttcttccagattttaaattctatgattctatcttttggaaaaatagtatttcctgtttcttaccttgacagagatactgaatgggtcgacaaaatgtatgcacgtcttttgagttcccccagaaaaacgatgtaaacagaatcattcgttggcaccctgcagttcagttcagattttgtgtgggacacagcagatctcagcgtgcactttgagagctcctccaggagcaggctctccttccccataggaggctggtgtaagttgcatcacagccatgtcctctgtgtcctattcaccaaggcaagcattgggaacagggcggtggagcaactagcctaggtgaccctgcttggcttcaagttaatcttattacgtaaagaaacagagaaggatttactttaaaaaccc

SEQ ID NO: 359295 - DNA, 642 bp, Homo Sapiens
gaagatccctatgcttgtgatgactgtatgagaaaactaggctaatagtgtaaatagatagaattgcttgatctggtgttgagtggaacttgcctagaatgaaattctgagaaattctcatttataagtgttgtagtgataggtaagttattcacccatccagagttacactgtacccttggaatgacagtgatgtacaatgatgtctttctttccactctgtctcaatcagtaagaactggatattactttaattcagctactgttctgccctaaaaagtaaacattataaaaatgaacctgaaaagagtcttagggagtctgatctcaccatattcatacggtgtgacaggtatttaaagaggggaggcatcactaaagctatttatgaacctgaacaatgtttttcaagttttcataaagttttaacaatttaaatatctatactgcatctaggtattcaataaatataattgcatatgttgtgctttccataaattaaaatcctcaaatgcctctcaaaccaggatggtatttccacatcatgcctatttaaaagcaaacataatagatactattcctggccataaaaccaggtaaaccaccctaccccgttcaaaaggcagaaacatctagtttccc

SEQ ID NO: 359296 - DNA, 630 bp, Homo Sapiens
  misc_feature (36)..(36): n is a, c, g, or t
  misc_feature (44)..(44): n is a, c, g, or t
  misc_feature (133)..(248): n is a, c, g, or t
aagcatccagaaatgacatgctgtctggaagctatntaaagggnccgtctattgcttcagcaacctggtggaatgcccagattagctacacagcaaatgccaaagaaaagcagtgctattaccaccactaaannnnnnnnnnnnnnnnnnnnnnnnnnnnnnnnnnnnnnnnnnnnnnnnnnnnnnnnnnnnnnnnnnnnnnnnnnnnnnnnnnnnnnnnnnnnnnnnnnnnnnnnnnnnnnnnnnnnttcatttgcccatgagaatggaagctctacaaggttaagtcattagctacttaagatcatttagttatgaagtggcgcagctgggactcaccatctggggactcttaagttagtgtgtaagaaccacctttgaaaatctcataagtacttgaaagtatggggttcagccaatgtttttcccagttgattaccagataaaggcattttcttaagtttagggaccaggttgcatgaaaaataagtgactttgtatgccagaaccataatcatcctagcacagtgtgaggtacacacgcaggagggaagtgtgcccccgttgtcccgcctcacacccactgtgggcccgtgctcaccagttggctccactagaagtgccacctgg

SEQ ID NO: 359297 - DNA, 892 bp, Homo Sapiens
tgcagtagtgagaggctgggggtgcggctctttccctgcactcctgccgaggaagcgtgcgtccctggcgcttccttcttctcttccggcggagagcttgggatgtggtaatgccagccacactcctcagagccgtggccagatctcatcatatattatcaaaagcacatcagtgccgaagaatcggtcatctaatgttaaaaccacttaaggaatttgaaaatacaacatgcagcacactgacaatacgtcaaagcttggatttgttccttcctgataaaacagctagtggtttgaataagtctcagatcctggaaatgaaccaaaaaaagtcagataccagcatgctgtctccattaaatgctgctcgttgccaagatgaaaaggcacaccttccaaccatgaaatcctttggtactcacaggagagtgacccacaaaccaaatctgttgggttctaaatggtttataaaaatattaaagaggcatttctcatctgtatcaacggaaacatttgttccaaaacaagacttcccacaggtgaagagaccactaaaagcatccaggaccagacagccatccaggaccaaccttccagttctgtctgtgaacgaggacctaatgcactgcacagcatttgcaacggcagatgagtatcatctgggaaatctgtctcaagatctggcctcccacggatatgttgaagtaacaagcttgcctagagatgcagcaaatattttgggtgatggggtgtgggaaaattctgcaaaagaaaggtgatcctggaacaatattcttcttcagggaaaggagctgctgtgtttttggaatgggaaagacaaaactatgaaacatgtggatgaaagtttctagaaaaacatggaaattcaccc

SEQ ID NO: 359298 - DNA, 396 bp, Homo Sapiens
gaacacctctgcttctctcagagaggataaataacattcaaatcccacactctaaggcatactttaatcgtatgacatatgcaatgtcttaaatgtttgtccccttcaaaacttatgttgaaatttaacccccaatatagcagtattgagagacaaggcctttaagaagctattgggtcatgagggctctgccctcatgaatggattaattcattcatgaattattggaataatgggttatcatgggagtgaactggtgactttataagaggaagagagacctcagcaagcaccatcaggcccctcaccatgagatgctctgcacagctttgagaccaccagcaagaaggccctcaccagattcatcccctcaactttagccttcacagcctccag

SEQ ID NO: 359299 - DNA, 690 bp, Homo Sapiens
aggccaacaaattggagacttgaaaaccaggagtagttctaagttcaatcgtacagttacatttaatttgagcaaccttctcaatcctttggaatgatggattacctacttttaaaataaaataacacaagattgataaaaacatgattactagaaggataaaatgcaaatgtaaaggaaaaggttttgaaaataaaaggcaggaagtattattgtgttatataggaaaattagtgacccaatttgacaaaaagtcattctgttttcaccaataaagaaacgtataatcattttatgcagaaaaaatagtgaggcaaagttagcatagagaccacatctagggaaatacatgctaaatataaatgaataatgcacgtaatgaattatgcatgattttaaattagttgatgaaatagattcattatagatgataatgcaggatttctgatcctcgttttgaatttgataccgaagtaaatcattgtgttggaattccctctgacagcccttgcagtgtaaatctctccatgtagcttgttcaattcattcttcttaatgaggagggaggaaggagaatgctggcagcattacaacaaaggaatatgaaagtgaggcaacagctgtataagggattaaaatatggagaaagagcataacatatatgcatttgcttatgaatgaacattttta

SEQ ID NO: 359300 - DNA, 724 bp, Homo Sapiens
  misc_feature (36)..(36): n is a, c, g, or t
  misc_feature (367)..(399): n is a, c, g, or t
aagccgagggaaaacgagatggacgtgctgaagagncgaccgataagcggattagctttacgtcgggagaaggtgtcctttataaggtaaggtttaagaggaaccaagattaagatgcaacgaacagtagcactttaaagtaatgtaattcacccagaggcagatatttttcatgattatcaacttagtttttatcaactgaagatattttctttgcatatttcccataaaactgtatctatgatgatttttaaacaaaattaaacatgaaaaacacatataattccaaattgctgcaaatttactattgcatattaccttatttcaaataattactattactgcatgctattattttattttttgnnnnnnnnnnnnnnnnnnnnnnnnnnnnnnnnntagtacattatcctaactaaatctgactgaaataagaaaaagtatttaaaataaataatgtaccattttatagtcccccaataaactataattaaaataacagtaaaaagatgatagtttttttacacctgatgctaactttaatcaaagagataaagtgttcgtttaaaaatgttattatctgccaaaaattttcagtcaaattttctctatcttagtattaatcaaaatgctttttttatactattttactttttatcagtaaattaaattcttatctgtcacatttttgaactttcctcgtgccgaatcctgcagcccgggg

SEQ ID NO: 359301 - DNA, 689 bp, Homo Sapiens
  misc_feature (40)..(40): n is a, c, g, or t
  misc_feature (56)..(56): n is a, c, g, or t
  misc_feature (77)..(77): n is a, c, g, or t
  misc_feature (125)..(279): n is a, c, g, or t
  misc_feature (303)..(347): n is a, c, g, or t
gggagaaggaacccagagaagatataaagggccaggtgcnatgctcatgctgtatnccagcacggagcttagcaagntggatcacctgggtcaggagttcgaaccaggcctggccacatgggtgnnnnnnnnnnnnnnnnnnnnnnnnnnnnnnnnnnnnnnnnnnnnnnnnnnnnnnnnnnnnnnnnnnnnnnnnnnnnnnnnnnnnnnnnnnnnnnnnnnnnnnnnnnnnnnnnnnnnnnnnnnnnnnnnnnnnnnnnnnnnnnnnnnnnnnnnnnntgacaggagcgaaactctgtctcnnnnnnnnnnnnnnnnnnnnnnnnnnnnnnnnnnnnnnnnnnnnncttgatgattgggctctgataatgaatctggagggcaatgggtgatgttgaaggctggcaagcaggggagtgacatgatcagaggaaaaggtaattttgggtgcagtgtggagcataagcaggacaggcaaggctggcaagagggaacaagttaagaggctgtttttgatctgggacagagagagggtgatgactgatctggggttggagaagaaagcacatgtttgagagggctgtggaagatggaatcggggagactctgccagcagaagatgtgggcaaagcgccgatgagctgttctggagcacggggcccagcacagggtgagaggcaagaaacctg

SEQ ID NO: 359302 - DNA, 567 bp, Homo Sapiens
gcagtattatattgaatattataaatgcaaaggttgttagggatgaatgtccaaaccaataattttatatgagagtcagctgagatatgcaataccttctggatggaagtgttggaaaaaaatcactttgttgaagtttttaaaggttttttaaaggatactcatctatgatcaacatcaaacctatgtcccagtaaatcaaatgtccctatcacatgccacaaagtagaggcaaatgaattaaaggctgtctggttctactcccatctctaccacccactcctatcggacctgaatgaaggtgttggatttttaatgcccttccagttacaatattttgtaattaccaaatccccacgttagttggcaaacagatctatacagaacatagaagattaaaatatataatttttaagcattcatttcactgtaaaactatagttgaagcactaggcaaaaaaaagatattcattaaagagaacagagtttatattaattgtttaattacctagccatggcattcaagattatcatcttgcaaagcgaattttatttcttcaagaaaat

SEQ ID NO: 359303 - DNA, 435 bp, Homo Sapiens
acaagacatcgtaatgatcaaagaaaaataacctgttaataaatataagaaaatagaagaaaagattgcaaatattatagtatacctgaaattgaaaaaatcaggtgtaaatactaccagtgagaaacattgaacgggaaattaggtcggtaataaagagcagattggaacacaaatagggagaaaattatagaagagcgtatgagatgtaaagacatagcagaggtcaaacatacccgcaagtggagttgcagagaaattgagacagaagaaaaatgtctgatgaaatacaggccgagaatttcaaaagcagctatgtttcaacccacagattcaagaagctctgtaaactcctcaatataaatatgaaaacaaagcaaatctagggacactaaaataaaatggtagaaaatcaaacctgcagcccgggggatc

SEQ ID NO: 359304 - DNA, 697 bp, Homo Sapiens
  misc_feature (555)..(555): n is a, c, g, or t
  misc_feature (630)..(630): n is a, c, g, or t
  misc_feature (638)..(638): n is a, c, g, or t
cattcactgtttacatctttgcactgctatatatttgtacatgcttctttctcttcctgaaatgaaactctgcattctcctctctacgtccttatttaggtcccaccattcttcaaaatccaactcgaattgaactccataaaaaatccacttccctttcttccctctgcccttgtcctatctccaccacttgttaacctcacccctatttaattttcagagcacatctccaggcattctctcttctgatgtagatatttacatacatttgtcgtttccctgcatgaatgccaaattctttggcttcaagcttttttcttgattcatttgtgtggccatcataaagtttagcctatgccttcaatataccgcgttttgaagaacatgtgttcaattataatgaatagaagaattattgttaaagggggcaatttaggttggattgaggacacccagcatgaaactgaaatgactgagaacaggcaattcatgactgcatgctctaaccactagactattttccattctgaataggacaatagtggtcattatttntgttgccacaagttcattctcacactcacactgagcctttgaagtgaaatctctcctagcaccacttgaggttgngaggattngctcactatttgagggattgcagtagaaagtatgctctctgtgtgctgtcacgtttttt

SEQ ID NO: 359305 - DNA, 154 bp, Homo Sapiens
caaactcatagtgtttcccaaatacttactaactttatatatttacaaaaacataataattaaggagataattattaaacatgaaatgaaaactatctttttaaatgactgctgtctctttttatatggtagcaatagtattaaaactatcttc

SEQ ID NO: 359306 - DNA, 667 bp, Homo Sapiens
  misc_feature (66)..(66): n is a, c, g, or t
gcacgagctggacacttaagccatctgcagattgcagagctaagagagtatgcagcaatacccgcntggggcttcggaagctgcaggcacccacccctagatgctaccctggggccagagtccaaaagccctcatcccggttcctgcccctgactgtctgcatgctccccttcccataagggggagcaacagcagtggccagagaagccacacccctgtcacacgtcttgcaagggggatcagggaaccctctcgtttgactagttacacaggacttggcattctggactttaaaatgggcactctcacctaataccaatggtgctccataggtggcaactatctatcccatgtgcaagaaccataaatttcactatctcccttaaaatatactgtctgtcatgctttaggctccatgaatcacaacccatgctcccagtcctttgctatctgaatgatcaacttgtcttctattgtcaatgacaccttccctgctctgtatctttactcactgagtgttcttcatcttctccctagtgagggtcggaggaagacctaataaaatttactgaacaaattacaggagaaaaatcttaatgctgctttacaaggcaaaattgaaagtctcaaaagtgtattgtgtattctaaagtacagtttaatgaat

SEQ ID NO: 359307 - DNA, 638 bp, Homo Sapiens
  misc_feature (126)..(126): n is a, c, g, or t
  misc_feature (203)..(203): n is a, c, g, or t
atgctagtaagtgaataagggttaattgtacgagtttgggcatgttatcttaatagaccaactcaaaaactggcatttctgtttctaacaaactacacaaagagcagggtggtcaatgaagcacanagcctttctggaaggaacactttggtaggtactagtgagcctgcaggacactctcagtggaagggtgatgggaggcntactggatcaattgcaagagactcaacatcccacagggcactctgccagtcatgtcaatcaatcatctcttagaaagtgccagcagacaccatgcggctagaatgctaatgtattatttacatgagcttttcaattctgacatggaacaatagtctctttatcctctgattcacataccaagatatccagtgagtcaattgaaaaatccagcagatgggctctgagaaagctagggaagcaattttgtggttattgctcctggccctaagtcaatgggctcaaaaaagttggagactctgcacactgagttgtacctaatgactattcttagccctaggcactcccctaaaaatggtggacagcctgtaatgcagtcagttattgagactcatgctttaatgaaaaacaatgcagagtcctgatgatcattttgc

SEQ ID NO: 359308 - DNA, 727 bp, Homo Sapiens
agccagcagggctaaaatatccttaatcaactcctatcaaggccagagagtatgcaattggttatcaccaccttctagaaatattcaagaaagatggatacccaattcccattaccagtaaggaagtagaattggaaagcaatacaaaaaaaggaatttataaaggcctatcaatcataatttaaaaagtaggcttctaatagaataattttttaagatgcgtcatttttcttgtgaagtgtccacaaaaactgaccattaaataagctacacagaaaatctcaaaaaattgcagaagcaaataacatataagaagttaacaagtgaaagcctctaaaatttgtatgtgtatagttttaaaaacatatttatcagtaagtcttagagtaaagaaggaaatcaaaataggaaattacaaacatttataaatactataacaagcatataatatttaaatgctcaaagagtaaagcaatagtaatcaagacaggatggtatcggtgaaagaatagacaaatatatcaatggataagaagtgggagcccagaaatagactcatataaatatagataactggtctttgacagataatatagcttagatatttgtctcttcccaaacctcatgttgaaatgcaatccccaatgctggagttggggcctggtgagaggtcaatggatcttggcgggagatttctcctgaatgataaaacaccaacctcttggtg

SEQ ID NO: 359309 - DNA, 755 bp, Homo Sapiens
  misc_feature (239)..(257): n is a, c, g, or t
aggggaggtgggtgatcctaagggtcaggaaggaccaacctggccaccatgaaaccccgttctagtaaaaatccaaattaaaccgggtgtggggccgggcactctaatcccaactgcttgggaggttaggcacaagatccacttgactcctggtgccagatgttcaagtgagccaagattgtaccactaggactggccactgtactccagcctgggcgatacagtgagactcagtctcnnnnnnnnnnnnnnnnnnnttgttagtttcatgttattagaccaactttatctaaacaaataactttaaaaaacttatttggtatcccttcaccttctcttccttataattatctcacatttgtaccgttaatgcttaatgaaaagatctagagtaaatcaaaatgaatgctatgttgaattctttcatttcacacaaacatattgtatccactacatgccagcccctgggccaggtcctggttgggggaagagatgcccttcaattggccaatactgcaaaaactgagaatggatttatacttaataaaagtggtttctgctgcagagaaaaaagaaagtgtgagtgagaaatgagaaggactagttgtcacaataagactaatgtattattctgaagtgcaattggaaagtttccgtgtcatttaagttcttaaagacctttattttgtctgcttttgccttggtaagccttagtgtcaaagtgaacctgcagcccgggggatccactagttcta

SEQ ID NO: 359310 - DNA, 607 bp, Homo Sapiens
  misc_feature (37)..(37): n is a, c, g, or t
  misc_feature (68)..(68): n is a, c, g, or t
tgaatactggtgccctgcttgagtgtgctgcgaggancaaggcaaaaggctgagtgcctgcaaccacncaatgtgtgacctaattgctaattgatgcacaaccttaggtggcctgctgcttcttaatgatggagacagtttggggtcctagaacaataagcttgggaacaaagccaacaatttatcttcatttatcagtgctttacctgtattatcaggaaacacacacatacacacattgcgggatgggaataagaaacacaactcagtactatactgtaagtaagaagcccatcatcattaacaggcagaaaatctagtctactttggtgtgtaaagccacgttaaagaatatacttctggagcatcaaggaaaaatagagaaatgaatagcacattatggattaaagatgagatcatagcaagaatcttttaaaatttaaggaattgatctcggaacccaacgcctatgagaatgtcttcattatcacttttgcctcagtccatttctgatcttcacattttcaggcaactgtggaatgagtagaaaagttttagatggcttacatggactgaggaagaagagttatttttgacaagataaaaa

SEQ ID NO: 359311 - DNA, 744 bp, Homo Sapiens
agaactagtggatcccccgggctgcaggattcggcacgagagaagacaaccacagctgcgtagcaggtaacagccatctaaatggcgtttttgttttgtttgtggattgcttcattggttggttgtgctcctaactacatgctcttgttgagctaaagaaaaactggcccttccagaatggaacaggctgttttgcttctttgacaccatctatgtattaaacggagggaatgatctttaactgtttgctcatcccttcgcctcctgaatcatcttgctctcaaatttacttgtatttgtggttttacagagtaaagcgtgctctattttggctacaagtactacattctataccatattggaaatgttcttgagcactatcatatacggggggattcgcagtcagggcaactcccaatgggagaaagaaagacacatcttttgcctgtcagtactaggagctagcatttcacagtgcttggaagttaaccaaactttgatctttttgtttgaagctcgcttagcctccacttcagtgcaatgaggtagttgctatccctattttatagatgtgaaaacaaaggctcaatgaagaccagttggctgctcagccataggcttttgactttgagtcttaccacacgccccagtaaaagaagaaccttcttgggctgcccaatctgtgggattttgtgtcaagagaaaaacaaaaactccattttggtcttgaaaaagccagggggc

SEQ ID NO: 359312 - DNA, 712 bp, Homo Sapiens
  misc_feature (47)..(55): n is a, c, g, or t
gcggccaggaagtaatcgcctccctatagggcaaattgggtacgggnnnnnnnnnaagccaagcctacgtgtctagaaggacaacaagggtcaaggttttcaagaattgttggtaagggccactaaatcaaccttcgtcagtccaccttgtgtctgggagaaaactagtgtttctgctgttgcgtcgtgagttcaactaagcccatcaggagggtccagggactgttgcaggttctcgggcagggggagaaacaaaacaaacccaaaaccatgggcagttttggctttcagatgggaaacactcaggcatcaacaggctcacccttgaaatgcatcctaagccattgggaccaatttgacccacaaaccctgaaaaagaggcagctcatttttttctgcactacagccgggccccaatattctctctctgatggggaaaaatggccaccagagggaagtacaaattacaatactatcctgaagcttgaccttttctgtaagagggaaggcaaatggagtgaaataccttatgtccaagctttcttttcattgaaggaaaatacacaactatgcaaagcctgaaatttacatcccacaggaggacctctcagcttacagccaatatcctagactccctataaatccccttcctattaatgataagcctcctcaaatctcccctgcccagaaggaaataagccaagaaatctcc

SEQ ID NO: 359313 - DNA, 665 bp, Homo Sapiens
  misc_feature (31)..(31): n is a, c, g, or t
  misc_feature (33)..(33): n is a, c, g, or t
  misc_feature (40)..(40): n is a, c, g, or t
  misc_feature (43)..(43): n is a, c, g, or t
  misc_feature (48)..(48): n is a, c, g, or t
  misc_feature (71)..(71): n is a, c, g, or t
  misc_feature (126)..(126): n is a, c, g, or t
cgaagttggtaatggtaggcaaggagtgatnanctgagtnagnttganaatcaggttgggctcaaaagctntgaaatccattctcagaagttctacctccaaaaagcagacaaatggcatgattantcagtattctagaaagaactttcaggctgaggtatggattggacaggggagagatttgttagcaatgaggtctattggtaggttatagatatacctgtgaaaagtgttgaaggactgaatggtgctgtttatagagcacccttgacatctgtaactccatcttagaaaaagactcatcttatgtttcagaatgcatcataccaacaggcatcataccaacagcgatcagatgttcgcctaatcaatagagacagcaatcaatcagataaggacataaccaggcacactctttactatcaattcagtcctcaccagaagactccggggccataagaatagcaagacttcaccagctcaagacggccatcttgatagacacggttatgctgtcacttgtgattagcacctggcatctgaggctgaaggctctgcccaaataaaagactcttcagtggaagtcattgacatccatcaggatcaggccaggacactctccttgtccatgtcactctccttgcactggttcatttgaccccacc

SEQ ID NO: 359314 - DNA, 705 bp, Homo Sapiens
  misc_feature (649)..(649): n is a, c, g, or t
ggaattcggcacgagctggtatcttagtcaagtaaatgatagaatgacagccaaagaaagggaaaaattccctaccggccagcaagctgtctccagtataggatccccactgggacctcaactcagatcagggccactgcagtcaaaacacaggttgacctgttttctagaaagactaaggagaattaggaaaaagcccatgaattattcaatgatgtccaccataactcagggaaaggaagaaaatccttctgccttccttgagcagctataggaggccttaagaaaatatactcccctgtcacctggctcactcaaggttcaattgatcctaaaagataagtttattacccaatcagctgcagatatcaggagaaagctccaaaagcgagccctaggccctgaacaaaatctggaagaattcttaaacctggcaacctcggtgttctataataaggaccaagaggaacaggcccaaaaggaaaagcaacatcagagaaaggctgcagccttagtcatggccctcagacaaacaaaacctggtggttcagagatgacagaaaatggagccggccaatcacccagtagggctttttatcagtgtggtttgcaaggacactttaagaatgtctaatgagcaagccacccnccagtccatgtccactatgccgaggcaatcccttgaaggcacctgcccagagtgct

SEQ ID NO: 359315 - DNA, 544 bp, Homo Sapiens
ggcaccaggccattttttggtgctttttggacctcgtcataaagggatgtatcgtatattagggaaaattactcaagttacacattctacattaactgcgctgtattatctacaggtacaatccaatggacccaatagttcctaaattagtaataaggcttaccttacaaaagtaatgaaataacactgatatttctctttcaaaggctaacagcaattcttggtcctgagctattcagttcatacaataactactgtacatgctacaacatctgaatattaatggttttgctgcagattctgggtatgaggattagcttgaaagcaatacatttgctaacatgaatcatgactcacattatccccgtgtgctttactacctgtatatgaatgcaaatgttgttacagaaaatatgcttgaaatgtcaatacagtgtgcaattagcgttgcattgtcatgctccagcatgtgatatctgtatggtgaagttatttcaattactctgatacattactataataaaaaagtttaacctaaaaaaaa

SEQ ID NO: 359316 - DNA, 687 bp, Homo Sapiens
  misc_feature (104)..(104): n is a, c, g, or t
  misc_feature (127)..(127): n is a, c, g, or t
  misc_feature (521)..(530): n is a, c, g, or t
  misc_feature (609)..(617): n is a, c, g, or t
ctcccctagtctgtacccattctattcattaatgagcatagatgcattagattctcagtagctcatcacacattagatcatattaagtacaacccactaaaacncctcaatgtacatgataagaatnaatcacggccactgatgccatagtgcctggcacatagaggcatcaagtaatcactgaatcactgaagattcaagtctaatctcatgaccaaagattttctgactgccttttctcttttgagagaatacccctactataccatcatatccctgaaggtatagctatgctttaaaaaggaaaagtaaaattgttatgttggtgtaagtgaaattctgagtgaaatctactttatacgtgtgaatgatgagcaccaaattctactcagtactagcttatcaaattttagttttaaaaagatttttgaaaaaaactagagataaaattttgtgttactatttttaaattgctacatcatcctgatactctggaattctcagaaatcaactacaacagnnnnnnnnnngtcaccttgtgagatatagtccaaagttatcatccttttcccctaaaaatcaaagctgtgtagttttgtgtcttaaatnnnnnnnnngaggactagaaacaagttaaaatctgtacttcgaaattctctaatgcaaaagtaacctttaggaaacttc

SEQ ID NO: 359317 - DNA, 803 bp, Homo Sapiens
  misc_feature (68)..(68): n is a, c, g, or t
  misc_feature (263)..(328): n is a, c, g, or t
aaagggaatatagctaaaaaagtaaacctcactgctgacacaggtacttgattaccctgttcccattntcatgtgtttccgtcaagcaatattctgtatgccacacatgggaatatatattgggcagatgataattggcttggtggcagatggcctcattggtcactgggcattctgggtcccagctataatggtgagcttgttaagtacagtacttcatctttgttacctcccaactgtttcatgttacaggcagtctgagnnnnnnnnnnnnnnnnnnnnnnnnnnnnnnnnnnnnnnnnnnnnnnnnnnnnnnnnnnnnnnnnnntatctaaagtcttctcctcaatccatgtttcagtcaggtgaatttcaaggggcacacaattctctacccattcctccctgcccccttataactgaattctgtttggtcacatcaaagtacattttagaacatggactctgagccagtccagactggaggtggaaggcagaggttaaaaaatgagatggcgagtttttagtgttgtctagtaaatagggtagatgagtggtgaaggacatacttttggagtcagacaaaactgggcttgaagcctagcttgctttcttccttagctgtatgacgtttgaacctaattctggaccttgctccaactggaagatagtggtaaccacacaactatttattggcttgacttttcttgtgtatttgctgcttaccaggcaaaccctgcaaggagcgtggtggttaccatttaatagttgagaaaatcgggacttagggagacaaggtagag

SEQ ID NO: 359318 - DNA, 471 bp, Homo Sapiens
  misc_feature (329)..(341): n is a, c, g, or t
ctttaactggatggacgttgttagggtgagaaataaaaggacagcctccaaaggttgagaatgagaattgttttttcctggatatcaaagggattatcacagcgcaatcattgtctacacaacatgtactctcaacgcctgggttacataggaaatgcaccctgaggttttaataaaagcccctatggctataactttaaataaactaaaccaaaaatgttattgatgttttatatatacgagagtagtctcattagtttttgttactgtaactgtttgaacgtctcaaactgcaccgtattacggtaaataacatggttttgaaaacnnnnnnnnnnnnngtcacagacctgttgtcatagttgaaatgatgtttattgtagatggtatttgaacttattcttctggaaatagttcatcaagtatgtttgttgctcattgtgatacattaaaaactgtatctacatattt

SEQ ID NO: 359319 - DNA, 735 bp, Homo Sapiens
  misc_feature (124)..(132): n is a, c, g, or t
  misc_feature (150)..(420): n is a, c, g, or t
aaaataaaccggaaccaagccattccacccttcaaaagacacggttcctccagtggttcctggtgtcatagaggtgaacaaccacccacaagcccaatcaatttggaaccatctctattccccnnnnnnnnnccctggccttttaagttnnnnnnnnnnnnnnnnnnnnnnnnnnnnnnnnnnnnnnnnnnnnnnnnnnnnnnnnnnnnnnnnnnnnnnnnnnnnnnnnnnnnnnnnnnnnnnnnnnnnnnnnnnnnnnnnnnnnnnnnnnnnnnnnnnnnnnnnnnnnnnnnnnnnnnnnnnnnnnnnnnnnnnnnnnnnnnnnnnnnnnnnnnnnnnnnnnnnnnnnnnnnnnnnnnnnnnnnnnnnnnnnnnnnnnnnnnnnnnnnnnnnnnnnnnnnnnnnnnnnnnnnnnnnnnncatggaccatcctgcgagcgcagtgctctgtatgttggcagcgcacagcatatgctgtgtctgtggagtttcccgctgggcatcccctctcagccaggccctgctgccacttcctttggcaccatcatcaagcccttcgtggtgctagaggagggctgttttctctcaagaagtggggaaatggctcccttccctgaagacgggcacacgtgcttacatatgttccaatggctctgcttctctacatctccctcagactcccttggttaggttcatgaatacatctttctttatagaacaggatgggcctcgtgc

SEQ ID NO: 359320 - DNA, 493 bp, Homo Sapiens
ttagttgtctccactgggatccagttagggctccctcatgtgtgtctattccagcttcattataatctccatcctgcccactctcaattgactctcagctctaactcaggttagaacctgaggttaactcactcaggttccatctgttgtgtttttggagggaggcactaaagcaaatctcaaagatggtgggtcacctcagtatccaaattctgtagagtagctgagaagtagtgttactgtattttggaagcatctaaaccctgactcttttaagggctattcaggaatgacactgatgcacattttaaaggtaaggaattaacaacccttatgaaatgttacaaagccctcaaagggctgaatggacttgataccattctttgatggaggagacactatgtcattttcaaataacattttcatcacgctttacccatatttctacaccttccttagggtggtccataacccagactctccaggaattcac

SEQ ID NO: 359321 - DNA, 671 bp, Homo Sapiens
  misc_feature (48)..(48): n is a, c, g, or t
  misc_feature (102)..(102): n is a, c, g, or t
  misc_feature (136)..(136): n is a, c, g, or t
  misc_feature (467)..(480): n is a, c, g, or t
ccggcccaagaacccagggcgtctcgtctgtgtggctctccactggcnccagacacccatgctcatacgtgaaggtggcctgatatattcaactaatgacanaatcagaaaatgatatgttatcttccaaagacanagtccatctgtgcaggtatatgccagagtatgattaataagaagtgtgaatatcctctcagttcatgtatagattattcagagaaacatgaaagcacagaatcatggtctgaggttagcatttgtcatatatatttcttgaagccaatattctctcttaaatggcctatctgtgcaattttaaaattgggcatctttcatcaggcaactacgttaaccaagaaaaatggcagaagtggccttttcagcaactcacctagttaatgtttgaaaatttgtttcaaaatacagtaagtttttcatttatttcacttgcagagtcctttcccttnnnnnnnnnnnnnntccagcttttgcagtgttaaagtcccaggtgagctaggcctatttccctttctgttactatgacaacgaaattttaccgcagtcccaaagtcccttcagaactctcacatccatgtcttgaattagaactttaaaggaaaagatatacattttcctcaggatttacagccgaattcctgcagcccggggga

SEQ ID NO: 359322 - DNA, 781 bp, Homo Sapiens
gggacttactcgtcatataaacccaaggcacagtcacatacccagggatacaagacactgcagactcccgagagacataacacagaattgcaccatgccaaactacaaactcacttattttaatatgagggggagagcagaaattattcgttacatatttgcttatttggacatacagtatgaagaccacagaatagaacaagctgactggcctgaaatcaaatcaactctcccatttggaaaaatccccattttggaagttgatggacttactcttcaccagagcctagcaatagcaagatatttgaccaaaaacacagatttggctggaaacacagaaatggaacaatgtcatgttgatgctattgtggacactctggatgatttcatgtcatgttttccttgggcagagaaaaagcaagatgtgaaagagcagatgttcaatgagctgctcacgtataatgcgcctcatcttatgcaagacttggacacatatttaggggggagagaatggcttattggtaactctgtaacttgggcagacttctactgggagatttgcagtaccacaacttttggtctttaagcctgaacctgtttaaacaaccatcccaaggctgggtgacttttaccggaagaaaagtccaagcccattccctgcccgttcccttaactgggataaaaaccaaagggccccaaaaacacaaaactcctagcctggattccactggtttgccccttcacaggtttggttttttccctccggggggggcaatcctct

SEQ ID NO: 359323 - DNA, 461 bp, Homo Sapiens
  misc_feature (322)..(322): n is a, c, g, or t
  misc_feature (329)..(329): n is a, c, g, or t
  misc_feature (346)..(347): n is a, c, g, or t
  misc_feature (447)..(447): n is a, c, g, or t
ctaggatgacgagtgtctcctcaacaaaacaaacaccaataactgaataagactatagttaaacatatctagactctggacccagaaatcaagacaagaaagataattttgtgcatattgtacaacatctctgaggctcagtttcccaaacatggattctacaagtggagtattgagttcaaattccagttcttcttaccaattgtgtgactttgtagattaccttgtgtgtcctcatttataaattcaaggcacaatagcacctatctgacttagtacttgtgtaaagtaaatagtccatgtatggtaaactaatacatangaccccnagtagaaagagtctcannaagtgcgtaagacatgttcactggtttgtggctataatgggtgtaataatttctcatctgcgaagaatcaacaattctacttcccttgactgtgacatgngtgatttatcgccc

SEQ ID NO: 359324 - DNA, 707 bp, Homo Sapiens
  misc_feature (513)..(513): n is a, c, g, or t
  misc_feature (570)..(570): n is a, c, g, or t
  misc_feature (590)..(590): n is a, c, g, or t
  misc_feature (620)..(620): n is a, c, g, or t
  misc_feature (669)..(669): n is a, c, g, or t
  misc_feature (678)..(678): n is a, c, g, or t
atcccccgggctgcaggattcggcacgaggccgcccatacacaatttccatcccctgcataagtgcctcaagtagaagatggagatgggcagctgataatcacctgtcattaaaggaaagctgtcatctcaaaggcagatatgaaacaagcagaactaaatagtccgggcagaaaccaagacaatttggggaacagaagggaatttccaaaggagatactgtacctaatatcctcagtgcagtaagagaatataatagcatctgtgaaacagggagcatttgagaaactcttgaagatcaataatgattgcaaatggcatagcagtaatgttggagatgaacacaaggaggcggaagagagccctggaatcaggtagaattggaggagtcatcttgtaggttcagcatctgaataatgagggagaaataaacaaagagatcatccaagacaaagccactgagcagatggatgtgattcccagttgaaagggccctggtgtgagaagacacccncaggcaggatggaggtcctaaaagctcagaactcagggaatagaaacagaaacgcantcttaaaagtttcaagagangaaaatcaagttgcgcatagaggatctggngtctgacctctcagcagccatatggggcgcagtgggatcctttccagtngtctagcanatcagtgagacggtcccagaggtgttcag

SEQ ID NO: 359325 - DNA, 703 bp, Homo Sapiens
  misc_feature (42)..(52): n is a, c, g, or t
acagtgagaccaaggccctaaaatgggacatgaaaggtcctnnnnnnnnnnnccaaccgacaagaacaaagctgcaatgtataaaaattacccagattctctttattaagataacactttaatacatcctatctctagtgttcacagcttttttgaaggagtggaagttctatgtgtcttataatttttggattatgaggatataagaaaagaaaaagagcattttgaaagcatgcgttacagaaagtccaaagaaaaatgaatcaaaacacaggttctgaatacagacactttgggttccaaaccaagttccgctacttacttgccgattattcgattacggtccctttacttaactaccctgtacttcagtgtcttcatctacaaaatggacataataatacctatcttatagaaatgttataataattaaatgagattatattttgaaaatagttggcctcattcctgagacataataagcaccccgtgaccaatggttgtggttgttgcagaacaatccagtagaacactttgacagccatcgtacagtcatggaggccaacgaggcaacattttcaaataatcacagtccatgaacagaaaaatcacaaaacagccaataggtattcactggaagcactgcagttgattttcagaagagcagctgcaatgttgccttttccaataatggggccgagcc

SEQ ID NO: 359326 - DNA, 696 bp, Homo Sapiens
atgatttagaaaataatactattaaattctaatgaaacaatggtctcaatctggggccagcatccctgtcagggagatcagtaattattaggaagtcactaaagaataccaggttcaattaaaaaaagagactttctctctggagaaatgtagactgaagacctgaaaagagaataattttatgactgcataattccatgtgattttatgttctatcagagtgactgtactaccaagataattgagtatcaccaaaaagtgtatttagttccacgtgcgttgaatactgtataagctaacaaatactaaaaaggatggcttgcaactgacgttgttacccacactgactggaatgtgagcccagtgtttgccagaaatctcctaggttaaacactggcaataaatttaaattttcatgttcaatacagaccaaacacagacatctgtacctagcctgtgggttgcctgctggaagccgcttgttctgagtcacttttcttcttctagtctggactcttcaaacacatgtgtcatgagatatagaataacaggggcggaaagggagcatttctaggttagaggagactcaaattacaacatgactaccatagatgatatacagtaagtcctcaactctggttgatagcttcgttgcatactgagactttcaagcgcaccatgtatacgaacgtcgtg

SEQ ID NO: 359327 - DNA, 703 bp, Homo Sapiens
  misc_feature (82)..(82): n is a, c, g, or t
  misc_feature (89)..(89): n is a, c, g, or t
  misc_feature (123)..(124): n is a, c, g, or t
  misc_feature (131)..(131): n is a, c, g, or t
caactagcatcatgtctgactcaagcacagtctgataccatgtcactcatgaactgggtgaagcaatgaaaagagcagtatngatgccnttagctatgaggtagtgacaagtaagggagttanngcacagnccgcaagtggctattagtactgaggtgccttgacagaccctccactgagggtcttggctttacaattaagagctgtatgacctctagcttctgctatactctccattttatctgccatcattttctcttttaattgtaataaataaaacgcccactacaaaggtaaaaaattccattctgcttcacccagtaatgatcacaaaatttcagccattatggcagaaccacttggaaaagccagcctgtcctccaggctaatacagcccgtgccaaggtaaccaacttggtaaaggaaagaccaggctggatttcacctcccacccaggtgatcttgaaggccactgtggccaggacacaacctggccagcccaaaaaaagcttttggtttaggtctccaatccaaccccatttatccaggctagttttgttttcactgataaagacatttcacttatggaagtcataggtgtgggtaactagataaagtagaccagttaaatgatacgtcttgaaaataatgatacctttcaaagtaaagtattaacataatgataaaatgttctcgtgccgaa

SEQ ID NO: 359328 - DNA, 729 bp, Homo Sapiens
  misc_feature (689)..(689): n is a, c, g, or t
  misc_feature (692)..(692): n is a, c, g, or t
  misc_feature (694)..(694): n is a, c, g, or t
  misc_feature (713)..(713): n is a, c, g, or t
ctgcagggcctgggccacatgactggactttcttttttcctctctcatctcctgcatccaacctgggcctgttcctgtgactctccgggtagctctcaattctgtttactttttctctttgactacttctacttaaagccaccaacatttctccactaatcactgtagccacctcctgtcagctacatcttctcttgcttctttcctgttcattccatgctagccagggaaatcttgtaaataggcaggtttgatcatggcatccttgtttaggagcctttaaggacatggctttggtgtgacgagaatatctcaaagtaatcatgtgctccaacttccctctccagccttgtttcccactcatcctcacggttgccaattcttatgcctactccttcctggtctcccacctccttgcccacctgacttctgctgatactttgcaattaagatggggcagatttcctactctccctttgatcccgcttctttggcatagcaccaggacccactggaggacatatcctgctagactggaatattcaggtaaccctgtctcaattcccccgctagacaagtaagctccttgaagcaggagccatgccatgctttcgcttgtgcctacttcagctttaaaggaaatggttaagggacatattccttatgaataagtgcagaccttaaagggntananggacccatgattgatgaangaagggtcccgggcct

SEQ ID NO: 359329 - DNA, 698 bp, Homo Sapiens
  misc_feature (79)..(79): n is a, c, g, or t
  misc_feature (171)..(171): n is a, c, g, or t
cagtctgaaataatataatgctctatagtagaggttggcaagttatcagcactcaccatgatattctggactgagacancagaacatggataagccatttcagacaccactttaatgataactgagtccacgtctttgggaaacttgtatagaaaatactgagaataaganaaagaaagacatgatttatatttacatgaatgggattgtttcctctactattaggcacaaaatttatacgtaaatctccgtgaatctccattaatgaattcagtcagctcttcatctcatacatattgagaaactaaatctgcgcagggctctgtgccaggcattaagaatatagcagtaaataagacaaaacagccaatgcaatgttgctattcctttttctagggtaaaagaaatagtcatttatttctcaactaaactttgctatactttagtttgtttcctgtttaagaagcatcctgccccctttaaattaagggtaagtgagatataacatgtgataagattcacttctttctgtgtggtcaatgtgacatacgaaaattccatattgaaaagcagataagcctgttcctcaataattttaaccaccttcccataggcaagaattagcactagactcatcctcccccttgcccttttgatcaagaaacttgttactggctgctcgtgccgaattcctgcag

SEQ ID NO: 359330 - DNA, 624 bp, Homo Sapiens
  misc_feature (57)..(74): n is a, c, g, or t
aggtaatattgtggaactaagtgaaaattcagagtaggaaatgtgatccagtagatnnnnnnnnnnnnnnnnnntttcgtgtatttagctaaaatcataactgtttcctttgcaaactgacataaaaatgaagaagcaaaatgtgtctttagttatatccaagttccaaattcaagttaattactgctgctcctcactcttctaccttttccttcaaatttaaagatgggctttgcagagattaaagcttcagaaaaaaaaatgggaaaatatgttaaaatgttgacctgaaaatgaagtggatgactataaaactcttgagagaattagactttttgtagcagtttattacatgataataccttaaaggagatcacattcagtgacctgcgttgacaggtaatatttaaaattaagtattaatgctgattaattcaggcagatgggtggtagcctaaagtatagacatttttccaatattaattttgatattaaataaatgacatcggctcttgttggatattgtaaaatttcctttacttcaactgtaaaataatttcaacagtgaaaggtataaagtaagatgaaaatttccatcatgatcttacctagagataacttctc

SEQ ID NO: 359331 - DNA, 419 bp, Homo Sapiens
cacgaggtaactacgagcccctggaagaatgagcacactgggactcgggaagggaccacttacaagaaaggtctgaatctggaagaagcaaaggatcaagtcagacgtgtgaagaataaggagcccgtggatctagagagaaagaacatttttctgtgaagagtttcccctccttatcctctctccctgctacatttacggtagacccagtgataaatagcacctgccagccatggtaggcatgaccagagtggcaggcggcctgtgcatagggtgctggatgagggcagaggcacccatggaggtgcaagcctgtttcgctgcccctcctgaccccagcatccctagccaccagtgtgatgtgagtgcctccagagggcaggggcagagaccctgcccgccccttctcctgtcctctg

SEQ ID NO: 359332 - DNA, 652 bp, Homo Sapiens
gagcctctggggtccttggcaagagggggtccgtcaagtcaattgaagggcttagtactgtatttttatttctcatagccaaatgcattaaggatgcaaggaatcagaacttctctaatacagatgtttcttgtctaatgatggggttacatcccaatgaacacatcatcaattgaaaatatcataagttgaaattgcatttaatacactcaagctattgaaacattatcacttaccctagtgtactactgaggctcagaaagtgataccccaaagattggcacatgctgagatgccttagaagttgcctcagaatcaaggtctctctaacctggtctttccgaccccaaccaagtttaagaaaggactctctctgaaatttccttacctgaccaaaatgttttcttccaaaagaaatgcaattgtcttaaacaccctccctcaggatctcatcaagttaccagaaaagatcaaccaccagaggagagaagcaactgatagtcatcacttcacccatacagactttttatctattcttcagagagtagcaccaagagattacctggggggctttatgtgcattgtaaaacaatctttttcctgtgcagctccatccctcatcttcccttaatgtctgcctcccacaacaccc

SEQ ID NO: 359333 - DNA, 690 bp, Homo Sapiens
  misc_feature (234)..(234): n is a, c, g, or t
gaaaaggtgaagggggatcgatgtcctattgtctcaaggcagtaagcctgctatatgatcacccctacttgtactaggatatctgaggtgtttatccaggtacagcagccagtgttgggtgttggtaaatgcatggaaagtccatttgtttccatgagagtgtgcccattgttatgttgattgggcagtgaggctgtttcttggtcagagtgaagtctcatggaatatccaaanacatgacataaattcctctcaagggtggccatggtagccgcagcatctaatagagtgacatataagctgtccaggaagcaagctagccatagtccctccactcatgagatcctttaatagttcagtcactcagttgctattttcctgaccagacagctgggctgttggcaatggcccatgatttagtggaaatggagcaaaatatagtgttgggggcagcctgcatggctactatcatttcatgtagtttgtcccattgggcagaatgaccatgttcagtgtcagtcaaaagatgccatcccctggctggatggtggctgcacccagtggatccactggcatgtgttttgtacaatcatcagggccccatgccatactgacacaggcatgtctctgaatctttggctctatgtggccaaaggagaagctaaattgtcccacaggacccatgtgccc

SEQ ID NO: 359334 - DNA, 635 bp, Homo Sapiens
  misc_feature (157)..(169): n is a, c, g, or t
agaagcgacattcacatcagcatattcaaggagagtcaaataagatgaattattagtgaaaagggacgttactgagttaggcaataactgtcttgacatttagagtaataaatactgaaataggtagcaaacactttagtgtttcatctatttttgnnnnnnnnnnnnnctttagaaaaagattaaaacatacttgtgataggaagaataatgaccccctcaaagatgcacatatcctaacaaaactggtagatacgagggtacattgaagaaggaaatcgaggttgcagatgaaattaaggttactaaccagctgacaaaatgggtagctacccctgaattatccaagtgggcacaaagtaattacaagtgagcttagaagtagaagagggagaaaaaaggagaggtgagtaatgagacatgataagtacttaacttctgtttcagactttgaagacggaggaataggcccatgaaccaaggaacatgtatgtccttttaaagcatgagaacagattcttccctagagcttccagtaaggaacacagttctccagacatcttggttttagccttgtaagatttgtaatggatttctgatttatagacttgttcttttaagccactaagtttgta

SEQ ID NO: 359335 - DNA, 679 bp, Homo Sapiens
  misc_feature (44)..(44): n is a, c, g, or t
  misc_feature (151)..(151): n is a, c, g, or t
gggatcatctgtaatccaagccactgcacatgcaggtgtctccntgcccatactgtcctatagaaactgaaggggttggtgacctggcacaagtgatgaccccatgcctaatgctgtccctctgtgactaataaatggttcaccccgaccnaaatattctcctgtcttctgctagccctgaaagtatggcaaagtagcttcaggctcttcgcagtccttgacaatatatttttaaagaaatatgccttaaagccaagttataccatgtttaaatgaagagtgtctgtttatctctcaaaaagagatatctggctatctcctttgacaatttagactgactaaacaaacaccgtttctcccttgcccttctttactatggaggctgaaatttcaaagtttcaatataccgctacctttgtaacctggagtgacccagtggcttaaataatatggaagagaatctgctagagaagcaagtaggtggtaaggtactgggacagctttgcaattcaagataagaagacagacacgtgtggagttgcccttcccctttcctgccttgtgtccttaaaaaatgaagctgcaacaggaattccacaactgtgaagggaacagaatgaagataaaacccaacatgctaaggaaatgaattacaataagccagaaagagcctgggtct

SEQ ID NO: 359336 - DNA, 696 bp, Homo Sapiens
  misc_feature (660)..(660): n is a, c, g, or t
  misc_feature (662)..(662): n is a, c, g, or t
  misc_feature (684)..(684): n is a, c, g, or t
gccacattccccaaagcatttgcctaagaacatgagtcctgaaaggtgttattaggtagaacatgaaatatcaggataccttccaatattttggaaggtgatacctttctacattgcagcaattaccaaattcctgtagtctctaaatgaaaagcccccagaatgaaggggcagatttgtctgaagaattattcagatagcagtgcaagggagaagcaaaaataggaagacactgtgcctttgttgggtacaaggtatatcaattatatagcactgcataaatacacagagaacaagatttttcctctaaatcacaatcctggtcctcatagaatagaccctaaggaatatgcttatttaaaataagaaaatatcaattgaatgtaacttcaacaagagcaggaaggtcaggccaatcagtttataaggagtgaaacagtctaagagaccagatggcacagagacaggaagccagagagatgaagacaaaagttcgttggtaatatcagcaattctataggtatattttcgttggctaaaacttattttttataaacacagccatttcacagtgtccacatattatttctttccttctgataaaaatctgtttaaaaaacagtcctacttttgaaaaatgtaggctatctttacagacanantaaaaagctcttcttaattctnattggctagtgg

SEQ ID NO: 359337 - DNA, 792 bp, Homo Sapiens
agggcaaaagaaccaaaaatacactccaccagccacagtgcataaaaaatgcaacctgtgtggtaggagactagatatctacgagctggagctctccagaaaaataaaaacgcaaccaatagattctgaagataccgtatagaatttggaaagagaaataatgattgcaatataaaaggtcaggtatagctcatagaaagctctgatttgcactgagaagtacctgcaatatcataccaaggtaaacagtgactacttatttaatgaagcattcttatatatgtgctggatgtttccaggtcaatttggttaggtggaaactgagctaaaatgaaactatgtatcctagaatcccgagtcttgtatggtcccagattaggattaacaacaagagaaattggcatgagatttggaaaacgaaaatgcaacagctgcattaatatcagaaggtggatgtgggcagatacattcatgtatagatacaaaacagttaaatacatccagtttacctttattgtactcagatttgcatctggttcattttccacactgcagactgagcagccataagccctcaaccggatgaaaccacaactgtggaaccatagaagtggccatctcatagcagcacactttcgcgtctatctctcctttagctttcccttcacagttcagttttggtagctggggtttgcttaaattttcacatttcactaaaagctgacttgctcaactatgccagtgcttcacaaaaactattagtgatcctgtctcaaatccttcaactccgct

SEQ ID NO: 359338 - DNA, 715 bp, Homo Sapiens
cgaagtatggccatcctgaaaataaagccagccactgtgtcatggaattaaattagtccatagtagttttaaaatgggggaacttgtgactcactggcataataaagcatgagaaaaatgatattgactctaatatctgtaatttttgccagctaaccaattgccattttttaattcctgaagcttatctttggcagttgtaaaagcctgctaactattaggagctgttaaagaaacacacgaggctgtttcttaatgttgtacaggtcttctgatagcaaatgagcggtaggttcagcatgaagaaaggtgaacattttcctcagttctctaattttcatgaaagcattcctctaggtataccaagcagtgcattttcagggctacgtctgcccagagaggggctggttctagtctgtaaagatggtgaatgtgctagctattgccatgtaaataataatttgttccaattactagtctaggaataatgcaatgctttgaaattcaaagaatatacatttttaattcttgctgacacacacatccatctaaatagaaaatttttatcagaaatgcattgaagagttcacgagacattatagaatataataaagacattttatatcttctcctctcactttcacattgagctttcaacttgtgcacaaaaggtgaacccaatattgcctcgtgccgaattcctgcagaccggggg

SEQ ID NO: 359339 - DNA, 724 bp, Homo Sapiens
  misc_feature (492)..(492): n is a, c, g, or t
  misc_feature (494)..(494): n is a, c, g, or t
  misc_feature (496)..(496): n is a, c, g, or t
  misc_feature (586)..(586): n is a, c, g, or t
gcaccacccactgcaccttaaaaagggggaatgagagggctggtggttagcagcatgtgacaggggtttgggtcctggtcacgtggaactgggcaatgaagggagctcgtgtgcagacctcgtgcagccggggcctccaggcccccccagcgctgactctgcctcttacgaaggcagatgtcgatgcgagaagccgtgaaacagaaggtgcactgctctggctcaatcagattcctgtgggggctgaactcagggacttaggaggaatgagcatcaggatagatgagccagggagatggagcccacggtgtaggacaggcacagtggtggggccgggcaccacccacctgagcttcacctgccaacggaaggtggtgtggggaccacagcccgggtgcagcctcaggaagtttccatccctgcagaggcacagcaggataggaggaaggacatgaggaagagcatgagacatactgtcccacctgaggcatngntntgcccatcatctacccacccacctggtctggaagatgagcgtgaagtcctgctcacgggaaagtacttttgacgtgtccctgcagatctnctttacgtacacgtgcaaccacaactgattccggcccttcttaaacgagtcattccttgccggcacggttcacaatcgactcgggctttatattgagaccattgcttaggcctcaacccgacgttccagccttttgtt

SEQ ID NO: 359340 - DNA, 497 bp, Homo Sapiens
aggccccaggatcccaaatgccaggaggctggtggcatcagagcctcctggggcacaaattaaaggtgaactgttcccacccgtaactactaagccagagtctctgggctctgcgcttggatctcccttcagtcactctccccagcactctccctcccctgccatcctgcccatcacaccagcatctgcccactcctgcctccttcgttcaccaccaaactcaccaatttcactcagttactcctcagtctctagcacgtctttctctccaaccctcagggactctcctgtgtgtcccagctactctccaaccacgcccacacttcagcgggagtcagttccaggcacccaggaatcaccaccaaactcaccaatttcactcaattactaaccactctctctcatgtcttcaccagtcctcagggactctcctgtcgtgtcccagctactcgtccatccacgcccacatttcagctggagtcagttccagcatcgcg

SEQ ID NO: 359341 - DNA, 141 bp, Homo Sapiens
tggaactgcagtcttaagtgtggcatgagttgccttcagaacccaaagaggcctaccaggcacttcttttttgaggtatgagatataagatgcagcaatttatcgtttgctttggagggaatattccagcatgaacataac

SEQ ID NO: 359342 - DNA, 518 bp, Homo Sapiens
tcattatccaaaacatgagtaggagaatatctagctatcttttccagtttcaatgacgtgtaagactataccagtatcaaccttctcccacagaattagagaaccaatttctaaaaccacttgaggatctggaggcaaaatgtctacactaatttctatctctgatcaaagattacctggttgcttactccatacccagctctccagaattgacttggccccatatacaggtgcaggagtttcatcttttttctctctgtcatccagatcttctttctttgttccacttggttcaacactatcatctgcagaattaaaatttttttaatctgtaaccgcttttcagaatgccataccatctgtcagtctctgcaaatgtccctccccgaaaagttacaacacacatcattaactgaatgcttgacaacttaaaaataaaatacatcaatcatacctgtaacagatccagtataattttcataaagaaaccaatatattggccgggcgtggtggctcat

SEQ ID NO: 359343 - DNA, 639 bp, Homo Sapiens; identical to SEQ ID NO: 250439

SEQ ID NO: 359344 - DNA, 817 bp, Homo Sapiens
  misc_feature (335)..(413): n is a, c, g, or t
agcgggccggctgagccagcggctcttgggaggctgcgtccgcgcgccggcgaggcgaggcggccgggccctgcgcgtcaggcctgagacctgggaggaagctggagaaaagatgccctctgaatctttctgtttggctgcccaggctcgcctcgactccaaatggttgaaaacagatatacagcttgcattcacaagagatgggctctgtggtctgtggaatgaaatggttaaagatggagaaattgtatacactggaacagaatcaacccagaacggagagctccctcctagaaaagtagagacagggtttcaccgtgttagccaggatggtnnnnnnnnnnnnnnnnnnnnnnnnnnnnnnnnnnnnnnnnnnnnnnnnnnnnnnnnnnnnnnnnnnnnnnnnnnnnnnntgatagtgtcgaaccaagtggaacaaagaaagaagatctgaatgacaaagagaaaaaacgatgaagaagaaactcctgcacctatatatagggccaagtcaattctggacacctgggtatggggcaagcaaccagatgtgaatgaactgaaggagtgtctttctgtgctggttaaagagcagcaggccctggccgtccagtcagccaccacaccctctcagccctgcgactcaagcagaggctggtgatcttggagcgctatttcattgccttgaatagaaccgttttccaggagaatgtccacagttagtgggacaagcagcggtatttctctggctcctgtgggccacaaaagtccccggcctgcgggcaaggtgtggaagggctccccaaggggattccgg

SEQ ID NO: 359345 - DNA, 1542 bp, Homo Sapiens
atttattggactatgaggcaaaatgcaagcttcttctaaatcactctcttcgtttccaattttttcttcatcatccgtagattctggcttcttaggaactctctttttccttggttctcgaattatcttctgagctatcctcctccaatggggcaaacaacttaacaattaaaacttagacattatagagaggtcattacaaacagcaggtctcaattcattaaagaggaatctcaaacgtttgatgacaggagcgcagacctcctggtaagaacggccctgttcttgatgagtcttaatgagcgaacattttgcttggtagacaactctacaaacatccaccactgacttaggcaacgttctgtgctttactcgctcaatatcaagtgcacctgcatgaactaaagataatgccacatgacctaaatcttcatgttttaagaggcaacataacagcaagcgaccgacctcttccacgggatgctcggggggaaacatgatcggtgtggtcaaatggcactgcctacagtacctttctatttgacacaaaaagtccttcacgttgtgatcctgaatgttgttgtctgcaatggcttgcagaaatgcctgggaatggtcccccagggcccgtctgtgggagcagagtcgagatttgctggcaggtgtgccccctggggagctgcagtggtcctcgtctttctcctcgttgtagctgtagtggatctggctggtctgcaggcctccagagaagatggatgactgaagccatttggcacattcaatctcgacaggagacagcggtgtgctcattgctaaataggaagcgtgtaatccgagaagcaggcccagattcctctctgtgtctatcagaggtgaggagagactccccagatctggtatggtgacgccttcttggtcaggctccaaatactggccaacacaaaatgcgtgcatggattcccgggtgtcttcaaactgcaaagcagcttccaaagctaccactgggtcttcccctgcaaactgagcaagaatactattttctgttaacgactgtgtctggaagtcctttatatcatacactttcccgtcaatcacagtccagaagcctccatcgttattatggttctccaaatcagctatgcgtacaagtgtcactttctcattatttctacagttctgacctgtaaaaaatgactcttatgagacgtcggagagctacacagaggaggcatctacagggtgtagccagacggtctaaatgggccatgacaacaaccgccgtttgttgcagatcaatggcaagcctgttgtcttgtggaagggtgaggtacctcaggaaactctcactggggctcagaggaccacacaaaagctggttgcttgccccatacccagctgtccagaattgacttggccctatatataggtgcaggagtttcttcttcatcttttttctctttgtcattcagatctttctttgtcccacttggttcgacactatcatctgtaacagatccagtataattttcataaagaaaccaa

SEQ ID NO: 359346 - DNA, 360 bp, Homo Sapiens
  misc_feature (82)..(130): n is a, c, g, or t
aatcgcaccagaacggatagctccctcctggaaagtagagacgaggtttcaccgtgttagccaggatggtgtcgatatctgnnnnnnnnnnnnnnnnnnnnnnnnnnnnnnnnnnnnnnnnnnnnnnnnnatgagccaccacgcccggccaatatattggtttctttatgaaaattatactggatctgttacagcttttgtctggtcctctgagccccagtgagagtttcctgaggtacctcacccttccacaagacaacaggcttgccaatgatctgcaacaaacggcggttgttgtcatggcccatttagaccgtctggctacaccctgtagatgcctcctctgtgtagctctccgac

SEQ ID NO: 359347 - DNA, 1085 bp, Homo Sapiens
  misc_feature (1069)..(1069): n is a, c, g, or t
catggcactgtttttcctgcactctatccacctattgctggacttctgttgtacaagttggcaaacactggctggaactgggctgcaataaaacatgccagttatcaatgctgacaagagcctaacaagtgccaacttacagatgattacgcattttgaattctaatgaactgttttaaccttcaggaagaattgtaaagacctgtacatagcacaacatgatccggataatatatatactgttcatgtacatccacaaatacaccttgtaccaaataatgctttcttgtagtagaataagaatcgtgtaaattctaagagattttagcaggttttctttcctattcattgtttcttatcagtttaaaaggattcctttaagcatgtcagatgaaaagcaattaggattaaaagtttccatttaatttcccttaaacccttgaggcttcattaaactcttttcacttactaaacttttgtatcttctttgttttgacacactcccctttgcttttatctcttacctgccagaatgttctcaaatgatttagttcaaatactgaaatacttaatgagcaattacttgatttttaatgatgacttcgaaggagtcatcactaggtgctttgtcctttttgtattctagttgcacccacctcttggattggatatagcaataacatttattggccgttgtgagctcttgatcccagtcattacccctgagaactaaaaatagatggttcttaattcaacttactgaaaatttccccaaacaatagcaaatctgacttttccctcttcagttgcctggtattaaggttggataaatgaagcatgcacagctacaggctttctacttaacttctgggtttgctattacaaatcctatttactctcatacccttctccttagtccttcatatttctctgcctctattcttctatactgcagatttttctcacctattgtacaaagaaattgcgatgtatattttcatgtaatttgattttggaattctgtcaccttatgtagtgagttcttccaaaaatataattttttttcaantaattaaaaaaaatcc

SEQ ID NO: 359348 - DNA, 858 bp, Homo Sapiens
  misc_feature (224)..(237): n is a, c, g, or t
  misc_feature (255)..(303): n is a, c, g, or t
  misc_feature (338)..(447): n is a, c, g, or t
  misc_feature (673)..(673): n is a, c, g, or t
  misc_feature (680)..(680): n is a, c, g, or t
ggatttcaggcgtgagccactgcacccggccaaacattggaaatttttaatgatggatttcagttcttctcacctctgggtatttgtaatatttggtaaatcaggagtcctgagagtcttagaattttcatgcattttaaatatatgtcttcaaagcacctaggaatatgtaaatagttacccaaatgtgagaacagaattgaactaaaagcttcgtttataannnnnnnnnnnnnngagacagagtctcactcnnnnnnnnnnnnnnnnnnnnnnnnnnnnnnnnnnnnnnnnnnnnnnnnngggactgcaggcgtgcttcaccatgccccgctaannnnnnnnnnnnnnnnnnnnnnnnnnnnnnnnnnnnnnnnnnnnnnnnnnnnnnnnnnnnnnnnnnnnnnnnnnnnnnnnnnnnnnnnnnnnnnnnnnnnnnnnnnnnnnagcatgagccaccatgcccagccggttaataattcttaatcagtaaatcattattcaaagacatagttaatatcttcatgacttcttaaggatgctcaaaagctggtcttcagaatacctacatttctttatctacatattctgtcatttggagttatacaagtagtaatgacacaccaaaatgtaaataattattgttagcttttaagttggcttccaaattcanaaaaganaaaaatcctgaattctctaaaggaacatatgatagagtccatatgttaattcataggaagtgtttaaggtactatggtctattttggtctaatctttgttttactatgtaatatatatttatgatttacaagtttgttattcagtgggataataaatgaacacaaaatttatgttctc

SEQ ID NO: 359349 - DNA, 712 bp, Homo Sapiens
actaaggaaaacaaactgccattacaagtgcccaatgccctgtaactcattaattcaagactaactcagaattaactaaaaacattaacaaactctgtgctaatattttcactaattttataacaaatattacactctttggatagcatgtccctgtgacattatttcagacattaaattaaaagattttttaaattgtttgccatgtgtaagttacatcctattgaatataagcatagcttcggagaacttttaagattttccttccttgattatattctacctcccgaggctgacagctggccctactactcccataaggcagtgactttctgcttgctattcacaggagattcactgcgcaaagcacagtcacttactagaggtccgagaggataacacctgggttcaggggtactaattgtatgctgtaatactgtttgtattacactgtatgtgtattacattaattacatggttaattttttccttcttgcttgcttttaccactatacggagagttcttaagaatcacgtaagtaactgcatcacgaggtcacaaaactgtaatggttcaatttattatcatgtctaagggtattttcagggaagagagcacatgaaactagtgacatccacataatcacatttgtatggtcaagtgacattaaatgttaaacaaaacctaaagccgaattcctgcagcccgggg

SEQ ID NO: 359350 - DNA, 721 bp, Homo Sapiens
taggctgtcagcagattaggtttctggggaggaatctattcctggcttgcagttagctgccttctagtgatgccctcgcatgaccttgccttgctgtgcacagagagagacagaaatcttgggtgtctcctcctgtttttataaggacatgagctctacaggattaggctattaagggcccacttttatcacttcatttaatcttaattaccttcctaaaggctgtatctccaatacagttacatcaagagttagaacttcaacatatgaattgaggggtgcaaatgagtccataatacaaagtaattaaattgaaaattgtgtctaatttcaagtgttgttcaaaatgtgaatgcttctttggttattgattctactttgtagagacttggtaaattttaactgagaacaacataaattgccttaatcatgtgattttaattggttgtcctatttatctttatatttaggcttcctctgaatttaccctaatattatgtatctgggatgtatctgggattcatggttctaacccaaaacttactttctatacttgcttattaaccttcacattgttcaggacattctagaaaacgtctaatgtttcccttggtaccagaaatgcacatacagctgagatgtgcacggatcctgtctctcatggtagttgggaaagtattatgagatggcggttctgacctttgattattatgcgtgagct

SEQ ID NO: 359351 - DNA, 691 bp, Homo Sapiens
  misc_feature (15)..(15): n is a, c, g, or t
  misc_feature (59)..(60): n is a, c, g, or t
ggcacagtatgtgcntgtataatagaatcacccagaactttaaaagactgaaaacacanncctttaattagctcaatgttctgggggatgactgcttggcctacatggcttcgtaaagctatatggtttctctgctggtttcaactgggactcactcactcactcacatatctgcttgtttgcaggtcacctagctctgcttctaggggttgacttgttgtaaattggactgacaggggcaactgggctacatgtttctcattatccaacaagctagcttatgcttctttacctgcaagaacagaagcttcaagagggcttgaatccaaagctgagaacattcaaaacattacttctatcagattccttgctcaaaccaagtcacaagacaagcccagattcaagccgttgaggaatagagattctacctcttgatggaagatactgtaaagtatttcagtcatgtttgtaatttattacaggtgttctgaatttgatttagtaatgaaaaaataattaaaattggtatctttcaaaaaggaagacatgcttaatttcatcaaaccttacaacactggagctctgcaatgtaagacacaggattgtgcaatgtttataaattattctcttcaaaaaccaggcacagaggattataatttgcaaataggtagaccttggaaaagggcatttc

SEQ ID NO: 359352 - DNA, 726 bp, Homo Sapiens
gccgagcagagagccaggttggcctggaccccaggatgtacccttcattgcccttcactcccccactggatgctgggtggtcactgctgtagggaggggaccccctgacatatgtcccttcccacccactcttccactgtggaacctcctgtcattttccacttcaccaagtgacagaggacctgctcagatgctgaggggaggggactgcaaggaaagatggctaggaaacccagtccctccacaccctagagtaacttgatgccttgtgagggacacaggcaaagttcaattccttggaagtcaagggagactgagaagagtacagctgcagcactgagggagtgatgaattcttaactggggatggtgggaggcttcgagtgggaggtggcatttgagctaggctttgagagaggagcaggtattgcacttgcatttaggtagaaagcattggggtgcaaggtggacactggagggggaggcatcaggaaatccaagatgtcttcaaaaggtctggtgtcgggggctggtgagtaagcacaggaaataagggggtcaaagtagagtcagggtgggggtctgaccctggatggcataagacccgatccccaaggcacagggttggacctggattggcaattggggaccttcggagacctttggggagaccaacctgtagtcttgcctatagcaacatccggcccgggtggagcatgtgtacccg

SEQ ID NO: 359353 - DNA, 679 bp, Homo Sapiens
  misc_feature (163)..(163): n is a, c, g, or t
  misc_feature (169)..(170): n is a, c, g, or t
  misc_feature (172)..(172): n is a, c, g, or t
  misc_feature (179)..(179): n is a, c, g, or t
  misc_feature (183)..(183): n is a, c, g, or t
agagcccgcaaggcacacccaaggtccacatccctcgtgctgtaagagagcacagtgtggagtccctgtgtcaaggtgctttggtccaccttgacaagccacctgtcactcagccaagaaaaaaggagctttaagttgtacaatcacctacaaccccccaggnccaatnncnctcctcncctnccaaataaaaaaagctcctttatagtcaaaaacgaaaacaagtaatcaaaatatacaaagcatatgtatcaaatttaaatttcctttatcagaatgatcatctggtttcacctttgagaactcgatctacaaccccatgtaaaaaacaaatgggtacaagacatcagcaacaaaaaaacactaaaagatgattttactatctctgacgagtccaactgcatacagagaaaagggataagattagccactttttataggctttttcttcaggagagactaacctcacccaactctcaactctgcagcccacaaatgccttctactgaaggcaacaacacaatttaacccttaggcagtgtgcaaaaccacagtgagctgtcctgtgacagggctacatacctggctgctgccatcccacatcccccactgccactgggctagtgtgggtgtgtctctgtgcacgactggctggattcagggttttgcccccaaaccc

SEQ ID NO: 359354 - DNA, 337 bp, Homo Sapiens
  misc_feature (53)..(53): n is a, c, g, or t
agtaaccagtcttcctgtattttatgtgcatcatagtgatttatcctgagccntagtgacccccatcttgtaacctgttgcaagagtgaatgtaaaaaatagttgtggcattttaaaaggtcgcctttgatgcagatgcatctttttcttgcttctaaaacatatttcatgtaaacattgtacatttattattgtaatatatactattatgcagcttattttacctgaaactgttaagccgaccaagatccctccctgcaagacagatgggaatgtgtataataactaggtatttgagaagttctgaagtttgatgtaatctgttacttgtcctgtt

SEQ ID NO: 359355 - DNA, 672 bp, Homo Sapiens
  misc_feature (35)..(35): n is a, c, g, or t
  misc_feature (55)..(55): n is a, c, g, or t
  misc_feature (107)..(107): n is a, c, g, or t
cactccaagatattaagcaactaatcttctcttanaatataaaatgatgtcctcntgcaactgtcaagtaagcatctttgtaatgactttcaaagctaaaaaagatnattagaaaataaatttttggttacagtggtaaaaatttcactaatgttttgacctaaattagggactccgtgcttccagatatcataaatcatcagtgagatggcctttccagaactgaacttcatttactgctttcattgaccatatgaaatacaggtgtccttatcagtgaccaccacaaagaaacagggaagactcttaaccttttaatgtggtctatttcaatatgtagcaaaatagaatagaatccacatgaaggtgagtggattataaaagtaggtgttcagattttagcaatttaaaattgcaaaaatgtctcagcagaacccttaaatcataattattcaacacaggtcattccttggtaataaccaacaaaacagttttgtggtaaaaggaaaaaacttgagtaaagtataagaactatcttgtaaagtcaaagaatgtgggtcaaaaagcagcctaaattagtctgattgcttcatattatttgttatgaagccacaccaaagaaatatataaacttgtactaaaacttccattagagatgcagctctatgtttc

SEQ ID NO: 359356 - DNA, 417 bp, Homo Sapiens
gggggcagataccgaggtgcaaagtcaggctgcaggcatgtcactgtgtgtagcagaaaatgtttctttgttgtggatcatggttctcaccccagtgacttgccataaaaatggacacaaagcacaaggctggtcattagatcaactgatatgttgttttcctaatgcttggaaaactacttctatgcaggaggcgagcaatcctttctttcttgacttcagaaagaaagtctatttattcagaagtctagaaagtaagataagtggcatggtgtcatgtgtacagaaatatagaaagtcaatcacttctctctattctgctagtctgagccccatcctctcttactagaacaccatgagcatctctcactgtcctggtttcctggcttccatcattgcctgcctcaaacttccatc

SEQ ID NO: 359357 - DNA, 397 bp, Homo Sapiens
agcatccctccagttcctctgtgcttcgcaaagggcagacatttctgccaaaatctttgcaacagagccaacagaatttatctcaagcttggcagccaatatacattatccacaggtttctggctaaactattaaaattaatcagttggcaagctttcattttagcagctctaataaacaagagaagcagattcccagggggtggaaatatcagtaaatatagcagctttaaaaggaagaaattcttcaaaatgtccgaagatggactcaagctttagtcaaatggacctaaactacagttacagtatgggcaaaaccattcatttttattaaggcatttttcagtgcaagaggaatcaagtccattctacacataggatctcaaacaaactttctt

SEQ ID NO: 359358 - DNA, 540 bp, Homo Sapiens
  misc_feature (59)..(278): n is a, c, g, or t
ttttatgtggttccacataagttttagcatttttcttctatttccacgaataatgtaannnnnnnnnnnnnnnnnnnnnnnnnnnnnnnnnnnnnnnnnnnnnnnnnnnnnnnnnnnnnnnnnnnnnnnnnnnnnnnnnnnnnnnnnnnnnnnnnnnnnnnnnnnnnnnnnnnnnnnnnnnnnnnnnnnnnnnnnnnnnnnnnnnnnnnnnnnnnnnnnnnnnnnnnnnnnnnnnnnnnnnnnnnnnnnnnnnnnnnnnnnnnnnnnnnnnnnnnnnntagctattgtaaatgggattactttctggatttcttcttcagattatttgttgttggcatatagaaatgcaactgatgatttatgttgattttgtatccaaagttgtttaatttaagaaaattatttggtacaaatttaacaaatcttagctcgattctcagattttttggtggctttacataggtgaaggatatatttatctcctctgtctctgagttcccacagtataccttatctgtgtcactcattctgatactaacc

SEQ ID NO: 359359 - DNA, 585 bp, Homo Sapiens
ctgaaaccaacctagttttgtttttgtgatataaactttaagtgtcgagggaccatgccagcaactacccaaaaatctcttaaatcttccaggtaccagctggccattttggccagatgcatagagacatctgagaccctcagaaaggaaggataatccaagaatataggaaatctgtgttctcttcctttcattttatcccttatatttctaaagactaattataagtaatctgacattttaatgtagctactcttatttattttttctttctgaggtattaaaatatctggactgagttttgccaaatgttaaagggagaagagttactgaagactttgaacacttgctttttgtgattgcttatgtcattagtgcctcatgactgtgtttgatgtcctttattgatacaaagtgagcctgtgccttcattatcttgcccattttaatacaaatggaaacctggtgtttgaaaatctctgaactgtgtgggttttggaggaatatacctgaattttattcaataacagtttctggacaggaagaaaaatacagttacatatttataaaatagtcgttatcaag

SEQ ID NO: 359360 - DNA, 679 bp, Homo Sapiens
  misc_feature (46)..(46): n is a, c, g, or t
  misc_feature (72)..(72): n is a, c, g, or t
  misc_feature (154)..(154): n is a, c, g, or t
  misc_feature (173)..(173): n is a, c, g, or t
gcgaaatgaataataataattgacctgagagtagaatatgcccagngagaagtatgaagcagactatctacnctgcttgaaaacaagaatccttcaatcaaagtttgaggaggacatgccaagatgataaagaaagatcttctcaaagaaagancatcagaggaaaaggcccnccagactgttcaaagacaagatatctaatcccaaatggaatacagtgagcctttgggaagtattgaaacacaaggtaagtagccattctcttacactttcaggtgggcctgaatagaggggtatttatttaattaattttttaaaaaatatcacggcctccattgaaattatattctagaaaagttcagcctttactatctatgtatctgccctgaaatcacaccaaaatcctttgtgctttatttaactgaccattttaagtaaatttatttctaaagatgtaatttttaaaaactaaattaaaaagcagaccaataaagtaaacttcttacttgtaattaaacatgttactttctgaatttttttgtcacaaactactgtattccaaaacactaccagcagtaccaaaatctatctaaagaagtaatcaaataattatggaaatttgatgtaaagaattcaaagttctggatcagaccaaacaaatcaaaaagtaaaacctgca

SEQ ID NO: 359361 - DNA, 1176 bp, Homo Sapiens
ctcttctgtcctctgctcccgcagcaggggaggcctgagaagggccatggtttccaatcttattgtgcaacaggagaggcgagcgggattgggaactcatctccccagtgtgctctgcaaggccggccaagctggctccaggatgcgtggttcccatggcttgaccatggcagggggtctggggatgcccagcagtgagaagcatggtgggtcacctctctcgcgtgtttctctccttcctccctgatagtttgtgaagtttgccaacatcgaggaggacaccccgtcctatcaccggagctatgacttctttgtgtcccgattcagtgaaatgtgccactcgagccatgatgacttagaaatcaagaccaaaattcgaatgtcaggcatcaaaggcctgcaaggggtggtgaggaagacggtgaatgatgaactgcaggccaatatctgggacccacagcacatggataagatcgttccatcactgcttttcaatctacagcatgtagaggaggcagagagccggtctccctcacccctccaagcacctgagaaggagaaagagagccccgcggagctggctgagaggtgtcttcgggagctgctgggccgggctgcctttggcaacatcaaaaacgccatcaagcctgttctcatccatctggataaccattctctttgggaacccaaggtgtttgccatccgttgctttaaaatcatcatgtactcaattcagccgcagcactcacacctggtcatccagcagctcctgggccacctggacgccaaacagccgcagcgctgcgaacggtgcgcgcgggcatcgtgggaagtcctgtcggaagccgcgggtcatcgctgccaccggctctgtggggcccacagtactggagatggtcaacaacgctgctgaagcaactgcggctcaccatcgactacgcgctgaccgggagctacgacgggggcggtcagcctcggcaccaagatcatcaaggagcccagggacccccttggtccagaaggccggtcatcaagaacggtggcctccttttgccaagaagctggcccactaaccggggctccgaggggaaccctcttcctcctggacccaggggccccgggcccttccctgaacccagggggtgggaaaccggcaggaacgggggaaaaaaggga

SEQ ID NO: 359362 - DNA, 668 bp, Homo Sapiens
  misc_feature (611)..(611): n is a, c, g, or t
  misc_feature (614)..(614): n is a, c, g, or t
cccttgaggctaaacgaaaggagacatatcagccattttgtcctcaggatctcttccagcccctgccttgttgatgagggtgttgcttgacttgaggccaggtgtgttaggaatgacacgtaggtgcttgcaggggattcggaggtaattgggaggtgaaaaaagaagtcaaaccagaatgcagccagataccagggagaacaccaactgactggcatgccaaagccttctgagcaggtcaccctggtttttgcagaattaagaatgatatcgctgtacacattaaagtattttaattggttgccaaggcgatacggcagaatcacagggcacagagcaggaatagaactctgcaggtctgtgttcaggaaaggtgttcgtctgtgatattaacgagctgcctggatatgagaaaggcaaagtggcagtaaatcttatctgggacttttgcttaataaacaggaatggcagagaaatggaggggcagaagagcttcccttcccagctctctggagaagcaggagaggtaatcttctggattccaaatttctcctcagagtggtgaatcccacagctgagagaaagccgagtagattggtttgatgcataanggnaagaggaacaagaggagagaacaatgggcagcagtgttcttttcctattgaggg

SEQ ID NO: 359363 - DNA, 692 bp, Homo Sapiens
  misc_feature (21)..(21): n is a, c, g, or t
  misc_feature (66)..(66): n is a, c, g, or t
  misc_feature (77)..(77): n is a, c, g, or t
  misc_feature (136)..(136): n is a, c, g, or t
aggggaaaaacagattaaaanctgctttaaactttcctggttttcagaagattttattctcactcnaagatcatccntttataagggttttttctaagtactatttcatttcttctttctgctagctattaatganagagcatttattatgacccaaaagctgttagtacatattaaagactttaaacaaatatttttccaaagtacatgcatccgtctggtcctctatgatctctttaaagtctttatgaaacaaagatccattagttaattaatgattagtctcagaggaaggcgtttgaagatgtaaaagtttaataaagcaagggacagtgagacagtggcatttctaattagaaaggtgaattcattaaagagaactcacaaagaaaagaaagtatgttcaactaaggtcaaataatactgcaatgagaggctacctctacatctttgtcaaacatttcaaatcaggcctagaagaagaagcattcaacacaactgtagttctttgttttacttaactttattactctcctagatttttatcatatgtgaccctaggaaagaaagaatatctaaaggaaagatatcgcctgttctgaatacacaactgtgatataagtgaaaaaacatagtttctagattacatttctaaaatctttccaatagcaatttgatctcaagattgttct

SEQ ID NO: 359364 - DNA, 393 bp, Homo Sapiens
cacaatttaactttgctcaggctgatggagtaagaagaaaagatggaaagcatcatcaagagaccaagaaaaagctgtgggaaattacaaagagcagaaaaagcctagatcaatttccatctaaaagtctgttttcaaaagacacttggtttagcaaaaattctttttataaccatagtactaaacttttctttggccttcaccattttgtgacttggaaaacatttaaaatgcattaatggggtttgctagtggtttatgggagcccaataaataacatgctttttttctggactaagttctgaacaaacttaaaaatataagaacgaataaaagtagcagaaagattaaaatgttaccaggttaatttttttaaaaagttctcacaggtta

SEQ ID NO: 359365 - DNA, 667 bp, Homo Sapiens
ctgcaggaaaatatttaaatgaatctttatagaccaaataataaaatagatgtatcaaagagatcagagccctaaagagttcattttcaccactttttgagtacttacagaaattaagaacacataaaataatctgccttacattctaagaaatagacaaattgaaccctctcccccaatctctccatttaaatataggaaagagctatttgcagcaagactagaagtaaagtttcgctaggagcactgttgctaccagaaagaaccctaatgagagatgccatgtatttctgcagcagctgtttgtatgcagacctacttactccaaaatcatgcaagctcatcttaataggggtctgcttcgcaagcaggcagggtgaaattcacacatttggcttagatcactgtttacaaaggaaacacagctagtcattacatttaattagattgcaattatatgacagaatatcatacttacattttcatatatgttcaatgggtatctctgtctgctaaataagatttatatcttctacaccagctgtctttacttcaaagattgggaatcttgggatgcctgtatatgggaaagtatgtaaagggaggggagcagacagcggcaactaagctactctatttttgccttagggcacccctgaggtagagg

SEQ ID NO: 359366 - DNA, 473 bp, Homo Sapiens
ataactatatgtcacacagtataaaaatagtttcacataatctcctttgatatatgaaagcacaaaatattagaaatgttctagactaatcaagcgatataacatctatttgccatgaaatgcaagttagtaatcaatagccaatatttagtatccttgcactccacagtacaacaataaagattatatatttgtaaagattcagtaatatttttagctatttggtcatgcttcactgcatgtattataacagcttctcaatgaatttcgtgcaagcatatcgtagtttttaaaattacaaaacataggagtcaaacccagagcactgtttcatatataaaacacacataaatacatatctatagatcttatttaaaaaactaatatacaaagcattaatagaaaaaaattctagacactcaaagtttatctccaaaaggaatgatatccttttacttgttctccactgaatg

SEQ ID NO: 359367 - DNA, 707 bp, Homo Sapiens
  misc_feature (573)..(581): n is a, c, g, or t
atgttccggaaaacacttgtgccaagggagctgtgcccaagcctccatgttgccgaaacaggccctccctgatgaaagcttccccagcgagccagcaggaagcaaaggcattgaatgtagaatgggatacggacccaacaaaaaacaaattatattaatgagaacatggaacagaatgaacagaaagagcagaagtcaagtgagctcatgaaagaagttcccaggagatgactataagaacaaactcatcttcgcaatatctgtgactgtaatactaataattttgattataattttttgtcttatagaggtgaattcacataaaagggcatcagaaaaatacaaagacaacccatcaatatcaggagcctgagcatgagttaaagcatgtggatggcctggagctatgtttttaaaattgttattaaatattggttttttacttaaatcaatgaaaactttctttactttgtggttgtgttcctcaaaatgagaatttttaacaataataaaaataaagcttgttagatcaacccacctattctaaccacttcttataaataaaatatcttnnnnnnnnnccggacccaattcgcctataggggggggttacaattactggcggggtttaaacggggtgattggaaaaacctggggtaccaaattaatgcttttggatccctttttcagtggggtatcgccccccc

SEQ ID NO: 359368 - DNA, 660 bp, Homo Sapiens
aacctaatagtattccattaaatattatatacccattaaaaagaaattgaaccattggtacaaaccacaatcaagatgaattccactggaagaatatcatacaaagaagttagacagaaagtagaaatacatacaatatgacttcatttatataaagtccaaaacaggagaaaccactgacaatacaaatcagagttttagttacttttggggaggagtgtgagattagtgactagtaagggtgcatacatagtttctgggatgcaggcaatgttttcttcacacagttggtggttacatgcgtgtagtcactctgtgatagttcatacaatgctataatgtgtatacttttgtttgctgtacttcaataaagagttagttaaaacaacaacaaaacacttctgtttctagtatctcaggaattggaaaattacagtccctgggccaaatctggccacctgctatttttggaaataaaatgctaatgcgacccagccacactcattcatttacagattggctatggcagcttgcatgccactacaatgcagcgtggatttcatggcctgcaaagcctgcaatatctactacccagccctttacaggaaaagtttgtcgatcagtgctctagccaggccttgctcccattcttcaaactgg

SEQ ID NO: 359369 - DNA, 691 bp, Homo Sapiens
  misc_feature (137)..(147): n is a, c, g, or t
  misc_feature (622)..(622): n is a, c, g, or t
  misc_feature (628)..(629): n is a, c, g, or t
  misc_feature (641)..(641): n is a, c, g, or t
ctgcaggaattcggcacagtgcctgttgtgtagtctgtgctgtatatctgtttgctggaatgtttaatgtattttgtggcttgattattagagattttctatcgtaactgctgctttcttttaaaaaatttgtttcnnnnnnnnnnncccattaagagaatctctgtttctaattggcgactatgatcaccttattataaatgttatatgaagacttatttcacacatcttaagacccatactcattaacttacccatattgctttttaattaccaaacctctgtctttctcctaaaaaagagaatctttatcctgctctcagatcatgatttcttcttgccctaatcttgtcaacattaacaaaattttagcttggggcatttatttggccattttggagttattgctagttgaggccttttgtctttaaccatacagagtgttcatatttctgtgaatatgtccccttctccattttcttttgtcgctttcctgatactcctacctgctgatattggcaattccatttctatacctcttgctttctcttttctgcttgccatgtccctattctcttccctgcccctctgacatttccaatctagttcttaactcactaantaattnntaagtgggtctntatcacgtgttacttatttcctattcttgatagggtacttcacgtattgt

SEQ ID NO: 359370 - DNA, 715 bp, Homo Sapiens
  misc_feature (677)..(677): n is a, c, g, or t
  misc_feature (695)..(695): n is a, c, g, or t
gaaggatctatgagacgtttgaaccgacacattttagagaatttcctttaaatgatgagggtattgaaggaaatgagggtaaattctattagaatgtagccaatatctggaattggccaggaagtaaagatatcccaattttgtttggatggtagagatggcttatagaaagtggtcattgctaggttactaaatttgttatattccagaaaaatcaaaggagaaagaaagacatcaaataccacacaaatataaaatgacagctgcccatgagcttttgaaacactaaagacaaatttagttgagtttctggatttcagttttgaagtttctgttggcccaacatgttctcaaaaggatgtagcctttactggatctgattaggcattatatgcataagatgtaacatcttggatttctactggaattattaccacctgaagaatttcaaagtcctagctataagaacaatctgaattatggattaaattttttctttggcatatattcagggtcttctgtatagagatgaatttgtggtcataattgtgacaatattataaataatattgatttctgcaggtcaagtgcagcagacatcaaggcttactagctgtcttgctcttaaaaccttctaaagaaaaagcaatctcatgtagagacaacaccagggattntagaaagagctatgattnggattctaggctgctttctg

SEQ ID NO: 359371 - DNA, 715 bp, Homo Sapiens
  misc_feature (605)..(605): n is a, c, g, or t
tcggctactactactatacggctgcgagaagacgacagaagggaaagcacatttagttgattatatcaaggcctgtgatggtatcagaggtaatctgcataaggctactttgctagcacaggcaatggcaggactgagagtggataaaggaaatactccatttcctggagcttgttttaactgtgggaagcatggtcatactaaaaaagaatgtagaaaaaatcagcaagtcaggccaccagataggggaaaaaagaaaactactaagcctgaaatatgtccaaaatgtaaaaaaggaaaacactgggctaatcagtgccactctaagtctgataaagatgggaacctcatttcgggaaacgccatgaggggcccgtcccaggacccattccaaactggggcatttccagatcaggccattccctcacccctgtacaatgtctgtcccccgccacagctggtagtgccacagtagacttatgctgcacaaaacctgtgagccttctgcctggggaacccccacaaaaaagtccaacagcagtctgtggacccttgccagcagggacaataggagttagctctaggaagtctaagttaagtttggngtacaaatatatacaggagtcactgattcaagactacaatggggaaattcttgtatatctacttctgttccctggaagcagagcaggagagcgcatagcaccttcttgtg

SEQ ID NO: 359372 - DNA, 693 bp, Homo Sapiens
  misc_feature (48)..(48): n is a, c, g, or t
  misc_feature (119)..(119): n is a, c, g, or t
cagataaccacactaatgtgtggcctggaagtgttaatgggaatgtgntgtctcgtagtcagaataaatccaatgaaggacccatccctcgaatatgggcataattttgatgggacacnatcattttcctcccaaaaccttttgttggctcccaatcctcttcaaaatagaactccaacttcactatgtgcaattgcattatgatgctgaggaaagagcttgctttgggtcaggtgaaccagcctggactgctgttgtgtgacctgaggcaagctaccctgaacttccagagagaagcttggcagcatggtatcatgtcagagtcctggcccctgaagccactctgtcttcaccacttcccagccacctgcccttaagcacatttctaaatggttctgtgccttaatttcctcatgcataaaatagggatgatgataaccaccttcacaaggttgttcagtggaataaacaagacaatgaatgtcaaatgcttggaacagtgtttggcacacagtaagttctcaataaaatgttagctattgttattattgctatttgactgctcaatatctagtagagtacatgatccagaataaaatatatggtgaatgaaccaatggactgaaccctttatgacctaattttcctaatctataaaatgtgactattactcatcaaacatgctgatgtaat

SEQ ID NO: 359373 - DNA, 626 bp, Homo Sapiens
  misc_feature (26)..(26): n is a, c, g, or t
  misc_feature (74)..(74): n is a, c, g, or t
  misc_feature (95)..(95): n is a, c, g, or t
  misc_feature (111)..(111): n is a, c, g, or t
  misc_feature (143)..(143): n is a, c, g, or t
  misc_feature (152)..(152): n is a, c, g, or t
  misc_feature (161)..(161): n is a, c, g, or t
  misc_feature (207)..(207): n is a, c, g, or t
  misc_feature (218)..(218): n is a, c, g, or t
ccaggaaccacatcgcgtagtcacangccagtggctgggggtcagaaggccctgtggcacattgtctctgcctntgatttatttcttcaacaatnatatatgagtgcccanttgtgtgccagtcactttaaggatacccaggnattcagttntgcagagcntgcattccagtgcggggggaagaaggatggcaaagacgaaacagcnatcatttaganagttagctgcactatgagggagatacccaggtacggaggttgtgcctgggcaaggacgggctccctcggcagggaggtgatcagggcaggcctcctgggggaagtgacatttgagctgacatgacctgaatgctgagcagccacccatgagaaaaactggaagaagaaagtccaaggagagggcaccatgggaagaaggccctgtggcggggacaggctcagcaatagccaccggtctctaattcaagagcagggagaacagggtcatcaaagggaccccagccagatggacatggagacatacaagtgtcataaaagagagggaaggataatgatgggcagggaaggaatagacaacgaagtagccgtaggcagagaaaataaatctgcatgttcacctgaaataac

SEQ ID NO: 359374 - DNA, 724 bp, Homo Sapiens
  misc_feature (384)..(413): n is a, c, g, or t
  misc_feature (417)..(669): n is a, c, g, or t
tccaaacgcactgtcctgaacctctggtccttgatctcctcaagcacaggagccgcctgtcccgctgttccctgcctgggctcccttctttgtctctcgctgtctcttacacaaacttggtctttgtgactccagtctgttctccttttcttcctcttgcctctttggtgccaactctttctcccctccaaccccgtgaagtccacacaggccctcatttcatattccccctccttttcccatcatttctctaagctgtcatgctcaacagtgggtaatgagctgacacagggaggccttctgccggccttcttcccaaggcatttggatggtaaaagggatcccagcttcaagacttaattccctgagtcgttggtgggtaannnnnnnnnnnnnnnnnnnnnnnnnnnnnngagnnnnnnnnnnnnnnnnnnnnnnnnnnnnnnnnnnnnnnnnnnnnnnnnnnnnnnnnnnnnnnnnnnnnnnnnnnnnnnnnnnnnnnnnnnnnnnnnnnnnnnnnnnnnnnnnnnnnnnnnnnnnnnnnnnnnnnnnnnnnnnnnnnnnnnnnnnnnnnnnnnnnnnnnnnnnnnnnnnnnnnnnnnnnnnnnnnnnnnnnnnnnnnnnnnnnnnnnnnnnnnnnnnnnnnnnnnnnnnnnnnnnnnnnnnnnnagcatgagctactgcgcacagttttgtggtcttctaccacccatagtgggcctct

SEQ ID NO: 359375 - DNA, 863 bp, Homo Sapiens
  misc_feature (12)..(12): n is a, c, g, or t
cgcacatggtcngaatcatgtctgcccctcaaatcaggtgtataccaatgtgttttttactagcacttgggaaagttattaagtattttctttttccctgggcatcatgttctattattattttagaaaaaagtcataattggtactgaatatatggtatatataatattaaaatggtaattttgcaacagctcaaaattaaaaggttaatgttatacactttactatatgagctgtgattactaccattagccacagataccagtgcctcaactttttatgtacctattgtgatttaatgtaaataaaggtttgtatagtacttttgtagttcttaagtatgaagaaatgggtaaactttttattttgttagaaactgttatattttgagtgtaatatttatggtttatagcaaaatgaatgtgcttattgttgaatgcatgtatttagaagcctttactcagcccctgtgttctgtgctaggagcttgagctctacaggtaaggcagagctaccggtgaatgaaaggaaatcatgtcagtgaaaaatcatggtggaaagcccctggcatcacatgtgcatgctgtaggcaggacctgagctgcctccgctgcaggttcagatgcaccgctgcagctgtccttcagttagttcacagggctgcaagaggaggacacatccctccagaaaacagcctgagccgggaactggctgtgctaaagagcactgctatcaagttgaggagagagggcttccgtgtactcaggatgtagagtcattgctcagaagtgaacaaaaaatcaaaaacaaaagtctttctcaagggactgatcggccaagtatgcttttctttagagcaatgg

SEQ ID NO: 359376 - DNA, 461 bp, Homo Sapiens
  misc_feature (135)..(135): n is a, c, g, or t
  misc_feature (197)..(197): n is a, c, g, or t
aaatgcaggctttaaaggatacaacacttaaaattgaatggacttgtgtcaagctttttgcatcatacattttttgaaagatttttaaaaaagcctacaacttacatatgtagtagaatcagccattgctctgcnccccggcatagagtcacccggcgcccctatgcaagcccctggaacagaacatacctcatccntccatgtaggaccctatgaaaattgtcctatttttatcctatatatttaaagttttcctaaaaatgataaaaggttattacgaattttgttgtacaaaatctgtacaaaaatctgtttttacatcataatgcaagaattggaaatttttctatggtagcctagttatttgagcctggtttcaatgtgagaaccacgtttactgttattgtatttaattttcttttccttttcaacaatctcctaataaaactgtctgaaatctc

SEQ ID NO: 359377 - DNA, 724 bp, Homo Sapiens
attttttgaaagatttttaaaaaagcctacaacttacatatgtagtagaatcagccattgctctgctcctggcatagagtcacctgttatgtggattaaatagttttaaaatacatatttgaagacctttgagaatgctttagtgtttgatttgaaataaaaggaaattttagcaaggattaaagaaaaaagctatcagctgtatgttaagagagactcttactaacatgttgtaaatattacaattcatgaaatgttattgtaagtctgtaacttaattttttccctgttttagttatacaggttggtttggaaatttgtgttttggcataaacaagtaaaatgtgcccattttatggtttccatgcttttgtaatcctaaaaatattaatgtctagttgttctatattataaccacatttgcgctctatgcaagcccttggaacagaacatactcatcttcatgtaggacctatgaaaattgtctatttttatctatatatttaaagttttctaaaaatgataaaaggttattacgaattttgttgtacaaaatctgtacaaaaatctgtttttacatcataatgcaagaattggaaatttttctatggtagcctagttatttgagcctggtttcaatgtgagaaccacgtttactgttattgtatttaattttcttttccttttcaacaatctcctaataaaactgtctgaaatctccaaa

SEQ ID NO: 359378 - DNA, 701 bp, Homo Sapiens
  misc_feature (570)..(570): n is a, c, g, or t
  misc_feature (584)..(584): n is a, c, g, or t
  misc_feature (613)..(613): n is a, c, g, or t
  misc_feature (632)..(632): n is a, c, g, or t
  misc_feature (684)..(684): n is a, c, g, or t
gagagagagaactagttctctctgctccagctgggcaagtaaccttgttattgcatacacaggtaagtcaattatacattttgcaaagagtactttgtcacaggcctcactataaatagcaatgaagtagcttgatttaattgaaataatgtgtaacttcttttatataattggatttagtttctagtccttgtatctgactaacagtaaagcatattaacataaaaatttattatttaataatttctacatatgtttgcttatgtgagagtagtactaagcaaaaaagcctcagggcctcaagttccagagagaatagagtaagaggcagatgatgctcaaacgtacctcctcacatttactcagatgttttggatactggttggtgcttcttggatttttctttcttcttttttaatctcaaaatttgactatagcaggaaatttattctcttgttctgatcatcctttaatctcatattttcttcttcccatggtcaaaacccttatattgttattataatatgagtatttttgtattgctagaaatcttaagctgattttctggancttaatatctcttncttcaaagactcataccagcaagaatttntaataaaatactgtttaantaaatgcaatttatccatattgacagcaggtgacctttttattattaaatanaatatctctttaccttc

SEQ ID NO: 359379 - DNA, 701 bp, Homo Sapiens
  misc_feature (137)..(137): n is a, c, g, or t
  misc_feature (148)..(440): n is a, c, g, or t
gatagcaaaggcacaaagatcatcatacgtactttatctctgtgtacaacaagaatacccattattttttaaaagttatctttctcaacgccataaaaaaattgactttataatatcccattgtgttgggccgggcncggtggctcannnnnnnnnnnnnnnnnnnnnnnnnnnnnnnnnnnnnnnnnnnnnnnnnnnnnnnnnnnnnnnnnnnnnnnnnnnnnnnnnnnnnnnnnnnnnnnnnnnnnnnnnnnnnnnnnnnnnnnnnnnnnnnnnnnnnnnnnnnnnnnnnnnnnnnnnnnnnnnnnnnnnnnnnnnnnnnnnnnnnnnnnnnnnnnnnnnnnnnnnnnnnnnnnnnnnnnnnnnnnnnnnnnnnnnnnnnnnnnnnnnnnnnnnnnnnnnnnnnnnnnnnnnnnnnnnnnnnnnnnnnnnnnnnnnnncattgtgatgataatctaaataaacggaaatgtacaatatttagaaattgcttaaagcttatctctttgttgctatcatacttgccatggttgtcagaaattccgagtgatcatgaattgtctcctgagcatcatcatttcctccagattctttcagaggacctgggaagaaagcccatttggcaatcactgcatgggagtcacttacctacagaagaaatagcaataataaataaaactactcgaaaatcaaaaggttat

SEQ ID NO: 359380 - DNA, 625 bp, Homo Sapiens
  misc_feature (514)..(526): n is a, c, g, or t
atttaatgccctttcttatgccatgggttttcaagtttactcatttctatggttgcaaataactctaaaacttattatataaactttcatattataggcagaacacaatggctaaatatctgttgcacgtactttaaagtttattataaaatataaacagatacataaagatgtagactcttacctgtgattttgcatggtcagactcggtgtcaggtacggagaggattctcatgactgtcttacctctactgaatattctagtgagttatatgatttacggagtgattaacagaggtctatataaagttacttttcccctttacttaattatattgtagtgtgcagataacaaaactgctaccttctcatccaagtggtctgtagaattcatgtcccttacagtggtcatttaaagtcaatatttatttatgtatgtaataaaaaaagttggatttttgtgtatgtctgtcacattatttagagagaagtaatcttgtaaaaatgttttgtnnnnnnnnnnnnngtattgtaaatagtcttgatattctgtgactcattattttcatgttagagtttgtacatactggttcaataataaagtatccttaaaccagaaaaaaaa

SEQ ID NO: 359381 - DNA, 568 bp, Homo Sapiens
ccatatatttaaatttttattttaacccatcacctgcaggtgattctcatacacattaaagtttgagaaacactactctggaacctgaagagttgtggacactattgggaagcacctctctatctctgctttccctgcctattttctttcccatcctgaagggaggcagataagaaaacagaacaaccagattttccccacagaatcacagaaattggggtcctgcctttggtcatccaaagatgaccctgcagatggcatttaccacctgggtggtagcttaggctgaagaggccactatgagtggacagccctttgccatactgtagaaagggaacagatgcttttgacgtggtcagtagctggtgctccccatgtctgctgctctctcagatttatggcacataaacactttagatcagtccagactctttgttctcaaacgcataagtcaacagcacctttgctgcagattctgcctaactactgtcttccagctgtgcccagctgtgccccacagactgaagtgctgtgctttgtaatggttaggaaagttttgaaccctctc

SEQ ID NO: 359382 - DNA, 347 bp, Homo Sapiens
tccgtaagtactagtcttaatgggtatttattttcttactattctgcaccaatgtttccctgattgacaatagttttcctgaaatgtattcttggaatggaattctatgatatgtttagaaaattctgcataccttatacttcagaatgtgtatgtaaaagactccagtaaatgatccagggaagcaaaaatatttgtgagttttgcgagttgtattcatatgtgtataaaattcctacagcactttgggtaacaatgctctgcacacttttcctgtgctccttttactccaatattttcctgtaggtttcagacctatattttaaaatgtcaactagatctctcca

SEQ ID NO: 359383 - DNA, 693 bp, Homo Sapiens
  misc_feature (551)..(551): n is a, c, g, or t
  misc_feature (567)..(568): n is a, c, g, or t
  misc_feature (636)..(636): n is a, c, g, or t
  misc_feature (640)..(640): n is a, c, g, or t
aacataggagattgtactgatttgcactctcactagccatatatgagcatgtcaatttctcctacatctcaccaacacagtatattagcaagattctgatatttactaatctggtaggtaagaaatgtttgtctttttaataatttgatgacccagctggttttcctcagttcctctcgttcctgctttcctcttctcttccatgttccactcccatctctttctgtctatcatcaggtatttttggttgagattttcacgtgcttaaagccattgattgggaagcatccacggaacagatgatctggaagaacccagagttcagatatttgcaggaaactgaattcaacgaggatgatgaaaaaaagcaatgaatcactcttaagaactagacagcagcaaattatcgattcaatacacagttgacctacaattccacagtttctgagatgaggtattataaggtgagacctcagggttactgaagtattgataaggccttctggtcaactggtcttgtcatagccaaagaatacatggttggccttaanatgggcctaaaattannaatatatatatagatatttagcagcatgtccagcacacataacttgaatctgagttgcagattcacanatanactcagccagtgggttagcaaggaagctgaagtgccttggctgtgatgcttct

SEQ ID NO: 359384 - DNA, 125 bp, Homo Sapiens
cgtaagtctacagataaaaccatctgactcttccagtctcaagtgggctcattcctgtctctgcagtgaatttccagtgaacttcgggttggatagacagctctgctgatcttggttgggcttcc

SEQ ID NO: 359385 - DNA, 649 bp, Homo Sapiens
  misc_feature (109)..(109): n is a, c, g, or t
aactgagggttcaaagccattaaatcacttgcatagccaagcaagatagatgtgaaggtgagattccaatctaagcagttgacaacataagtctccttaccactaagcntgtctctcttaatacccaaaatttccttgcaccctctcatcttccctaaagtacatcgcgctgaaaacccatgaccccaggtttattcagcagtttttctggttaaagcccttggtcctagcgcttactgtcctttacctgtgagtacagggatatccataaatttctcaagaggatgatgcaatactgggatcaagaaaaggtcaaactattatccactctacatcacggccacaatcatcacaggacttggtcatcatagtcccccgaattaatctaagtatccagtttaacagctttagagaaatgccaaggtaaaatccagtaacttaactctctttattaactctcttgccttctaatacctttggattatttttcatgactcagaagcaactggactttcagatgtttccctcctgactagcaggcatctagagaaaagaaacatagcttttccacttagaacctctaggaatcttagtctcttcagctgtaaattaagaacaagaaaatataattttcactattactatgaag

SEQ ID NO: 359386 - DNA, 270 bp, Homo Sapiens
gcaaaattcctgtgtatcttctcctgagggctcctcagtctaaggagggtaaggaataagagaaattgtcaattctaaatcaaacaggagaatcttaaaacaaaagctgtaagctgtagcccaggaggaacctttagatatcatataatggaaacataaataggatgaagaggttggaagccagcatcctgtgggtgtcccctctgactctgtccttgtccaagtataggacctcaatctataaccactaccttctgggtcctttctaaa

SEQ ID NO: 359387 - DNA, 1183 bp, Homo Sapiens
  misc_feature (935)..(935): n is a, c, g, or t
gcggctcggtgtgcagagcacacaatgccccggctggaaaacagaaacccacatgtgcacgtagttagtctcggtaattattgattgctgtagcgcgtataaacaatgtatgcaattaagggtaattaaacctcaactaccgcctgcaaaaatagcaaactttccctgcaaaggcaggagctgagctcctgggaacggctctatccctcctgcagcgtcccgggacaggccctcggattttgggggacccttccctggctttcagagtttcttgaacgttctctccctggtgctgcctccgccacccttcggtagccactcgctctcggctgttcgcactaaaggcggcccctcgtattaacaacgggccctacttctgctgtccctccaggggcggactcggagaagagcacggtggtggaaggcggtgaagtgcgcttcaatggcaagggaaaaaagatccgtaaacccaggacgatttattccagtttgcagttgcaggctttgaaccggaggttccagcaaactcagtacctagctctgccggagagggcggagctcgcggcctctttgggactcacacagactcaggtcaagatctggttccaaaacaagcgatccaagttcaagaagctgatgaagcagggtggggcggctctggagggtagtgcgttggccaacggtcgggccctgtctgctggctccccacccgtgccgcccggctggaaccctaactcttcatccgggaagggctcaggaggaaacgcgggctcctatatccccagctacacatcgtggtacccttcagcgcaccaagaagctatgcagcaaccccaacttatgtgaggttgcccgcccgtctccttcttgtctccccggccaaggtccctcccgcctccaggtccatccatcccgtccggaaaagaaggacccanaggggaagaagaacagtggaagcggggacgccctcccatctcctcggagcccccgcgagggtccgggcccagccaacttccccggcatccggcgcttctagacctgaacccttggccctgggcccagccagtgggcaacaaaaaagtggcctttcggaggggaaagccacctggcccacctggagaaaagcccccaagccagccaggaataaaaacccggcttcccaccccggaaaccggcccgaaaa

SEQ ID NO: 359388 - DNA, 1240 bp, Homo Sapiens
ggtgttctgcatactttcttggtgcgctgaagggttccccgatgtgtaactggggatataggaggcccgcgtttcctcctgagcccttcccggatgaagagttagggttccagccgggcggcacgggtggggagccagcagacaggcccgaccgttggccaacgcactaccctccagagccgccccaccctgcttcatcagcttcttgaacttggatcgcttgttttggaaccagatcttgacctgagtctgtgtgagtcccaaagaggccgcgagctccgccctctccggcagagctaggtactgagtttgctggaacctccggttcaaagcctgcaactgcaaactggaataaatcgtcctgggtttacggatcttttttcccttgccattgaagcgcacttcaccgccttccaccaccgtgctcttctccgagtccgcccctgggtcctccaggcggctctgggcgaggctggcgctgcccgggtaggactgcaccgaactgatgtaggggctggatgcgtggctgctgaccgagttgacgtaggggtagcccagcggtcgggagaaggacgaggctgagctgtaggcgccgtcgggctgcgaatggcccgccgagtgtaaacagtgcatggagtagtgcccgtgggacatgggagaaggagacatttgctggttgggcggcccaaactccataaacaccgccttgcccgacacggggctgttgagactttctggcatggtggtcatggtcatctcttctcgcggggtctgggtgtgggactttctctcctctgcttcccttttgggggtctctatgtttctcaggacaggaaggaacccaatttaagcggaacaggggttttcactttccattcataagaaaatggagtttgtctctttgaaaagtctaagcatgatgctgctgagctccccaaactcggttcaaagctttgactcagcgaaggtcataaatattcatgagctggcggagctgattggtccgctgtcttgcataatcactggggattggtccgaggcgctcgggctccgctggactagagcgggcgaggcggcccggcctccggagagacgcatccacacttcccggccggggctccttcggccgctgcgccaacgccgctgtcgctcctggggcccgctcgcattgctccaggcccagctggccactccagctcgaggctgcacgggtcatccctacttccgggccgtaccagcc

SEQ ID NO: 359389 - DNA, 649 bp, Homo Sapiens
  misc_feature (23)..(23): n is a, c, g, or t
  misc_feature (67)..(67): n is a, c, g, or t
gactaaggtctacggcatgagangctgtaagggtagatttgagctaagagtaacttatcatctcttngggccaggcttgctgtagcggctacggctcgcagacaacttggccatctacaggccacaggatctagcctcttagataaataggccactgggcgtctttagggtctaagagtctgagtaagcacgtctttagcaactccttggcatggagatattagggaaggctaaagcaggggcttcagttaatgctaaattaatgggctatttcattctgtacttcttggatagctgccactaagatttttgtttgtcttttgaatgctttatcagcggccttttcagctgcctgtgttgcttgtttttgtttattaaacttttgattgtcaaaaactttttgggctatttctaaaagctgactgatatttattctagcaaatctttctagtttttggagtttcttttcaatatccggggctgcctgagccacaaatgctaaattaagagcacggctattttcgggagctgccgggtcaaaaggggtgtaaatccgataagcctcctggaggcgctctaaaaacgttctttgtgacttatcaggcctttggacaacttcggtggtcttagacaagtttatgggtttctg

SEQ ID NO: 359390 - DNA, 679 bp, Homo Sapiens
  misc_feature (43)..(43): n is a, c, g, or t
  misc_feature (68)..(68): n is a, c, g, or t
accaagcaaggtgacgctagagcatcacattaagtacggcacnccattctgaacatgaaatgtttatntctgtcactatttagtatctttggaccttggttgaccatgggtaactgaaccagtggaaagagaaaccacagataagggagaactgctgtacatatctgccagcctggagaaatgagagcaatatacctgcttcttgtttgttggaaacccaaatataattgacctgctggacacattacactttttggcatcttttggccactatttcctaattgtaagatgtgaagatacgctctggatcaaagaggctctcatgttcgcttaataattcagagtccatcactcagtggctggattctgccatgcacatcacagagcgtctgagaggcaaggtatccaccagcgtgggacaactctatgcttgcattctgatcatgcctcactcctcacacttcagcttctgtgatgccaccagtttgagccctctgaaaatcccatctgaccactgctaacctcctctaccaccaccaggttggttgaaccaagcatctatccgagacacatgcctgcaagacatgcctgcagtttattttcctctttgccccagccttgtctgtttttctcatggcagccagcatgataactcctcgtgccgaattcctgcagcccg

SEQ ID NO: 359391 - DNA, 349 bp, Homo Sapiens
ttgagattacactggcataaactttagtttgtacagttcacagctactacttgtgcagtaattgctttatgcggctgtaatccataacctgtgaagacagcacatcatctaaatcccattccaaataatatttgtgtagtgttagctgtgaatttaccctgtacagctgtatctctataaatataattccatgtattaatagtcacagaaagactgtaagtgagcaactatttttatgaaacgtaccactatggataaattaacttttacagaaatcttgtttactgtatgatattctaaaacactgtcaaataaaatatatatccaaaaatcttttctttttccaact

SEQ ID NO: 359392 - DNA, 530 bp, Homo Sapiens
aagtgagacccatcgcatcagcatgactgtgcagcctagtcctttgtctcaacactctgtatcttttcaattccaagtgactttaatgataactctgcagcaacagaacttcccaggctatattacaggtatacagatacagctacagtgtctctaactacaacatgcaaggccattatcaatcctatttggaagtcataactagtcgcttgtcccagggtgttgtgctttacttaacaaaggatgctacaagcatcacagactaagaagatttatttcagcttttggccattttgctacaaaaatagccttgttagtaccctatttcatagcccagcaatgtcctcttcaattctgaatcgcatttgatttctaaacaattcaaggctaaatgtggcctattttccaaccacataccactcagtaaaaattatactcagccccctccaaatctggtaccaggtaaacaagctactaatttctttttattatttcttaccaagaggcaacacaaggctgggcatggtggc

SEQ ID NO: 359393 - DNA, 669 bp, Homo Sapiens
  misc_feature (121)..(121): n is a, c, g, or t
  misc_feature (156)..(157): n is a, c, g, or t
  misc_feature (216)..(216): n is a, c, g, or t
  misc_feature (518)..(542): n is a, c, g, or t
ccctgggccgaagatgagggtggagaggaaagatcagaaaatactaatggcagtagcgctactgggtgcaaattatctatcacacacccctatgaacaagtttacctatatacaatctgcnacatgtaccctgaacttaaagtttaatttaataanntgtggtgtatacgtccagtgaaatactatgcagccttaaaattgaagaaatttctgccnatatgtgtcaacatgaatgaaccttgaagacattgtgctaagtgaaattagccaatcacagaaagataaatactgcatgattccactcatatgaggtatataaaatggtcaaattccacagcgaggggaacaacacacacttgggcctgtcagggtgggaagggcggtgggaggaagagcatcaggataaatagctatgcatggagggcttaatacctaggtgatgggttgataggtgcagcaaaccacatgtttacctatgtaacaaacttgcacatcctgcacatgtatcctggaacttnnnnnnnnnnnnnnnnnnnnnnnnntatagtacatttaattatgaaccttcatgaagccatcgcaaatagtggtgaagtcaattgctaatgacttggaaagacatcactaaatgaacaaaataggttccaaaatgccacatgcagtactgat

SEQ ID NO: 359394 - DNA, 377 bp, Homo Sapiens
  misc_feature (258)..(267): n is a, c, g, or t
agtgatgactgcctgtcaacacacgtggggcggaaatagaataatggtaaccgttattctgagtgcgataataatccatagaagtgttcgcaagattgagtgaaaatatatgggtttattcctggtatggtgttatctggctctgtaatttggattaagtctcagatccattccatgattgcatcttcatatataaaataagaataattatacgtgtattactttcctgagtggagttctgagggcaagatgccactnnnnnnnnnntaagtggttcgtgaagagtgagaaaatggaaatgttattactctaaaattctggtttcctgagatcttaacatatgtcatatatttgccacttcgcatgtcagaaacata

SEQ ID NO: 359395 - DNA, 675 bp, Homo Sapiens
agactggtcagatatgaaggtaatgatggaggagtgaagatgcgatatatgatgtggtagaatggaagccgaattaaggaagccgttaaattattaggcgtaagtgtgcataaatatagcttaggcccagtctgtgtgtcatgtatagctttaggaagaagaatagtctaattctggaagtataaagtcttcttcaggtactaaactgaaattcttcagtggttacagttgtatgttgttgttactggctttgtttgttggtatgtttagtgtgtgtagtatcattttatgcactgctgagtcacacaaaagaggtaaacagttatcttggattgcaaaatattactttcctatcaaaatgcattataactttaggtctcgggagctaacacaaataacacatgtccttaatttttacatgggctttgttttatttaataaaatgactcatttaatggtgcccatgagcaggttcttgtctagacctcagcagcctgctgatagtcaaagtcctaaataatcctttagtgatctgtagctaggcatcaaaggagtggtttgtcattgttctacttccacccattacaggatcaggggttcagcgagaagagagattcccaagaagcccctcaaacccctgccatccatcacattccacatgttctcttagtttcc

SEQ ID NO: 359396 - DNA, 464 bp, Homo Sapiens
gacagtttaaatatatcaccctattctctcctgtggtttctgctgaaaaattcactgctagtctgtgggactatctttataagtgactagatgcttttctcttgctctttttagaattatctctttgtccttgacttttggcagtttgagtttaatgtgtaatgcagaagatcttttagcatagtatctgtttgagatctctgagctttccatatctagatgtctaaatctgttgatagacttgggaaagttttcagatactatttaatttgttttgttatccctttcattttctctttaccttctggaacactggcgaggctaggacactggcgaggctaggacactggcgaggctaggacactggcgaggctaggacactggcgaggctaggacactggcgaggctaggacactggcgaggctaggacactggcgaaggctaggacactggcgaggctagga

SEQ ID NO: 359397 - DNA, 499 bp, Homo Sapiens
cacgtacttgattcagcaccggaggatccacaccggggagaagccctacaagtgcagcgagtgtgggaaggccttccggcacagttccaacatgtgtcagctatcagcgggattcacctccgggaggacttctccatgtaacagtggcgcggtgtccgaggacagagtccagctgagcacttcctgaatgcgcccccggcacctgactctgccctttatgtataatccacacgaggttttcacagagtgaaaggacgtttctcattaaacaaacctcttttcttaaatcaaaaccagtgaaggttcatttaagagaaattgagacagaaaagtgggcaaaaaagaagcttctgtgatctctccaacttagaaaaaaaattcattgctgctgatttacgaatattttcgagacacactggtgaggctaggaccactggcgagctaggaccactggcgaggctaggacactggcgaggctaggacactggcgaggctagga

SEQ ID NO: 359398 - DNA, 979 bp, Homo Sapiens
  misc_feature (638)..(638): n is a, c, g, or t
  misc_feature (908)..(908): n is a, c, g, or t
  misc_feature (933)..(933): n is a, c, g, or t
  misc_feature (945)..(945): n is a, c, g, or t
  misc_feature (951)..(951): n is a, c, g, or t
tcctagcctcgccagtgtcctagcctcgccagtgtcctagcctcgccagtgcctgtcctttgtcccatctctctggctcatctcaatgcccttgactcagcggaccacgctcttcactgtgttgtgtctcccccatccccgccccctctccggctctgtcttctctcttagttgcgtacttgaaggaccgaaggctgagtggaggagcaggtagccccacggcccttcccctgatgcatggacgcccagcctcctcctccccggctccttcctctgcgcagtgtgctgcagccaggccgcatcttgctgtggcttggaaccttcttgtgtcctgttcaactcagagaccccacagattcttgcttttctgcagacttggcctctaggttggctgggttgcagagcagtcttgcttctaggttgtcatgagctgcgtggcttccagagctctggggataggaaacagaccctccttagaggtagagcccaggcctggccctgcctgagccacataggtggccaggagagttccggagggtagagtttgctgcccgcaagtcttgcttgtgaaactctgaattagggaattagggcacagtctgaattgagggcagtatgcgaccacccgctccgcgtcnctcctttacagaaacagtcctacttctccactggcatcctcttgagggaggcacggctggaaacccagcacctccctgcaccagctcagggctgcctgggtcagctgctggccgcagccccctaggcccactcactgtcgccggccctgcatgcccccagcccgacagctgtcgccagccttcctgactcaggagggagccctttgttgccttcgagggaacggtttcgctgggccgctttggtttgcagcctgatttttcccaccaganggcaactgggggccttgcccgccanttccttaagggnccatcntgttttttgttccaacagtggcctttaa

SEQ ID NO: 359399 - DNA, 728 bp, Homo Sapiens
gcccagacatctgggagtagagcctcccgccgtaatgacggatgggtaataaggcccatgttcggctgcccggttgcgggagtaaagaatttgtaatttcaaactttaaaaaaatgaagcatattttgggcccttaaagtatttatggtttttataatccaattttatgcctagttaatatttacgaaagaattaccacccattgtgtgttagtcccccaattgtgttctttataacatataccctttttggtaattgcatagagctttaaatgtccaacagacaggcatattaaagctacataaaaataccaagaatgttcaatttgttaaaaacaatgctttcaaagaatatcattttgtagttttatgcctaatgacaatactttcagagatttcactattttcatagacagtctcataatattcttataaaggagatatgaccagctacctgacacatagtaagggctctctaagtaggtaactattattattattattgactttaaaaaatcctatcgtcttcacggtgcaactcaaaaatttctatcaggaatactatttttccccaaatactttccacaacatttgtcaaaatggctagaacctatttaacactcatttctttatgatttgatctttcaatttcaaaaattccgggggtccagggaatatgagagggaggaggagatgggtagaatgcggatagatgtgaggatcagaggt

SEQ ID NO: 359400 - DNA, 692 bp, Homo Sapiens
  misc_feature (47)..(47): n is a, c, g, or t
  misc_feature (51)..(51): n is a, c, g, or t
  misc_feature (93)..(94): n is a, c, g, or t
  misc_feature (111)..(111): n is a, c, g, or t
  misc_feature (115)..(115): n is a, c, g, or t
  misc_feature (191)..(191): n is a, c, g, or t
  misc_feature (228)..(228): n is a, c, g, or t
ccgcccaggaccaagagagtcccacacaagagggccctcacaaaagnagcncctcaccttgggacttagcttctataagacatatttattatnnaaatcacccagattagnttanttctaagtaccaagaaccagactaagacacttagctatatgtacaatgttttcaagtgtatcactgtgccccttcnatagcacatgtattacataaatccactgtgattcatntcagtgttactactgttaccaacacctattaattcttccactgtgttcatcatggctgctacttaaggttccagtctttctacatatgcaaatattttctaaggatacatggctatattttaacttacatccagtatgacttatttgatttactgccaacaattctgccctcaaattgtacaggaaaaaagaaacacatgatgtttttgcataatgaaatccctctgcctaagtttccatcaacagtggagaataagatgatcagtcctatgcgtagcaatttgttctgcatttaaaagatgtctcgttacctcacatgcatgatttggctgaaactgaactctctttcaaatttcctcatttccatagagtttgaagctgccattcttagcaatcaaaccctatctacattgcttcaatctggcttatggtgactgaacagagagatttctcatagatggaat

SEQ ID NO: 359401 - DNA, 1288 bp, Homo Sapiens
  misc_feature (20)..(20): n is a, c, g, or t
  misc_feature (45)..(55): n is a, c, g, or t
cagtctatattccaaaattnaatgatcacattttattctttctcnnnnnnnnnnngtttttttaaattaaaaaaggaattgtttccttcacagctatgaataagctttcaggttttattaaaacctagaggaaaaaatcaggaatgacctgaatctcaacccaaatattaaacaaaatccacataatccctcatttcaatttccaattccattaagggaccctctctttttggatggcagagatggttttttaatgaaatcccaccatctatctgagtgagtctggcaggctttttagttcctgagttaaatttgtaatagaaccaaggcaatgctgctgactttgatatgtatgactcagtctttcaatatgtggttttcaaaaaattgttgaagacgtgacttcatagcaatatatagagaataaattaaaatcagcagattgagttttcaacattgcaaaatcagttttttacctctttcctaccaatttcacattttgcagaaacttgttcacatttccaacaatatcagaattagaaaacagttcagataacaagaaagattaaaaattagggaaattctgatatcaccataaagcactattttacatttagagattacatttaagataaagtcatcatacacaaaaacaataaatatttataactttctctataaggtccgcatatactgtatatattgaaacaatctgaatgactagtagatttcatatgaccattgttatttccactttctccaatacttgtattttatgctacatgtaatgaagttggacctttttattatttagtaattcctatatgttcctatacttttcattttcaagatgattgctctattgtttcatgttgtttctagcaaatatatctccatgagatatgcactttgtttcactcttgacacagtttcaaacttttatctttcaattcgctgtgtgtgtatcctaaggggttatctggcatgtattagcttcctattctaattaaattttcttagcaagccaagaaaaaacaaaacacacacaaagtagaacacaagaaaagagggggcgccgcaaaaaggatccgccaggggagccaacaataacaatacccccaatgtcgtgcgtaacaacaggccacaaaagggggtgcgtacaaagagaagcacacgcgcgcagttatacagacgcgatgaagagcgaaacactgacgaggagaataggagagacaccaacacgggcggaagacatgcggcagcgcgacgaaattaacacacgagaaat

SEQ ID NO: 359402 - DNA, 349 bp, Homo Sapiens
gacagcaggcactaatgggaatgtcctttgctcttaactttcactaagggttactgtagtctgatgtgtccttcccaaggccacgaaatttgacaagctgcacttttcttttgctcaatgatttctgctttaagccaaagaactgcctataatttcactaagaatgtcttctaattcagatactggggatttacaagagtctttaaagcacggacttacacctattggtaagtaggagtttctctattgatcatctatttattctgctactacatacatataatttaatcttgttgatggattttgcattttaagtcatggcttttcctattatgtttattaaaagcac

SEQ ID NO: 359403 - DNA, 556 bp, Homo Sapiens
  misc_feature (245)..(245): n is a, c, g, or t
aatgaactctagaccatggagccattccaaccaatgctgtacatgctattcatttatgataaagaattaaataatggtcaatttttctaactatgcaaaaattgtaaatgttagatatttaaattaagtataccccacaccaggttaggatcatttcaagaatgtaaaataagttaaatattcaaaatctgtttaatatatcatgcaatatgagatcaaagaaaaatctccatagattataaagnaatagggataggtattttcttaatgtggataaaacgggtgtgtctcatgcccacaccaaccccaaaagcccagcatcatgcttagtgaagaagcatttctatttctataatgaccaggaaccaagtcaaagaagtccactatcaccattatcatgaaaaattatttaacatgtttctggattactgtactagctaatgctattacaagagaaaataatagtaagcataaaaattagaaaggaaaaagtaaacttataatttgaggctatttctagataacacaacttagtcaactgaaaaactatttttcc

SEQ ID NO: 359404 - DNA, 1066 bp, Homo Sapiens
  misc_feature (523)..(523): n is a, c, g, or t
  misc_feature (525)..(525): n is a, c, g, or t
  misc_feature (543)..(543): n is a, c, g, or t
  misc_feature (562)..(562): n is a, c, g, or t
accacatggatgtttaacctaagaatgctaaactgtggagacactttccaatggataatcccagatctatttcaaggtgtagattaagtgcacaaggaaacacatatgagagctctaatttgaacagataggtatggagacaatcctttagtgtaatcattatgttttaatctgcagagacagcacagaaaagcaacaatgcatctgtttaggatctttatgcaagtctctactggattaaaataagtgctatattcacaagcctatatgaattataacaaagacctgaaatcaacagcatgtacatggagaagattctatttcttctctactgaaatgttgtgctcattgatagctgggacaggtattctcacagctacttcattttcaccttccctagaccagccttgtcaggagatttggaggagtctgtctccatgtctggctgcttcccattacagattactctcagcacattggagaagtcgaagctcttgtaaccatctccaggagatcctgatcntntgccatgccattgataanttcttctaaagtcaattcnccatcattgatatcgatcttatggaacaccaagttgatgaattcttcaggactcagagtttgctggccattgagggcttgtaccgccatgaacatgtccagtagttcatgtcaatagaaccatttccatcagcatcatacagcttaaaataccattttaatttttgctccattttttcttgcatgattagatttacagcagcaataaactccaaaaagtcaacaaatccatccttgttcgtgtcaaaggtattataaacttgatcaatatgtttattggccttctgattcagaccttgcagacccaaaagtgtcttaaattcatgtagtgtttgcaggccggatggatattccatcataaatgttctgtaccacacatgggtctcttgtgtaggaactgctttctgatcaccagctatagatttgccattccccatcttgactcacagtctacagcttttcctcaggttgttttcacttaagtttttgctggatttagtccctt

SEQ ID NO: 359405 - DNA, 626 bp, Homo Sapiens
  misc_feature (85)..(85): n is a, c, g, or t
  misc_feature (90)..(90): n is a, c, g, or t
  misc_feature (96)..(96): n is a, c, g, or t
  misc_feature (229)..(229): n is a, c, g, or t
  misc_feature (272)..(272): n is a, c, g, or t
  misc_feature (276)..(276): n is a, c, g, or t
gatactgtacggcaaagaaggactgtccaatgtacaagggcttagtaatggtcgtgcaaattgtatgatggccatgtattagctnccttncttgtnaagctgggtatacattcccgccagaatgagaagagaattagacagagccctcacggggtgatttacgactgctggcatgtaagtggccaagaatacgtgtttcgcagtcagctacggagattcgaggttggtntgtctctgcaccaaagcaggctaactcactggggtaagcaccnccanaattaaatttaaactggagaacataaatcaatatggagagatgcagtgaagagacctcatttccattatgtgcatcttcagggagagcagaataaataagaagcagaatatcatagtgggagaagcacagattctgggaccagatgcctgagtccaaatgcaagctccatggccttggacatgtttcttaagtcaatgtttccatctcagatttaaaatgtggatgatataaataatacctatctcatagggttgctattagaattaaataaattaatactttacagtgcttaaaacagtgcttactacatattaagtgctatgcaaatgtttaataaataaatgccagt

SEQ ID NO: 359406 - DNA, 1144 bp, Homo Sapiens
  misc_feature (43)..(79): n is a, c, g, or t
tgatactactatggggaacactggattcaccgcggggcggcgnnnnnnnnnnnnnnnnnnnnnnnnnnnnnnnnnnnnnatcaggccaaatcggccgagctcgaattcgtcgagagcggagggaggcttgaggttcgggtagtcggtgacatggcggaggccgcggcgctggtgtggattcgcggccctggcttcgggtgcaaggcggtgcggtgtgcctcgggtcggtgcaccgtccgggattttatccaccggcactgccaagatcagaatgttccagtggaaaacttctttgtgaaatgcaatggagcactcattaacaccagtgacacagtgcagcatggagctgtttatagtttggaacccagactttgcggtggaaaaggaggttttggatctatgctccgagcacttggtgctcagattgagaagacaaccaatcgagaagcttgtcgggatctcagtggaaggagactacgcgatgtcaatcatgaaaaagcaatggctgaatgggtaaaacaacaagccgagcgagaggctgaaaaggagcagaagcggctggagcgactgcagcggaagcttgtagaacccaagcactgcttcaccagccccgactaccagcagcagtgccatgagatggctgagcgtctggaggattccgtcctcaaaggtatgcaggctgcctccagcaagatggtttcagcagaaaatcagtgaagaatcggaaacgggcaaaggcctactaaatctcaaacagacagaggagccagtgcgggaaagaggagatgcttctggttgggcatggagggactagagactgcagaagggtccaactctgagagttcagatgatgacagtgaagaagcaccaagcacttcaggaatgggtttcccatgctccaaaaaattggtagcaatggttgtcgagatggcagccaaaatttcccaagtggttctcagagggcggagagttagtgaattacagaacattggatcaccagaaacaactgtagaatcccggtgactgactctgggaggcatattttagaagactcatgtgctgacctgggggagtccaaagagcacttggaagccggatggtacacgaacagaagagaccaggaaaaaggggacaataagaaaca

SEQ ID NO: 359407 - DNA, 408 bp, Homo Sapiens
cctctgtgatgtctgcacaactcaccgagtggaacattcctcttgagagagcagggaaacactctttctgtagaatcagcttgtttgtatttggacctccttgaggccttcgttggaaacgggcatcttataaacccagacagaagaattctcagagtcttctttgtgatgtgtgctttcaactcaccgagataaagatttctcttgatagagcaatttggaaacactctttttgtagaatttgcaagggtacattgagagcgctttcaggcctatggtagaaaagggaatatctttccataaaaggtagacagaagcaatctcagaaactactttgtgatgtgtgcattcaactcaccgagtgcaacgttcctcttgaccgagcagtttggaaacattgtttctgta

SEQ ID NO: 359408 - DNA, 677 bp, Homo Sapiens
  misc_feature (232)..(244): n is a, c, g, or t
  misc_feature (366)..(374): n is a, c, g, or t
aggctgaaccaggccttgggagccaagggggagatccttagtccaggggttgagacctcctggtaagccggtgaaaccgtgactaaaaatccaaaattagccgggttggtggcggggcctgtattccagctatcagaaggtaagcaggagaatggggtgaaccggaaggcggagcttgcagttaagcgaggtcaatccgactgcactccagcgtgggtgcagagctgtctcnnnnnnnnnnnnnggaatatcttgtacggcttgcagtggttatatttgattataagggaacacagcctgaccaaataattatgtatacacattcaaggacagaatttaaattaaaaataaattatgagagaaggnnnnnnnnncacagtttttactttcagaacacagtccttttttgtggtgattttgctttctttagaacattcttggaatcttattaacatgtcagctaaccagagaattttgggaagggatagtggggattaataactgggtttttccaggctccaagatctaagaagacagagatcttgttagctgattagtgtagtaagattaaataaataatttaaggtttacattgcatcatgtattatgattgtgattgagaataataagagtttaaaaaaatgaaaaacaagatctctgtaatttgaggatgaaac

SEQ ID NO: 359409 - DNA, 384 bp, Homo Sapiens
caaagtgctaggattacaggtgtgagccaccacaccggccttgatcatcattatcaatgcaattatttgtgacgtacttcctagccctccagagcttttaaaagaaatggaatctgactttaacttctagtgtttgaaagttttagtcccttgccatcttgcttttgagaaacgtcattagcgctgtatgttttgataggagtacagttgtttaattatggtagtaactgtaattaacttctgtgtagctctttgtggcttaccattttcatatacattaattcatttctactccacaggaagcctggcattactgattatgcagccaagcagcagtgtactattttgcctagtccccttgttccacataccctcctttctttt

SEQ ID NO: 359410 - DNA, 517 bp, Homo Sapiens
acgacagacctgaaattggccatgcagacctgaaattggtaggaaaaacttaccctgaaggttactgttgatgaacccaagcgaaaacatgtatttaatggaaatgcatgtcagaataaagaaaaaatgtgtaatccccttcatttctgagtcccagccaaaaggtgttgaataaagctgatatttcagaggcaaaaaggggacttgtgcttgttttagaaaagtaaaaatttgtatcatacttcatatggccagtaattaatttatatcctgacaagtcctttaattaaaaatgttttaatacatttttaattacaaaagcatcaaattcacaacaaaaatttgaacactgtagactgacagaaaataccacctccattcaaaaagatatattgtaaaaaatctgctgcatagtttctgagatccttcacaatggatttatatttacatgtttgttttatatttgtgaccgctttgtagcccttttgtaaaatttaaaatactatgggcgtttttg

SEQ ID NO: 359411 - DNA, 719 bp, Homo Sapiens
  misc_feature (42)..(42): n is a, c, g, or t
  misc_feature (60)..(60): n is a, c, g, or t
  misc_feature (84)..(84): n is a, c, g, or t
  misc_feature (86)..(86): n is a, c, g, or t
  misc_feature (94)..(94): n is a, c, g, or t
  misc_feature (106)..(106): n is a, c, g, or t
  misc_feature (135)..(135): n is a, c, g, or t
  misc_feature (139)..(139): n is a, c, g, or t
  misc_feature (144)..(144): n is a, c, g, or t
  misc_feature (155)..(156): n is a, c, g, or t
  misc_feature (158)..(158): n is a, c, g, or t
  misc_feature (184)..(184): n is a, c, g, or t
  misc_feature (199)..(199): n is a, c, g, or t
  misc_feature (254)..(254): n is a, c, g, or t
  misc_feature (262)..(263): n is a, c, g, or t
  misc_feature (583)..(594): n is a, c, g, or t
aagaagaaggatcaacccaagaaccggggactatcattacantcaagttgcttcaccacnaaggaggaaaatatccagtctggncnacacttcnccaccagtctgnaagatgtcagcccaggagaacaggcaatntacnatganttctctaccanncnaagtggccattatgtcccatggcacnatagatatattctcnaatatgcagaagtttaaatgtaatgcaaatatgtgctgccttaagcaacttattntatttatnnccattgaatttcactaaaggagatacagatgtgcataattatgttaatttacacatgataatatacattaagaccataagaaagctgagaaaatgcctgctcagtcaaaaggtcttcccgagcaggggctgagggtcttgcacatggctggatccacacacaatctgagtcataggaggcattgaaggcactgaaggatgggcttgatgtacttggaacagctcagtcacctgttttgatgcagggcctgttgcaggtgtgatgactagagcggggatcatgagtgctaaaggaatttgccaaggcagtcataggttttnnnnnnnnnnnngcagatttattagaaggaaagtatgttgcaaggaagcaacgggcagcacagcagaaaagggactgtctccaaaaaggcaggggctggaaggaagctttatagggtcatgctggagggggttcgtg

SEQ ID NO: 359412 - DNA, 750 bp, Homo Sapiens
ggctcaatggaaggccggagaagttaccagatgtatgctactcatgctgggtcctggcttccctaaagataattggaagacttcattggacttgatagacgagtaaatctgcgtaatattcattttagcatgtcaagcatgaagaaacagggggatttgcagacaggccaggagatatggtggatccttttcataccttatttggaattgctggattgtcacttttgggagaagaacagattaaacctgttaatcctgtcttttgcatgcctgaagaagtgcttcagagagtgaatgttcagcctgagctagtgagctagattcattgaattgaaagttgcatagtatagttttgccattttaacatttctgtatttgaagtgcttatcgaatctaaaagtgactactgttaatattttgtatattgtgttaaattaattttaataaattatataattatacatattgtaaaataaagaccggtattttattttctgctttttattctgaagtcctgttattctgactacagttctttgtgtatacttctgtgtctgttatgttcaataactgagctaacataaaataactctaggtttctacttgatttttcccccatgtatacctttcatctgttctatagcaagttgatgtaaattggtttgtcaacaagaatgttaactgatgaaagtggatagaacccatacatgaattaaatgatgcacaaaataaatggctgttgaaatttgg

SEQ ID NO: 359413 - DNA, 328 bp, Homo Sapiens
aagatagagcactgtatgcaacgaagccataggaagaaataaacaatgctagttacatagcaaaatataaaagctattgttattgggttgtatgctttgtaactcctctctttcacatgtgatttttttaaatgcattaaacaataattatgaatctatgtcaatgaacacacagtatctacaaatggaaactgtagcaataacaatataaagagggagcacagctgtataggagcagagaatttgcatgttgttgaagctaagttgttatcaattcaaactacattgtcaaaaatacaggatgctgggcaggcacagtggttcacac

SEQ ID NO: 359414 - DNA, 1059 bp, Homo Sapiens
  misc_feature (70)..(179): n is a, c, g, or t
gttcaagtgattcttctgcttcagccacctgcgtagcggggactacaggtgcgtgccaccacaccctgcnnnnnnnnnnnnnnnnnnnnnnnnnnnnnnnnnnnnnnnnnnnnnnnnnnnnnnnnnnnnnnnnnnnnnnnnnnnnnnnnnnnnnnnnnnnnnnnnnnnnnnnnnnnnnntgagccaccacacccagcctagagttacttgtaaaagaagtctggcttctgtacccagcaaccctgtcccgccacatcccacatccccacagttctcttggtaggctccagagttggaggtggctctggcttcaacacttactctctaggtgaatggctaaataacttgtctgagccctccactacctgatgtagaagaaggaaataatgacaatactacatatcgcagagtgtgcattttgtgtgggtgcttcagaagaacctgggaagaagagtgaaatccctccctatgctggagaccaccggctctgtcccaccttgccccagctcacctggtttctgatagccttctgcagcagctccttccctctgcttagaggcaccgagtcaacgggtttccgtgaaggcctggggtggctgccttttggatcaaccatggccgatgtttccactctgacctcactggggctagggctagggcagcctctatggcttttcccactgctctctgcctttacttctctgcggctggacacgatgtaacttacttctttgctcagaaaaccctcaattaccccacccagttgctgaatggcccccgtcaaaaactggagattcttgccagcaggcagatccaagtaaaaggactttccggaaaagggatgcttcctggcacctggtgagttcttctggcattttcctagacacctggaaactcctaggtccggggcccggagcctactctcagccatggaactctccagctcgaggcaatcgtctcccgctggtcacttcctaagccccctccacgactccgcacctcgcctcagctattaacgaccccttccgcctttctttctccccttcccgacaacccgct

SEQ ID NO: 359415 - DNA, 374 bp, Homo Sapiens
  misc_feature (109)..(109): n is a, c, g, or t
  misc_feature (215)..(215): n is a, c, g, or t
  misc_feature (294)..(294): n is a, c, g, or t
  misc_feature (338)..(338): n is a, c, g, or t
gctgccctagccctagccccagtgaggtcagagtggaaacatcggccatggttgatccaaaaggcagccaccccaggccttcacggaaacccgttgactcggtgcctcntaagcagagggaaggagctgctgcagaaggctatcagaaaccagaaatgatgatgcaccgtgcaacagctgtctcattgccgtctttatgtgtgaaaaaacaacangccaaaagaagccagagggaacatgtccagcagcagagtcaagaacacggaaagtggccagacttgaaaggcccccgtncctcaaaaatcgaagatgaaaagcaggaagtttcgtcctttccnatcatcagtttaaatccttttccctgaaatttcttt

SEQ ID NO: 359416 - DNA, 522 bp, Homo Sapiens
ctttagggaaagcaacaccatccctgtaagccatgggttttcatgcggaggaaggagagggctagttgtctgagagggtaactgcttaaggctgcagactaggaaatgggattccaggtttaagatagctcctttctggacctcagtccttcacctagtcacctagtcacagggtggattgcctctaaggatacttaggggaaaaggaaccaaatttgggatggttctccttgctttaagccttgataggagacggggaggccaacccttctctgcagaccgtgatcctcactagacagaggagctccaaacctgcccatctcatcccatgcaccgacggtgcctggcctggctccaaactcccgaaaggaactattttacaggtgccaaaaaggggacagtgttgataataataataaaatgaaacaatctgattggggcattgctggatcagaaaatgtgtgacctttttaaagttaaattgttaaaaaattttaactattaaacattttaaatattaaa

SEQ ID NO: 359417 - DNA, 883 bp, Homo Sapiens
ccatataagagcaaaacaaaaggacagggagagaatgtgaagatactgaaacattttacataaagttgtataaaacatcctttaaagaaaatgtaaagtttaggatatacattaaaatcagcagagcccctaaataaataaataggcattgtaaaatagcaagagaaaatttaaatggatttctaaaaaatattgacacctatgatttttaaaatatgtttaagaaatgccgtattacacagggcagccttttacaacccagatatgttaggacataaaggtccttctgtttttaatttgctagtgtttatagggttacaaatgtcttctacccttgtcttttgtctgatggtgcaaaaaattttcataagcatgtatttctgaatgcctgatggattgacatatataataagctgctagtattaagagatatgtgacataaaacgcatccaatcttctcactgtttacataaattctaggtttctcctatttacctcaagcacgtatggagcgaattcttaccttttaatattgccatggcattcacattgaacataagttgaactctctcatatggtagctgggttcggattcccttgacaatttccagttctaaccctcacagttcctcagggtggttggcccaaatattgaccctacacagttgtctcctcgtcgtgactaccagctatggaaatagtcagcagagacttgagaagaggggtttcaggtgacagagctcccatgggagaagcaggatccaatagagagaagagaaagagcagagtggttttatagagagccaggaagaacaatttgtagcccagggaatcagggaataacccctcactcagaaaaagagagccagaaagaagagacttc

SEQ ID NO: 359418 - DNA, 395 bp, Homo Sapiens
tgagccaccatgcccagcccttaagaccttctttgaatactcctttgtatttatcttgtggccttaattttgcttttggttaaggaaattagtgaatggggtttagcttcattcttcatttagaggaaaactgtaggtaatttattctgaaagtgtggtcagacggaatctaagagaacctgtttcccttggcgaccgaaaaataatccagttgaatgtcctgaataacaggaatccttttctgcctccctatgggaaaaaagaaaccttgagttaatattttatgtaatcagtgcaatgtgctactaggtaatgagtgggaagtagatggagaatataggaaataatgcttggtctctgttctttagaagattacaaccacaggctgggcgcgg

SEQ ID NO: 359419 - DNA, 715 bp, Homo Sapiens
  misc_feature (159)..(159): n is a, c, g, or t
  misc_feature (163)..(163): n is a, c, g, or t
gttagcagcaatagcagaatttaggaaataaaacccacagagttacaagcatgcatttatttcctattcaataagattctgactttcaagataccaaagattgtagctgcaagaaaaagaacaaaaggaaacacacagggataaaggatgagattttanaaanaaagtaaggagagatcattcaccatgaagaaaccattcaagaagccagctttaccatccctgccactgtcaggtttatcatgactttgtacaggcaattttataaacactaaacatttgtagtcaagatgaaccaagatgaaccatcaaattcattataattttgacagaatataatatctccaataaattctgtagggaacaactggaaagtatgacttttatgtactttatgaaatacagattaagtcattttacaggctagaggacaacaaatctttttaaaaagtagatgttacatttgagctgcacttggtgattttctcccactgtaagctgctccagtttaccacatgcatcagtaaagataattttgtttgcaagcaacagagtcattgaactaaaaaataattaaagggagttattggatgacctaacagaagttcagagatagggaggacttcaggcagagtttaatcagggctccaactccagttctctgtaagttcaaaagttttgtccagaattgacctgcagcccgggggatccacta

SEQ ID NO: 359420 - DNA, 712 bp, Homo Sapiens
  misc_feature (23)..(23): n is a, c, g, or t
  misc_feature (36)..(36): n is a, c, g, or t
  misc_feature (51)..(51): n is a, c, g, or t
  misc_feature (69)..(70): n is a, c, g, or t
  misc_feature (119)..(119): n is a, c, g, or t
  misc_feature (153)..(153): n is a, c, g, or t
  misc_feature (163)..(163): n is a, c, g, or t
  misc_feature (175)..(175): n is a, c, g, or t
  misc_feature (180)..(180): n is a, c, g, or t
  misc_feature (187)..(187): n is a, c, g, or t
  misc_feature (236)..(236): n is a, c, g, or t
acactggaaaagaggttcaatgnaagtgcttagtanttgtccaaacacggnggaataaatgcgtctgcnnttacttgccaagacaatgtctcaagctagtgataggctttactcagcancctcaggcaaaatttatgcagctctgctaccgtntgtcaggtanttaaagggaaanaaggnaaatgtntgcttaaagtaaaagtgttttttaattaaccatgaaaatatttaaatanacccaaggggcaaataggcagttgggaaattgtttttaactttccagttaaaacatgaagaacttcaagcaaaagaccaatattttaggcatggctggtagtttattccttacagagcattattcagctgtgctagaaatccaaatttgagattgttccatctttgtgtcgaagaatgtaaggcatagttactctgtcttacttgaaagataatgccccttaccagtttttgctaaccactaactatttacttggtaggagaagagttcttcaaagtcagaacctgatagaaagccaataaatagtagtacaaatcttgatgtgggaagcacagatatagcaggaagtttaggctaaaaagaaagggggaaataacctcttccctattatggttaaccagagtattagttggattgtgttatgtccaaaatttatgttaatggatccgccactcatcaccaaaggctgaactctat

SEQ ID NO: 359421 - DNA, 475 bp, Homo Sapiens
  misc_feature (455)..(455): n is a, c, g, or t
aagaaatacaccaaccataggcttaacccaatgcttagacttggatttggaagttaagttacctgggaatagtctcagattgggttttaaagggttgaatggctgatcacagaaaacaggttgaactgaaaagcaagggtggagatcacatagcaaaggcatttgaggaacaagaaagatgcttggtaaagagagtgctcagggtggagacagcactgtgtcctcagcctggtgaatagttaaaacatgggtctctggattatacaacccggggggcaatgatctgaacaagggccacaaactgcatatgaatgccaaataccttgctgcatggacagggcaggcaaagagcttagtctgagtactctggtaatgtataattggggcctgagtagaagggagatactgttacagtacgtagttaagcggacataagcagggcaggagagggcccncctcccaccaggtgtcaggc

SEQ ID NO: 359422 - DNA, 215 bp, Homo Sapiens
cagaaaagcctgggagtttccttgacttcctttttccccctccctcttcttattcatcaaacatttgttgattgcctatataagccaagcactgtaataggtgctggtcatgacgacacaacagattatcactacaccagagacaaagaccaaagtcataacctctgaagcaggaagacctcactgattttagtgtcttcttctactttctgtgt

SEQ ID NO: 359423 - DNA, 479 bp, Homo Sapiens
  misc_feature (253)..(253): n is a, c, g, or t
  misc_feature (352)..(409): n is a, c, g, or t
cctaacactactgcattggctgagacataccaaagggcgttagaactagtctcagtcaggagttaatccagagactcaaactttctcatcagtatttgtcttattcttggcgttttgtttggctacattttcacctactgaatgcagcagtgggaaacatggctgcaagctgctccagcctccttccagctctctgactccaaattctcaaggcaaaaggaccttcctatttggcttttcctgaaaacaactncagatgctggcaggcccagcctggatatttactctttcctagactaatcactttgacttaagagggcaccttacttggtaaaaccctttgggctttttnnnnnnnnnnnnnnnnnnnnnnnnnnnnnnnnnnnnnnnnnnnnnnnnnnnnnnnnnntgcaagttaaccaaaaccttaaaggatgaaggagaagaatggcttggccgggggtctggtttaagggggg

SEQ ID NO: 359424 - DNA, 688 bp, Homo Sapiens
gaatttcctgggaatggatttcagaatcattcctaagattaactgtaggaggtttaaaactctgtgcaaatgtgcacgtttgctatgtgtgtggaatattctttaaaaatataattgaaaattttctttattctgaaaaagtgaactgctgtgatttaccttgatttggctgaatgaagttaataaattggatagctccttaagggctttattctcttggtaattgcctacttgtgtggatgcacattttatctagtttgaatttgtttcaaaggaacattattttgtaaataaaatatatattttttcccatgtggtattgcatagcacatggagaaaatagattgatgataccgtttcattttatgatttttctttgaatataatgttttgttcttttattggaaataaaactgaccccaagaataaaattatatttccttttaattctatgatagtgcatttaaagtaatgtatatctacccaaggtgatgaagatgatgattgccaaccacaatttaatgacattaaagaaattaatgacgtttgattcctttgcttatcttgtgtgttatagtctaactccttttaaatctgttctttgacattctatatgactttgcagattgtgtgcgtatatatggatacatataattatgtattaaaagtatgttaattaaaaaatgtt

SEQ ID NO: 359425 - DNA, 760 bp, Homo Sapiens
cggccgcccgggcaggtactaaagagcatgtgtgagaatttctacaaatattcaaagcctaagaaaattcgagtatgtgtcggaacctggaatgtgaatggtgggaagcaatttcgcagcatagcttttaagaatcagacactcactgactggcttcttgatgcacccaagttagctggcatccaggagtttcaagataaaagaagtaagccaactgatatatttgcaattggttttgaagaaatggtagaattgaatgctggaaacattgtgagtgcaagcacaacaaatcagaagctctgggctgtagaacttcagaagacaatctccagagacaacaagtatgtgctgctggcttctgaacagttggtgggcgtctgtttgtttgtttttatcagaccacagcatgctccttttatcagggatgttgcagttgatactgtgaagactggaatgggaggtgcaactggaaataagggagcagttgcaatccgaatgctcttccatacaaccagcctttgcttcgtctgtagccactttgctgcagggcagtcacaagtcaaagaaagaaatgaagattttatagaaatagcacgaaaattgagttttcctatggtaagctcttgctgcttgttcttgaagataaagctttgaaatatattttaatttgccccaaattctacatcaatgtttttggaaatttaagatagttcctagaaacattaagaatattcacctaaatagatatttcatgagtatt

SEQ ID NO: 359426 - DNA, 426 bp, Homo Sapiens
  misc_feature (398)..(398): n is a, c, g, or t
aaccacagctccaatgcgtgtcagtaaaaggaaatcttttcagctccgtgggtccaccgagaaactgattgtttccaaagaatccctcttcactttaccagaactaggtgatgaagcatttgattgtgactgggatgaagagatgagaaaaaagtcatagttgggaaaagctttctggtcaaatctcaccttcttcaactccacagaggaccttcaggatatcaatatggtatttataaatgtatagaacaattggccatattgaggatcactctgaatactggctcccccttaaggctttctaatttcaggttaatcttcatgacttagttgtataatcagttgaggtcagtgtgataccagcagctgagctgaattaattatgttgtgcttaattntactggagtacttgtttcctgttcctgg

SEQ ID NO: 359427 - DNA, 794 bp, Homo Sapiens
  misc_feature (97)..(240): n is a, c, g, or t
aagccacaccagacaagcgtctcagaaaaagaaggcttctatgtcattacaaacttttccagaactttcaattttatttaaaagctcatagctagcnnnnnnnnnnnnnnnnnnnnnnnnnnnnnnnnnnnnnnnnnnnnnnnnnnnnnnnnnnnnnnnnnnnnnnnnnnnnnnnnnnnnnnnnnnnnnnnnnnnnnnnnnnnnnnnnnnnnnnnnnnnnnnnnnnnnnnnnnnnnnnnnggaactcttccatgaactcctccactggggtgctgatggatgtgctggttgctggctccagttgcgcatgacaggcaaatgcagccaagttaccgtccttgccgaaaggttacaggtttggatgcaagatgctctgggaagtgcacgcagatatggggggagaaaagctgctcagctgccccacagcctgctagcattctcatgtgcttttacatttccttttaaaaaacctttttatgctttattttggaacttggctcttgcagtagacgaaagaggggttggcagtgattgtctttatggatcagcgtctctagcagtgacctcagggtaaaattgatgtcagtgttcctttggggtcgactgggcaggccgtggagacagtctgggttttcaacaagcttccatctccagaagaggtcctggggtcgctgccttggctttgcacgttgggaatgagcttcgttttccaccatgtttcagatgtaggcagctgtcattcttggacctgtacctgatgcagattcctgtagtttctctctcttcctcttccc

SEQ ID NO: 359428 - DNA, 718 bp, Homo Sapiens
gaaaattttaggcaaccttctaaatctttttcaccatggatgaaactataacttaaagaataatacttagaagggttaattggaaatcagagtttgaaataaaacttggaccactttgtatacactcttctcacttgacattttagctatataatatgtactttgagtataacatcaagctttaacaaatatttaaagacaaaaaaatcacgtcagtaaaatactaaaaggctcatttttatatttgttttagatgttttaaatagttgcaatggattaaaaatgatgatttaaaatgttgcttgtaatacagttttgcctgctaaattctccacattttgtaaccctgttttatttcttggggtgtaaagcgtttttgcttagtattgtgatattgtatatgttttgtcccagttgtatagtaatgtttcagtccatcatccagctttggctgctgaaatcatacagctgtgaagacttgcctttgtttctgttagactgcttttcagttctgtattgagtatcttaagtactgtagaaaagatgtcacttcttcctttaaggctgttttgtaatatatataaggactggaattgtgtttttaaagaaaagcattcaagtatgacaatatactatctgtgttttcaccattcaaagtgctgtttagtagttgaaacttaaactatttaatgtcatttaataaagtgaccaaaatgtg

SEQ ID NO: 359429 - DNA, 785 bp, Homo Sapiens
  misc_feature (117)..(117): n is a, c, g, or t
  misc_feature (762)..(762): n is a, c, g, or t
  misc_feature (765)..(765): n is a, c, g, or t
ccagcattgggctgggctcgccacatcccatgagagtagagggcactgggtcgccgtgccccacgcaggcccctgcaggaaaactgaggcccttgggcacctcgacttgtgaacganttgttggctgctccctccacagcttctgcagcagactgtccctgttgtaactgcccaaggcatgttttgcccaccagatcatggcccacatggaggcccacctgcctctgtctcactgaactagaagccgagcctagaaactaacacagccatcaagggaatgacttgggcggccttgggaaatcgatgagaaattgaacttcagggagggtggtcattgcctagaggtgctcattcatttaacagagcttccttaggttgatgctggaggcagaatcccggctgtcaaggggtgttcagttaaggggagcaacagaggacatgaaaaattgctatgactaaagcagggacaatttgctgccaaacacccatgcccagctgtatggctgggggctcctcgtatgcatggaacccccagaataaatatgctcagccaccctgtgggccgggcaatccagacagcaggcataaggcaccagttaccctgcatgttggcccagacctcaggtgctagggaaggcgggaaccttgggttgagtaatgctcgtctgtgtgttttagtttcatcacctgttatctgtgtttgctgaggagagtggaacagaaggggtggagttttgtataaataaagtttctttgtctccnganatggaagccatcaacaacca

SEQ ID NO: 359430 - DNA, 942 bp, Homo Sapiens
ggctggtccggtccggattccctggatcgccggggacagaggcctgcccgggcgcggccagccccggccctgtggctcggagtgctgcccccgtgccccctggtctctggtccggacactcctagagaacgcagccctagagcctgcctggagcgtttctagcaagtgagagagatgggagctcctctcctggaggattgcaggtggaactcagtcattagactcctcctccaaaggccccctacgccaatcaagggcaaaaagtctacatactttcatcctgactctgccccctgctggctcttctgcccaattggaggaaagcaaccggtggatcctcaaacaacactggtgtgacctgagggcagaaaggttctgcccgggaaggtcaccagcaccaacaccacggtagtgcctgaaatttcaccattgctgtcaagttcctttgggttaagcattaccactcaggcatttgactgaagatgcagctcactaccccattctctctttacgcttagctatcagcttttcaaagtgggttattctggagtttatgcttggagagcacacctatcttagtggttccccaccgaagtggactggcccctgggtcagtctggtgggaggacggtgcaacccaaggactgagggactctgaaagcctctgggaaaatgagaaggcagccaccagcgaaaggctagggtctcgggactaagccctacctgctctcccaagtctcagtgggcttcaatctggtcaggtggggatctgtcacaccccagcccatacctaatctcctctgtgctgggggaaaccaacagggaatcaagaagctgcccctcccttggtcccccccaccttatgttgcccaactggttggtaaactagggcttccaaaaaaggttggccccccagggggcttctggaacaggaaagccaaa

SEQ ID NO: 359431 - DNA, 1027 bp, Homo Sapiens
tctccaatgtagatgatgatccttgctctgactacatcaatgccagctacatccctggcaacaacttcagaagagaatacattgtcactcagggaccgcttcctggcaccaaggatgacttctggaaaatggtgtgggaacaaaacgttcacaacatcgtcatggtgacccagtgtgttgagaagggccgagtaaagtgtgaccattactggccagcggaccaggattccctctactatggggacctcatcctgcagatgctctcagagtccgtcctgcctgagtggaccatccgggagtttaagatatgcggtgaggaacagcttgatgcacacagactcatccgccactttcactatacggtgtggccagaccatgggagtcccagaaaccacccagtctctgatccagtttgtgagaactgtcagggactacatcaacagaagcccgggtgctgggcccactgtggtgcactgcagtgctggtgtgggtaggactggaacctttattgcattggaccgaatcctccagcagttagactccaaagactctgtggacatttatggagcagtgcacgacctaagacttcacagggttcacatggtccagactgagtgtcagtatgtctacctacatcagtgtgtaagagatgtcctcagagcaagaaagctacggagtgaacaagaaaaccccttgtttccaatctatgaaaatgtgaatccagagtatcacagagatccagtctattcaaggcattgagaatgtacctgaagagctcctggataaaaattattcactgtgtgatttgtttttaaaaacttgcttcatgccctacagaggtgccagctatttctgttgatactatgtataatttattaatctggagaatgtttaaaattttatataatttaaaggtaacagatattattgtacatagttgtattttgtagtttcttctgtaaatatgtatttttcataatgtttaatattaagctttatataatactatttttccacactaaaaaaa

SEQ ID NO: 359432 - DNA, 859 bp, Homo Sapiens
  misc_feature (749)..(757): n is a, c, g, or t
ctcccgcacgtgttaccccagttactactctcaagaacgcaaagtgtataatatattgctataaaatttctttctgaaggtttcagtgttgactggtgagctcttggagtgctcatgtttgagatgatgccaggaaggtctccatttgatattgttgggagctccgataaccctgaccagaacacagaggattatctcttccaagttattttggaaaaacaaattcgcataccacgttctctgtctgtaaaagctgcaagtgttctgaagagttttcttaataaggaccctaaggaacgattgggttgtcatcctcataacaggatttactgatattcaggaacaaccgttcttccaaaatgttgattggcatatgatgcagcaaaaacaggtggtacctccctttaaaccaaatatttctggggaatttggtttgcacaactttgattctcagtttactaatgaacctgtccagctcactccagatgacgatgacattgtgaggaagattgatcagtctgaatttgaaggttttgagtatatcaatcctcttttgatgtctgcagaagaatgtgtctgatcctcatttttcaaccatgtattctactcatgttgccatttaatgcatggataaacttgctgcaagcctggatacaattaaccattttatatttgccacctacaaaaaaacacccaatatcttctcttgtagactatatgaatcaattattacatctgttttactatgnnnnnnnnnttaatactactagcttccagacaatcatgtcaaaatttagttgaactggtttttcagtttttaaaaggcctacagatgagtaatgaagttatcttttttgtt

SEQ ID NO: 359433 - DNA, 1039 bp, Homo Sapiens
tgtgtttgtgtggtgctcacaggtggtgcccgtgattccgacctacgttaatttttgaagttcattctccaaaagtgggctttgatcctgggttttccgcggggtaaagtgaaagtgattgatgtaccgtttttgtggataatttacattggtcctcggatggttatcccatacaaatgtcaggggttttctgccatcaacaaatggagatctacctgcccaattgtgatcatttaaaactggtttccttaagccatttcccaaagtacaatgatgattatagcttaccaacatagaagtcagaagtacaccaattagtatggcagctattgaattataattgtttttttgtgggtttgtttgttactggtagtatctaagataaatcctggtgtactcctaggtgaatttttgacagttgatgttggttgtgtggatggattatgaacagttatttgttttctagaagggatctggacagatgatgattgttgagtaaaagtatagacaaatgactttggtgattgtctggtagaagtacgggcagatggtagttgtctggcagaggtgaacacggcttgctgggaggaggtgttggctattggtgttggttgtttggtgttgtaggcaagtggttgtccagcagaagtatgtgcttctggtttttcagaagaggtatagacagctggtgttggttgtccagcagtgactttggcaggtgatattgattgtccagaaaaagtgtcgctgaattgtgttggttgacccaaaggattccctgttgtgttttgagaattaaccaatacctgtgacattgatgatgtgaataaggtaggctgtgactgcttctctgttgtcaattgtctctgtctttgaaaaaaatgtattgttcaggtgtccacaaaacaaaattaagatgaaatatcttgggatccatttcagaatatttcctcgttatctcagctgttaacttcttttgcagaatgctaaattcttgttctaactggacattttggtgatttggctaagaaaaaagccc

SEQ ID NO: 359434 - DNA, 821 bp, Homo Sapiens
  misc_feature (231)..(231): n is a, c, g, or t
catgaaccaaaagcatctgcctgcgcttcatcaagcacacataccagacggagcctgacaggactgtggcagagaagcggggccggaagatcaccctgcggcaggtgtttgacggcctgcacatggacccctacgacctcactgtggactcactggatgtccacgcgggccggcagacattccaccgctttgacaagttcaactccaaatacaaccctgtgggggccagtnagctgcgtgacctgtatttgaaaactgaaaactatctgggaggagagtactttgctcggatggtcaaggaggttgcccgggagctggaggagagcaagtaccagtactcagagccacggctctccatctacggccgcagtcctgaggagtggcccaacctggcctactggttcatccagcacaaggtctactctcccaacatgcgctggatcatccaggtgccccggatttatgacatatttaggtcaaagaagctgctgccaaactttgggaagatgctggagaacatcttcctgccccttttcaaggccactatcaacccccaagatcatcgagagcttcacctcttccttaaatatgtgacggggtttgacagcgtggatgatgagtccaagcacagcgaccacatgttttccgacaagagcccaaacccggacgtctggaccagtgagcagaacccaccctacagctactacctgtactacatgtacgccaacatcatggtgctcaacaacctccgcagggagcgcggcctgagcacgttcctgttccggccgcactgtggggaagccggctccatcacccacctg

SEQ ID NO: 359435 - DNA, 822 bp, Homo Sapiens
cagcggccggttgggattgaaggaattgcctgattttcttttcccctttcccccagccagtgtggaccatgaaagggggctgggggcggaagactggaggccctcccctctaactcataggagggcaaaccaaaccagctcgggctgaaagtccctgcagggaattcagcaccagggtggccctttgttgtcagatctcggctcaagtttccgtcaggaaccatgaccacctgcatcccagctgccagggccgcctccaccccattgggagcatcttcaaagacaaggcacttctccatagcaggagggggagagaacctcttggcacaagctaggaagatgtctgggtctggcttgccatgctgcacttcggggtcatctcccagcacaatgtgggaaaacaagctgaagaactccttgtggcggcttgtcttcatatcgaacgatgcggaccccgagctggtggctagtgcaaaggggatgccatgtttccgcaggtggatgatgagtttctccgcccctggcatgagcgcagccatggggaacacttcctttaacttcgtttggctttcttccaccagctcctctttggacatcgggagctgcaagacgtctattataatctgtgccgcctctaatgccttcttacccataaccagggactttacatcccagctgtatttcttgtcatagcgattacatatttcttgaaacaccactgaatacagccgttcagtatccagaagaagtccgtccatgtcaaagatgaggtgggtgacgggctgcgggggcgccgccatggtggcgccttctgggtctccc

SEQ ID NO: 359436 - DNA, 2841 bp, Homo Sapiens
  misc_feature (132)..(184): n is a, c, g, or t
gttatttttttaaaaaatgctgtttcttcctccctaggacaatccaatttttaggaggggcaggagattaagtccacccattgttcccaccagcccctgggcacacagtaggtactcaataaaatatatgtnnnnnnnnnnnnnnnnnnnnnnnnnnnnnnnnnnnnnnnnnnnnnnnnnnnnngggatggatgtgacccagctgaagtgtgagtaggaacattctcttattatgggtggaggaaagagagaggagattgagaaaataagataaaatccattgatgcgcatcatttttggtgttcgaaaagtaggattgaattaggactaataaatctagagaattttacctctttcaatgcccaagccacacttttctatcactttgaaaccgaaaaagtaaatactttcccaacatttgctttgctggtaggaaatgctttaataaaaatgcaatctctaagttgccatggcatcattaaaagaaaggatgtcatgcccaggtccagaacttgaaggtggcaggcaccagcaagcaccatagctctgaatgggcctgccttacaggtcctcactccaacactgctcacttcttccagcttgaaaatggagaacatgttcacaccctgggttgtaagtaggaggaactctgatcagcaagaagcttgcagaggacaatatgaggcaatagtattttactggccacagtgtgactgggttgcactctgttctgacattaggaagaatttcatgcctgggcaaagtcaaagttttttcctttagtcacattactcaaagaataagttgactatatcccaacagcacttgtccaaattccaggactccacttacgactattatgaggcaaacatctgcctgtgcagtttgtctttccatccagtctattctttggggtccagatccttgatcattctcacacccagtgctatctgcctcattgcccagcatcaggaagcaaggagtatggtgcaataagacaaccacctggccatgggatcaggaatggggtcaggtcagttgacctgagcatacccattaaacatgttcaaatgtccccatcccacccactcacatgacatggctcccgagccctgagatctgtatcccaagaacctcagttgagaaatatttatggcagcttcactgttgctcaagagcctgggtattgtagcagcctgggggcaggttgtccctaatgttctccaagttcttcacatcagccagaatcccatctatgcttgtctccagcaaatggaggtggcccctctgctgacgtgccctctcttccagctctgacatcatgggccgcagttggctgttgatctgggtcttggctcgggaaaagcttctgctccagtaagaccagcccctcttcatctacactgagaggctggtccatcagatgcaggaggccgtctaatgtgttgagtgtgtcttggattgtaaccccagcgttcttggctctggtatcaaccttctgggcttctgtaatcaccatctgtactgcatccatattcgtgtcaaactccagctccttcctttccagctctccttccacttccctcatctcactcttcagagaggccagtcccttttccatggccaaggctccatctgctgtcacattggcttccaagttcagactcccaatctcctgttcaatctcactggagatttccagggcctccccggccccattctttgccctctgtgcatcagcagcagcgctccccagggctctttctgcttgctgggtcttgtcactggcatctgaaaccttctggctgatgtaggagagtctcttcatggcttcttcagcttctgcttttctgttgtccacctgcaggtcaaactctctgaggtttttaaggatgctctcaacttcataaaaagtggcattgcccatactcagtgcttcttgtgctctgcttttagcaagattggcacgggaaagcagctgatctgatttctctctcccactttttccattctgtaagagctgctgtgcttcttctttccagtttcccagattcttttgtgtacgcttgaactcatccatatgcctggttaccaggcttgagagtgaatccgctttttgtttgatcctcttgcttcttccacctgaaaggactgatcactgactccttgaagccgagacactgaatccaggaggcggagactgtgctgataagacctatctgcttcaatttccgcttgagtggcctcccttgtcaactgctgggccagggacttggttttctccaatttttccacaagcccttgcaccacagcaccgtccgggctaccgcttccgcttccgactccttcatgcagggccttgcgcaccagtgagagggcttgtttggaatagtcctcagtttcccttgtcagttgctccatgttactggctgactcaacgtggctttctgctaatcttgtggcctcctgagccagacttttaaagccatttggccccacgtagtggtctgaggcaggaatgttagtgtttcccaaggaagcttcactttctgccaggctcagctgcatctgagtgatgagcctgtgagtatcccgaactcggttctggtactgacttcccagagcccgaactctttccacagtcatcttgaggtcatccaggcggctctggtagctgttctcttggctcctcaccttggccaactggagaccaagggatctgctagcaccttctgaaatctgggcatctctcagaatgtcctgaagggcctgctcagcctgctgcatcctgccttccagctctgtatcaggtactactccatcaccaccctgagcctttga

SEQ ID NO: 359437 - DNA, 734 bp, Homo Sapiens
  misc_feature (562)..(562): n is a, c, g, or t
  misc_feature (617)..(617): n is a, c, g, or t
  misc_feature (656)..(656): n is a, c, g, or t
  misc_feature (694)..(694): n is a, c, g, or t
  misc_feature (702)..(702): n is a, c, g, or t
  misc_feature (721)..(721): n is a, c, g, or t
ggtgatggagtacgtcaccgggggagacttgatgtaccacattcaacagctgggcaagtttaaggagccccatgcagcgttctacgcggcagaaatcgctatcggcctcttcttccttcacaatcagggcatcatctacagggacctgaagctggacaatgtgatgctggatgctgagggacacatcaagatcactgactttggcatgtgtaaggagaacgtcttccccgggacgacaacccgcaccttctgcgggaccccggactacatagccccggagatcattgcctaccagccctatgggaagtctgtcgattggtggtcctttggagttctgctgtatgagatgttggcaggacagcctcccttcgatggggaggacgaggaggagctgtttcaggccatcatggaacaaactgtcacctaccccaagtcgctttcccgggaagccgtggccatctgcaaggggttcctgaccaagcacccagggaagcgcctgggcttcagggcctgatggggaacctaccatccgtgcacatggctttttccgctggattgactngggagcggctggaacgattgggagatcccgcctccttttcagaccccgccctgtntggccgcagcgcgaggaatttttgacaatttttttaagngggcgcgcaggtttgaaccctttcagaccgttaattcntgggcagnattgaacagggcgattttnaggggttttaatt

SEQ ID NO: 359438 - DNA, 582 bp, Homo Sapiens
  misc_feature (428)..(428): n is a, c, g, or t
  misc_feature (554)..(555): n is a, c, g, or t
atatacctaggccgggagagggagaacacagttggagaaaatcggcagctgagacggccttggccggacttagcactcaggcctgtgaatcaggagatacaaagacctccaaaaaaggaccagttcctcggatgtgccccctcacagagagatgaaggggcagcagaaaacagctgaaacggaagaggggacagtgcagattcaggaaggtgcagtggctactggggaagacccaaccagtgtggctattgccagcatccagtcagctgccaccttccctgaccccaacgtcaagtacgtcttccgaactgagaatgggggccaggtgatgtacagggtgatccaggtgtctgaggggcagctggatggccaaactgagggaactggcgccatcagtggctaccctgccactcaatccatgacccagngcggtgatccagggtgctttcaccagtgatgatgcagttgacacggaggggacagctgctgagacgcactatacttacttccccagcacggcagtgggagatggggcaggggggtaccacatcggnngagtacagccgctggttgttactaccc

SEQ ID NO: 359439 - DNA, 1185 bp, Homo Sapiens
  misc_feature (675)..(675): n is a, c, g, or t
ggcctgggtggcgaattcggcacgagggaagaatgagctgatctcccaggactctgacagcgactccgacgatgaatgtaataccctcaatgggctggtgtcggaggtgtttatccggttctttgtggagaccgttgggcactactccctctttctgacacagagtgagaagggagagagggcctttcagcgagaggccttccgcaaatctgtggcctccaaaagcatccgccgctttcttgaggtttttatggagtctcagatgtttgctggcttcatccaagacagggagctaagaaagtgtcgggcaaagggcctttttgagcagcgagtggagcagtacttagaagaactcccagacactgagcagagtggaatgaataagtttctccgaggtttgggcaacaaaatgaagtttctccacaagaagaattaagcctccttctcagtagcagagtccagtgccttgcagagcctgaagcctggggagaaggcccagcctgggaccctctgggctgctgtggctcctctgcccccacagatcctatcctccaagccagcccacctctgccttcatcatatcccaggatactgtttgtaaataatctgctgtaagctttcttaactgttttttgtaacaagcaaagagaatatggcaaatatttgtatattccncaaggggccggggtgctttcctgtcctgccagagcatggatgaagtttcgctgggtgctcgtgactggccagttttgtgcagctgactgtctcagccaaaccactgatcttccctggaggccttcggccctgcctgcctgcctgaggtccccgctgccagtcccgggccctggagagcagatgctgtcttgttatgtacaggaggaccttttaaaaaaatcaagtttctattttttgctggtagtccgcatacccataccctctgtttttgaaaggcaaaggccaatcagtccccatttgtagcatggcaccagggtcttaggcctagtcctctcattcctcccaccctccgagatggtcagtgtgtcatgggaagcccacccccagctctgccagtgctctctgggcctggctcccagtcagtggtggccacgatgcggtacagggcatccctccttcccatctacgggtgttctcaataaacaatgtacagttgtttgggcccagagc

SEQ ID NO: 359440 - DNA, 498 bp, Homo Sapiens
cagagggctggctctgatcccacaataccctgagccgaacatccagacccctctcaggcagcccagcactttctgagaggtcaaagtctggaccatcagcctctttgatttgaaaaacccctgaggagcagctcaggcctggcactggtcccctacagagggcctctgccctgccactaatgccaaatcaagccatcaacccgagctttcaaaggccaggaaggcctcacctcagcttaaagacgtgcttcttcttcttgtagttggcagcaatctcacagatggcatgtctcagggccaggggttcctccccatggtagggcatccccagggccaggttcttggcatccttgtagaaggttagctcactgttcctgagcacacagtacaggttgttccaggacctgcaaagatgcagacaggcaggtcacccacatcctgatatggtatctccacagtcaattcctatagcttcaccattaaaaaaaattacaccaa

SEQ ID NO: 359441 - DNA, 349 bp, Homo Sapiens; identical to SEQ ID NO: 264481

SEQ ID NO: 359442 - DNA, 1118 bp, Homo Sapiens
  misc_feature (183)..(183): n is a, c, g, or t
ggaatgtttcaaagttcagcaggtccatgggaaaaatgggggtgatgctcgacagagaggccatgaagcagaggaaagcaggggtcatgctgtggaaaaggaatcctttaccggagaaatgcagaaaaacatgtactacttctcagaggcttgctctgactctcaatgcttgggaaagtggcnactgcccccacagacagccggttacgacctgaccagagactgatggaaaatggacgctgggatgaagcaaatgcggagaagcagcgcctggaggaaaaacaaagactttccagaaagaagagagaagcggaagctatgaaagccacagaggatggcacaccatatgatccctataaggcactgtggtttgagcggaagaaggaccctgttaccaaggagttaacccatatttataggggagaatactgggagtgtaaagaaaaacaggactggagctcatgcccggacattttctgaaacggcagtaacaaaaaagaggagcatataatggagaagaggacagaggatgtgtgggaaagctggaagttgtgactctcttaccaagtgctttcctcaagtttgtctctcttgaccaatcattttttccaaatcaatcaccagaaggagacaccagtggtggtgattggctggttgccttagctgattgaaactgaaatcgacataggagatactatgtctgtaagggagaggtttagtggccgaaggttagtgttattccacatccacgaagtcaagtattcttggctcttctttctccctctgcccccatttaagacaatgtcactcaccctccccttgtagtatcctgctcagccaagatctgcctaagattatgattcaggggcattttggtgctgttaaaagcaagagccgaatttagaaatttcccttcaaaagaaccacatacgactttccaactggaggcctttgtggaatgggctgcaagtgggagccttaaggttaaaacattccatccacgtggtggtttcacaacgccggggggttcgggtttttaattggggaaggtggtcccaccgtcggggagaaataaactgggcgcgaaatattgttgggaaacaaccccctggggggga

SEQ ID NO: 359443 - DNA, 502 bp, Homo Sapiens
agcattcgatctcggtaccccacctataggggcatggacctcgggagcaacttttctctggaggcgcggagcatgtttccaatcccctgtaccacctacttgccccccagagccaccctgcattgggcacaattgtaatttaagagaatttctttaaaacgtgaaatcaatatttagatgcagacttcaagcaatatagagcattggtttgtgagaatggcatcattctgctgggaaaaacaaagcccagctttggcagccctgatgggagagatagaccttgcatctaccaaggtggaaggcggggaggatgctgtctggaaagaatgctagatatgtgtgcatgtgtgtggcaggaggctctgggctcataaactgtctggctacagggaaggctggacctgatttcctgaccacaggctcttgaagtccccatggtcttgctgacagaggcccctagagtaaaaggagcaggctggaattgttcaggaaaatgttcttc

SEQ ID NO: 359444 - DNA, 961 bp, Homo Sapiens
  misc_feature (149)..(158): n is a, c, g, or t
cggcccctggggatgggggcagggccctcctacctcactgtgatcttcgaccctggcgacacaggacagcccacacagaagcacgcccaacacacttaaagctttgctcccaactaaatcatttagtttccccttgaagaaataactgnnnnnnnnnncaactctggtaaaacaaggctaaaaaccagcattctgcgtgttgcataacaaaaccgaccctttacaagacacggtaataatgcccgctgacggatctacctacggcagaggtgtggaatccatgcacacagaacaaccgcaaagaaaacaaaagcaaagaaaattccaaacaaacgctgcatatacatgatgtcccttttgcattgcactttagaaggggtggggggcttcagcagcaaccaagacccccctcagtaaaccaagggcaaaaccccgcaggcaattccgccacccagatgcgagggctcagcagtctctggtctttgctcgtcactgccccgaggtcgtctgtacctgggcaagtaacctccaccttctgtgagcgcgtgcagctgccgcgggtgttagaacggattcaagcaaagaactcctgtaagatcttcttatgtaaataaataccgtaactgtaggataggtagccgcctcttgtctactgggaaatcatttttcaagcttgggcataagaaaccttatacaatttgcataaacaggtgagagtaaacgagattatttggaataaatgcaaggaacttattctgagagtggcagattcagtcgctactgaagacagatatcttgggggtaaaaagacacgagtcaggatttgctgtacaagatgctggaaggcacagaacgacccccgaagttcagtttttgcattttcgttttcttgtgattcccttgttcaaccaagcaccagagggggtttctaagcactcgagcacttcggatttgactgctc

SEQ ID NO: 359445 - DNA, 1207 bp, Homo Sapiens
tacggtgggctattacgggggaaaagcgtggtacgtttagtcaagtgcgttatctcggatatcgatgatctggggtcttttggaaagacctgttaggggggcgacgggccatttgtcttgcccaatacaagccatgttctccgcgtgggaatggaggtaaaatccggcagatacacataaagtgtgcgtgggttccgctggggacggcattcaaatcgggcagcctatgcgggtggcaagtgttgtgtcggggtaaatgtttataccctcgttttgggtgctcaggttatagggactttgcctggccgcgtattgcaagggtggaggtgcaattgcgcgggtaaaatgggagggcgcttaagccaatgacgtcgttatcgtagagaaccccaggatatctgcgggcagtcgaccgtcgtttgtgaagttgttccaccattccagggatccgaggttgggtctggggagaggccaccgggactcgccgcccttcgcgggcagggagcctaattgccaaaaatcctcccgggaacaccccacctggactgctgcgagacgggcctccacccacctccccggacccgcagcgccccccgctccctcagggttctggggtgaaggggtctgaatagcaccaggggaggcggcagggcgggcctgtcctacctgcgcccgagcactgctgagacgacatcccttccagcgccgccacgtagtccagccccagccagccgcggtaggtggttttctctccgacaggcaccgcccggacggtggcatccttgaaaagcaggtcttggccatgatagttggaggagtcgaacattttgaacccgttcttattgtggtcgtcctcccaaaccggtcctggaagccccgcaggcagaagacctgcttcctcactggggttcggcaagggtcacccctccctgttgccgcttagcctgcgaattgtctttagtaccgtggaccccaaagagccaagtcattttccgggggcccccgcctcttcttgaatgggaaagttctaaagcgttgcgcattttattgggccttgctgttaaccttaaacgggttgtgggggaaaatatatgacccggcagggactcattgggaaagaaggcggttcaaaaaaataagtggccggggggttctacctaccctgggtgagcaggtcttctagaggctgagtttgggtcgcacggat

SEQ ID NO: 359446 - DNA, 719 bp, Homo Sapiens
  misc_feature (626)..(626): n is a, c, g, or t
  misc_feature (665)..(665): n is a, c, g, or t
  misc_feature (681)..(681): n is a, c, g, or t
ggtgttcagcatgccatttctgactggcacatctcgtgaagtttcatagaaacaaggagttggcatcttggatctcagaatggcctggaaacggatggcctctacgctgttccatcacagtctccaactaaggcttatggtatttcattaaactgttgcatacccagttagcacagtaggtggggagtctgcttcatttctatcattccatttttctgattaaactgtcaaatctgtcattgcatatgccatcgttttctagcaaaatcccatgattggctataaacgttttgtaagaagtcactctccttgaaaatactgaacatagctgtataggtctgtgattattagagaatatgttaataaaacttcttgtaacggctaactgccacctaaaatatgctgggttttctgttgtttgagtgtgttagagaaatttgaatgtttttgtcagttacgagtcagccgtaaattagattagtttaaaggacaggtcaggatttagaggaagagtttgtttttgtgttttgttaatgtcctgagtgatttttaaaagtattttacaaaaagatattggaaaatttggtttgaaggcagagtttagtaattaagttagaattaagagntttgcggaggttaaaaaaatgtgcctcgtggatctcccngttttagtaacatggngagaaaagtctacacggaaaagtggacaatttaatgga

SEQ ID NO: 359447 - DNA, 633 bp, Homo Sapiens
  misc_feature (203)..(203): n is a, c, g, or t
taggaaatagggcacagccatgggaaagttgctattccctcaagaactttttaaaagctagatatgtttatataggctcccataaattccttaggagttcctgccaaaataatggacccccagactccagctttttggaaattgggagtttctgaagccagtccctttccctccctttgggttaaaggagggctgcaacaaanccagaggcatttcccaagtgtacagaggaaggtgatgttctcgcatgcgcagataaaaaaggacaggtcagtctaaatcattcttatagaggaatgagaagttaagagaaggacaaggaagcactgtgagaaaacatcagggctgagagagacatttgggaaattaaagtttaaaaatccactgccatttcatccagcagagtgcaacacattcacaagtgcaaggaatactgggtagtttggtttaaaacaaaaacaaaaacacctcccatacaagggccaatttttcaccccatccccaacctctaatttttcaaaaaggttgtttactgctatacaatcccagaaacacatcaaccaggctcagtactcttaaaagtcccaacccacttagacaataaaaaaatagaaatcactccccatgattttc

SEQ ID NO: 359448 - DNA, 1123 bp, Homo Sapiens
gaggcttccggttctttattccggaagttgctctcagaggcagcgtgcgggtgtgctctttgtgaaattccaccatggcgtaccgtggccagggtcagaaagtgcagaaggttatggtgcagcccatcaacctcatcttcagatacttacaaaatagatcgcggattcaggtgtggctctatgagcaagtgaatatgcggatagaaggctgtatcattggttttgatgagtatatgaaccttgtattagatgatgcagaagagattcattctaaaacaaagtcaagaaaacaactgggtcggatcatgctaaaaggagataatattactctgctacaaagtgtctccaactagaaatgatcaatgaagtgagaaattgttgagaaggatacagtttgtttttagatgtcctttgtccaatgtgaacatttattcatattgttttgattaccctcgtgttactacaagatggcaataaatactatgggattgtttgtattaaaaaatttacattgcttcttactattcagcagtagaaactttttacacagtaacaccattcgttgttggtatttagttttctgaagggtcgcagttgccttgagcacttggtattcgcagagcttggacctgtagattttgaggcagattaggaattctgcctgatgggtaagcttccagtattgggaggtggagaaggggagggttcagaaaaataaataagagttattgcactaacaaaagtcttcatcacttgtagttctggatgctggaataccagagtttctaacctaaatacgttgggtacattatttaatgggggtccagtattgctcaacactctcattgagtcactgtgaaggtcctttgtgaattttatcgctaagatcccaaagtggaaaaagattttggatataggggaaaagaaggaagtgccctttcaggtaccttaaaaccccgttaagagttttccgggaaaaagaatgaaaattggtaaacctgaaaagggacccccagccatagcctgtgaaggccaaattggttaggccaaaataatgggctatcttggaaaaaaaccacccgggcccctcaaatgctaaaccccctaagaatgttggctccct

SEQ ID NO: 359449 - DNA, 465 bp, Homo Sapiens
  misc_feature (23)..(23): n is a, c, g, or t
  misc_feature (54)..(54): n is a, c, g, or t
  misc_feature (70)..(70): n is a, c, g, or t
  misc_feature (176)..(176): n is a, c, g, or t
  misc_feature (198)..(198): n is a, c, g, or t
tctcgaaaatccctgaacctcangttgatcccaacctgcccttggccctccccnaaaagcactgggattnacaagcaatgagcccactgtgccccagccctgttcccactgaacatttcttagacattcagcaaaaccccccaccttaacctcttttctttccttgagggttggtncctgtccccacctcccaccctncccaccccctggaagaggaagggcccgggcatcagtggctagtccaaataaaatatgggcttggggatggaatgggtggtggtaagttcacagagtgtagttagatcccaactcccatgacctctggcttcagtggtgggtggggcagggcagatgaaagggcttcagtgggaacctctgagagcattttcctgttccccctatcaaccgcccccagtgataacatctgtgaagccagccattactcaataaactgcaaacttgtct

SEQ ID NO: 359450 - DNA, 445 bp, Homo Sapiens
  misc_feature (363)..(375): n is a, c, g, or t
  misc_feature (432)..(432): n is a, c, g, or t
atgcgaacagaatttcgatgcctatgtgagcaccctcaccgacatgtactccaaccaggacccggagaacaaggacctcctggagagcatcaagcaggctgtgaggggcatccaggtctaggccgtgtggtacccagaagtgtcccagcccaccacaccgtttacctccctcgccctgccccgcaccgtggggatgcccaactcacagtgacttcccgtttggggcccggtgtggccgcgggcgggtttatccaaagggatggctggaaattggccgctcccacgaggctccctccaggcttggggccgtggtggcctgattctgtgtgcataggggcactgaagaattacaaagtgatttannnnnnnnnnnnnaaagaaatctgaagagcagctcaaagtctccagtggaagctcatgggacaaggtttnttcagggaatttt

SEQ ID NO: 359451 - DNA, 519 bp, Homo Sapiens
  misc_feature (124)..(124): n is a, c, g, or t
gcatggtctgccctctgcatcctctggagccagccgagcaggaggcctaggagggtcctctgagactccagacctgaggcgagaagggctgcttccctgaagctcccacagtcccatctgcttncaggcccccgccttggcctgtgttcttcctggccgcctgggtccaatgctcaggtgctggggcctggttcccggagaagtgtgccttctctctcccttttcagggaccgccccctgtctctcagggccaggcctctccctcctccaggaagccttcccctaccccttgtcgcccctccctcccagagcacctgctgtctgggtggctcactcagcacttggtgtggccttcccttctacctagcgggatggggctcccccaggggctgtcccggaggcggtgggcctggttaaataaggcagggtttatatgcactttcttccgatctgtacctgagaggtttgtggaaaagatggcaaatggggaataaaaagattttgtgtcaacagaaaaaa

SEQ ID NO: 359452 - DNA, 437 bp, Homo Sapiens
aaaaatccccatctgcctttcaagccccccgccttggccctgtgttcttccctggcccgccctgggtcccaaatgctcaaggtgctggggccctggttccccggaaaaagtgtgcccttctctctcccttttcagggaccgccccctgtctcctcagggcccaggcctctccctcctcccaggaagccttcccctaccccttgtcgcccctccctcccagagcacctgctgtctgggtggctcactcagcacttggtgtggccttcccttctacctagcgggatggggctcccccaggggctgtcccggaggcggtgggcctggttaaataaggcagggtttatatgcactttcttccgatctgtacctgagaggtttgtggaaaagatggcaaatggggaataaaaagattttgtgtcaacagtagagaaaaaaaa

SEQ ID NO: 359453 - DNA, 335 bp, Homo Sapiens
  misc_feature (21)..(21): n is a, c, g, or t
  misc_feature (25)..(25): n is a, c, g, or t
ccaaggtacaatgttaaaggnatantcactttacctagcagggaaaaatacacaaaaactgcagatacctcatatagcccattttaacttgtataaactgtgtgacttgtggcgtcttataaataatgcactgtaaagattactgaatagttgtgtcatgttaatgtgcctaatttcatgtatcttgtaatcatgattgagcctcagaatcatttggagaaactatattttaaagaacaagacatacttcaatgtattatacagataaagtattacatgtgtttgattttaaaagggcggacattttattaaaatcaatattgtttttgcttttt

SEQ ID NO: 359454 - DNA, 635 bp, Homo Sapiens
acccgacccgctctcccagcctgtgctcctttccctcatccagcagctggcatctgaccttggcactcgaactgacctcaagctcagctacctggaagaggccgtgatgcacctggaccacagtgaccccatcactcgggaccacatgggctccgttatggcccaggtgcgccaaaagctttttcagttcctgcaggctgagccacacaactcacttggcaaagcagctcggcgtctcagcctcatgctgcatggcctcgtgacccccagcctcccttagctgctaagcctgccttgcccaggggtgggatggcactgaaggccagcagacaggcctaggctggggcagggtcacggctggcctttacctgctcaggcccccatctctggggtgtttgggggtcagggagcagggagcactggccgtggtctacagcgtgtggtagtcagaaggtttagctgggcccagggcaggtattgcgcctgcttgggttctgccatgcctggagcatgaccctgagatcgtgacaccacttgagtggaattttccatgttcctttttacctctaatttggatctttttgtttttgaaaaacattgagaaattcaattaaatgcttttggaataaaaaaaa

SEQ ID NO: 359455 - DNA, 418 bp, Homo Sapiens
  misc_feature (331)..(362): n is a, c, g, or t
agcaatatcctttgacaactcaggaatccagtgacaggaaacagagcatgcctcgagaagggcatgggcgattcctgggggacagaagcctcccgcacaagaagacccatctacggaggaggtcttcacagctcaaaattaaaatacctgatctaaccgatgtgaatgccatagacagatggtccaggatcgtgtttccattcactttttctcttttcaacttagtttactggctgtactatgttaactgagtgactgtacttgatttttcaaagacttcatttaacactgagtgaaatattactctgcctgtcaagtttttatacctgtnnnnnnnnnnnnnnnnnnnnnnnnnnnnnnnntatatacatacgcaattgtatatatatgtggaactttctcagcatatatataaaat

SEQ ID NO: 359456 - DNA, 527 bp, Homo Sapiens
  misc_feature (162)..(192): n is a, c, g, or t
  misc_feature (392)..(405): n is a, c, g, or t
  misc_feature (411)..(411): n is a, c, g, or t
  misc_feature (516)..(516): n is a, c, g, or t
catagacagatggtccaggatcgtgtttccattcactttttctcttttcaacttagtttactggctgtactatgttaactgagtgactgtacttgatttttcaaagacttcatttaacactgagtgaaatattactctgcctgtcaagtttttatacctgtnnnnnnnnnnnnnnnnnnnnnnnnnnnnnnntatatacatacgcaattgtatatatatgtgaactttctcagcatatatataaaatacacgtgtatatgaggatgtatgtgtatatgtttatacacacaggagtcagtgcccatgtgtatggaagacaaatacacatacatatatacattttgcagctatggacaatttaccacaggatgcatattaaagaaagtcatagnnnnnnnnnnnnnnaattgnaaagggacaagtatccatctaaatattatgccttgaggaatgagggcgtgaaacacaatatcatccccaaatgtgtcttgtatttatccatagttaggtgttttngttttaaaatt

SEQ ID NO: 359457 - DNA, 812 bp, Homo Sapiens
  misc_feature (618)..(630): n is a, c, g, or t
gtcccagctggctggggactgtcttgggtttaaaactgcaagtctcctaccctgggatcccatccagttccacacgaactagggcagtggtcactgtggcacccaggtgtgggcctggctagctgggggccttcatgtgcccttcatgcccctccctgcattgaggccttgtggacccctgggctggctgtgttcatccccgctgcaggtcgggcgtctccccccgtgccactcctgagactcccaccgttacccccaggagatcctggactgcctgactcccctccccagactggcttgggagcctgggccccatggtagatgcaagggaaacctcaaggccagctcaatgcctggtatctgcccccagtccaggccaggcggaggggaggggctgtccggctgcctctcccttctcggtggcttcccctacgccctgggagtttgatctcttaagggaacttgcctctccctcttgttttgctcctggccctgcccctaggtctgggtgggcagtggccccatagcctctggaactgtgcgttctgcatagaattcaaacgagattcacccagcgcgaggaggaagaaacagcagttcctgggaaccacaattatnnnnnnnnnnnnntgtgatctgagtgcctcaagatggttttcaaaaaaatttttttaaagaaaataattgtatacgtgtcaacacagctggctggatgattgggactttaaaacgaccctctttcaggtggattcagagacctgtcctgtatataacagcactgtagcaataaacgtgacattttataacgataa

SEQ ID NO: 359458 - DNA, 399 bp, Homo Sapiens
  misc_feature (164)..(164): n is a, c, g, or t
  misc_feature (363)..(363): n is a, c, g, or t
gtgattaaagtaaaatgcaattcatgtaaatatctccatcaaggaatcatacagggaagacccaagtggccatggggaacagactgggtgttagttttttaaatacagaggcataaataactgtacgcaaggcagttaaatacacagtggtgcgatagctcccntggtggtcacttgaaggggtgcactcagcagcaagttccatctttcacccacttgccaggcctggcatttaagattttgtctccaagggaccagggaggccccagtttgagagaggaggctccgatcaatccagggtgctacttgttagggagggtcaagtaaaggggcttgatggggagcaacgttgaggaaataagnccttttaggcttgggggatatcactttcctccatct

SEQ ID NO: 359459 - DNA, 1215 bp, Homo Sapiens
  misc_feature (135)..(162): n is a, c, g, or t
  misc_feature (289)..(316): n is a, c, g, or t
  misc_feature (472)..(506): n is a, c, g, or t
  misc_feature (622)..(681): n is a, c, g, or t
  misc_feature (1178)..(1178): n is a, c, g, or t
gccatcgccagcctcaacgggtaccgcctgggagacagagtgttgcaagtttcctttaaaaccaacaaagcccacaagtcctgaatttcccattcttacttactaaaatatatatagaaatatatacgaacaaannnnnnnnnnnnnnnnnnnnnnnnnnnngaaagagagagaaacaaacttttcaaggcttatattcaaccatggactttataagccagtgttgcctaagtattaaaacattggattatcctgaggtgtaccaggaaaggattttataatgcttagnnnnnnnnnnnnnnnnnnnnnnnnnnnntacctttgatgcattgaatgttctttcatagctgtcgttgttgaatataatatacatagatagcgatgtgcagggatttttacccagccagctaactttactaccttccttgaaggtggatctttttaagatgaccattcgctcatttgaagaagnnnnnnnnnnnnnnnnnnnnnnnnnnnnnnnnnnncaatttttacaaagtaatgggattcaaagaaaggaaaaaaagatttttcttttttgtcaaaatatcgatccaatcagattggtaaaaacccccacacaaattaaagaggaataatnnnnnnnnnnnnnnnnnnnnnnnnnnnnnnnnnnnnnnnnnnnnnnnnnnnnnnnnnnnnatatcatgtgaactaaaacagtcttctgttaggggatgggggcaagggggatacctgatgacattaacaatttaataacattaacattgttgccaaagaggtggtctctttgctgaaaatgggtttcaagaaaaatctatttttataaaatataaagaatttttacaagagaatctggatttgagaaaaaaatattttgactggctaatttaggggaaattgacaactttgtcgcgttcatactgcactggtaactttttagagatcaagatgtgtgtttttaaactggattcgtagactgtttttttgaacgatgggctataaacagatgatcttcatatcttttcatagcatgtaataataattaaaaaacaattattaattactagggggaaaggaatgttcggttctaccccagggtaccacaggttccccacagtcaaaacccaaaaggcaagggagatgagttggaaaggacagtttttcttttaagtccntcagtatggggttgtcagccggaaccaaaaatttaaa

SEQ ID NO: 359460 - DNA, 546 bp, Homo Sapiens
  misc_feature (140)..(140): n is a, c, g, or t
ggacagatgcaggacattccagacacgacaacagagggtgtgggtgtctggccacagtggcagggccagcagcctcatcatcgttcaagttctagtgagcaacatgttcaacaaccgccagcacagcaacctggccagcntgaggtcttccaggagatgctgtccatgctgggagatcagagcaacagctacaacaatgaagaattccctgatctaactatgtttccccccttttcagaatagaactattggggtgaggataaggggtgggggagaaaaaatcactgtttgtttttaaaaagcaaatctttctgtaaacagaataaaagttcctctcccttcccttccctcacccctgacatgtaccccctttcccttctggctgttcccctgctctgttgcctctctaaggtaacatttatagaagaaatggaatgaatctccaaggcttttaggactgtctgaaaatttgaggctgggtgaagttaaaacacctttccttatgtctcctgacctgaaattgtatagtgttgattttgtgctgag

SEQ ID NO: 359461 - DNA, 817 bp, Homo Sapiens
atgcatgtggaagcagtgtgaatggagaagtcataatgggtcattcatccctgaattgctacatcagagttgatactggacacaaacaccgggagtgtcatgaatatgcagagaagtcatatacacataagcagtgtgggaaagccttaagttaccacaactcatttcaaacacatgaaaggcctcacactggaaagaaaccatatgattgtaaagaatgtggaaaaaccttcagttctcctggaaaccttcgaagacatatggtagtaaaaggtggagatggaccttataaatgtgaattgtgtgggaaagcctttttttggcccagtttattacgtatgcatgaaagaactcacactggagagaaaccatatgaatgtaagcagtgttctaaagccttccctgtttacagttcctatctaagacatgaaaaaatacacactggggagaaaccgtatgaatgtaagcagtgttctaaagcctttcctgattacagttcctatctaagacatgaaagaactcacactggagagaaaccctataaatgtaaacaatgtgggaaagccttcagctgttactattacactcgactacatgaaaggactcacacgggagaacaaccctatgcatgtaagcaatgtgggaaaacgttttatcatcacacaagctttcgaagacacatgataaggcacactggagacggaccacataaatgtaagatatgtgggaaaggctttgattgtcctagttcagttcgaaatcatgaaacttacttcacactggagagaaaccctatggaatgtaaagcagtgtgggg

SEQ ID NO: 359462 - DNA, 2033 bp, Homo Sapiens
aaggttcgtggtggccttccaagaaacaggggggaaattagaggggattcccttcttagggcaaaaggcaaccccatacacctttggatacaaaggccaaggctccagggccccggaagtggaaggagttaccggctaacattcaaattatcccccagattggaatggttggggggtgaaatatgggcagtgcagaaaaaagaggggaaagaaaggcaggcatttttctctcccccatggggtctacttagctgacatgcggcggaaaataaattgtaagaggactatgataatgtgtgaattatgcagctgcattttccataggccatctgcataatcccatctcatagagatgctccaaactacctgaggacatttgggttctgaaacactgtcactctagtctcatcagaaaatcaaacatggatgcaacttggcaatgaaaaacataaaaatgtcaccacaatagccgttgagcttgaatgacagaaatgaaggacggagatctacacatctacttagctcttgacttcgggttttaaaaattcagagttaacaaaggaaaatccttcgaattctgattggtcaatattcctgatgacttcctggtcgggaggtgttaggactggtggatggcgggtgaaaaatcggtcgaagttttcagcatttcgcccacaagcttttggcttataagggggctggatctctttgcgttcaaagtttctccccaatcaaatataccggaaaaatgcatgctctttgatatcacgttcaccttcaggtccacaacccagacgtttgccctgggtgtttggtcatcagccctttgcagatggccacagcttccttggacatagacttggaatagcctacgttgtgttccatgatggattggaagagttcatcttcatcctccccttcaaaagggtgcctgcccagccaacatttcatacagcaggactccaaatgcccaccaatccacggacttcccatagggctgataagcaattatctcgggggcgatgtagtctggagtgccacagaatgtcttggttgtcaccccatcccagatgttttccttacacatgccaaaatcggcaatcttgatgtgtccctcagaatcgagcatcacgttgtcaagttttaggtcacggtaaatgatgcccttactctgtaagaagaacagaccgatggcaatttctgcagcgtaaaatacagcatggggctccttgaaccggccgacttgctggatgtgatacatgaggtcgcccccattcacgtactccatcacaaagtacaggcggtccatggtctggaagcaggagtggagctgggtcaggaagggcggcttcccgggcagggccaacacccgcttctccaccatagtgcactccacgtcatcatcttggatcacaacgtccttcttcaggatcttcacagcatagagctcatctgtgccttttcgttctgaaagcatgaccttgccaaagctgcctttccccagcaccattaggaagttaaaatcggtcagtttcatccggtctctgttgccattgttgtcaaatttggagacagtgttggtcgtcttttcttccgggaccttggttccctgactgatcttggccctctcaaatttctgccgcagttcttcattggcctcacttccttctggtggcacaggcacattgaagtactcgccttcctcctggctcagtaacttaaaccagccatcaacactggctttctgaagttcagaaatcccaaaggacaaagatcccatgaagtcattcctgctggtcaaatcccaatcccaaatctctactgacagtcttctgtctttgtccgattctttcagctgaaatctaaatgtctcattccactcagggttgagggagcatttgatggttttggtcttctgtttgctctcacttttgggatcgggaatcagtttcagttttacgtagggatctgacaggccattggggtccataggtacaaggtttttagcatctcttacgaggacaatgaggacg

SEQ ID NO: 359463 - DNA, 975 bp, Homo Sapiens
ggtccggaattcccgggatggggagtgtagagcagagcagaagcctgagccagacggagagccacctcctctcccagggacagacatggctcagcggatgacaacacagctgctgctccttctagtgtgggtggctgtagtaggggaggctcagacaaggattgcatgggccaggactgagcttctcaatgtctgcatgaacgccaagcaccacaaggaaaagccaggccccgaggacaagttgcatgagcagtgtcgaccctggaggaagaatgcctgctgttctaccaacaccagccaggaagcccataaggatgtttcctacctatatagattcaactggaaccactgtggagagatggcacctgcctgcaaacggcatttcatccaggacacctgcctctacgagtgctcccccaacttggggccctggatccagcaggtggatcagagctggcgcaaagagcgggtactgaacgtgcccctgtgcaaagaggactgtgagcaatggtgggaagattgtcgcacctcctacacctgcaagagcaactggcacaagggctggaactggacttcagggtttaacaagtgcgcagtgggagctgcctgccaacctttccatttctacttccccacacccactgttctgtgcaatgaaatctggactcactcctacaaggtcagcaactacagccgagggagtggccgctgcatccagatgtggttcgacccagcccagggcaaccccaatgaggaggtggcgaggttctatgctgcagccatgagtggggctgggccctgggcagcctggcctttcctgcttagcctggccctaatgctgctgtggctgctcagctgacctccttttaccttctgatacctggaaatccctgccctgttcagccccacagctcccaactatttggttcctgctccatggtcgggcctctgacagccactttgaataaaccagac

SEQ ID NO: 359464 - DNA, 954 bp, Homo Sapiens
cagctgtcccctggaataaggcaagggggagtgtagagcagagcagaagcctgagccagacggagagccacctcctctcccaggaactgaacccaaaggatcacctggtattccctgagagtacagatttctccggcgtggccctcaagggacagacatggctcagcggatgacaacacagctgctgctccttctagtgtgggtggctgtagtaggggaggctcagacaaggattgcatgggccaggactgagcttctcaatgtctgcatgaacgccaagcaccacaaggaaaagccaggccccgaggacaagttgcatgagcagtgtcgaccctggaggaagaatgcctgctgttctaccaacaccagccaggaagcccataaggatgtttcctacctatatagattcaactggaaccactgtggagagatggcacctgcctgcaaacggcatttcatccaggacacctgcctctacgagtgctcccccaacttggggccctggatccagcaggtggatcagagctggcgcaaagagcgggtactgaacgtgcccctgtgcaaagaggactgtgagcaaatggtggggaagattgtcgcacctcctacacctgcaagagcaactggcacaagggctggaactggacttcagggtttaacaagtgcgcagtgggagctgcctgccaacctttccatttctacttcccaaacccactgttctgtgcaatgaaatctggactcactcctacaaggtcagcaactacagccgagggaagtggcgctgcatccagattgtggtccgaccaagcccagggcaacccaaatgaagaggtggagaaggatctaatgctgcagccatgagtgggggtggggcctggggcaggctggcctttcctggttagctgggccctatgctgctgagcgtggtcagctgacctctttaccttctgatac

SEQ ID NO: 359465 - DNA, 1106 bp, Homo Sapiens
cgccatctgtttcttccccaatggagaggccatctgcacgggctcggatgacgcttcctgccgcttgtttgacctgcgggcagaccaggagctgatctgcttctcccacgagagcatcatctgcagcatcacgtccgtggccttctccctcagtggccgcctactattcgctggctacgacgacttcaactgcaatgtctgggactccatgaagtctgagcgtgtgggcatcctctctggccacgataacagggtgagctgcctgagagtcacagctgacgggatggctgtggccacaggttcctgggacagcttcctcaaaatctggaactgaggaggctggagaaagggaagtggaaggcagtgaacacactcagcagccccctgcccgaccccatctcattcaggtgttctcttctatattccgggtgccattcccactaagctttctcctttgagggcagtggggagcatgggactgtgcctttgggaggcagcatcagggacacaggggcaaagaactgccccatctcctcccatggccttccctccccacagtcctcacagcctctcccttaatgagcaaggacaacctgcccctccccagccctttgcaggcccagcagacttgagtctgaggccccaggccctaggattcctcccccagagccactacctttgtccaggcctgggtggtatagggcgtttggccctgtgactatggctctggcaccactagggtcctggccctcttcttattcatgctttctcctttttctacctttttttctctcctaagacacctgcaataaagtgtagcaccctggtacatctgtgatgtttgccttctactctcttctgttccaaaaagacccaggtcccatttaagggcagtaatgtgttacaggtgctgtgataaaggctgggtactggatagcttgtgggcttatgggaggaggcctgagatgggtcagggggagaaggtattcagcaggtggctgggggactgtgtgcagcagttcgctatggcctgcctgtggtgcccatgtgtttgtacgggagggttagcttgagaaggaatcagattataaaaggtcttgaatgtc

SEQ ID NO: 359466 - DNA, 1414 bp, Homo Sapiens
agcggattctaaccgccgccaggtcccgccgcctctcgccccgctattaataccggcggcccgggaggggggcgcagcacgcgccgcgcagccatggggaggctgctggccttagtggtcggcgcggcactggtgtcctcagcctgcgggggctgcgtggaggtggactcggagaccgaggccgtgtatgggatgaccttcaaaattctttgcatctcctgcaagcgccgcagcgagaccaacgctgagaccttcaccgagtggaccttccgccagaagggcactgaggagtttgtcaagatcctgcgctatgagaatgaggtgttgcagctggaggaggatgagcgcttcgagggccgcgtggtgtggaatggcagccggggcaccaaagacctgcaggatctgtctatcttcatcaccaatgtcacctacaaccactcgggcgactacgagtgccacgtctaccgcctgctcttcttcgaaaactacgagcacaacaccagcgtcgtcaagaagatccacattgaggtagtggacaaagccaacagagacatggcatccatcgtgtctgagatcatgatgtatgtgctcattgtggtgttgaccatatggctcgtggcagagatgatttactgctacaagaagatcgctgccgccacggagactgctgcacaggagaatgcctcggaatacctggccatcacctctgaaagcaaagagaactgcacgggcgtccaggtggccgaatagccctggccctgggccccgcctcaaggaagagccagccgtaatggggactctccaggcaccgctgcccccagcgtgggggtggccactcctgggccccagaaagcctcagagtcctgccgacggagccactggggtgggagggggcagggggcttggctcgcacccccactttcgcctcctccagctcctgccccgccggccgcgcaccgccatgcatgatgggtaaagcaatactgccgctgcccccaccctgcttctgctgcctgtttggggaggggggcggtgaggtgggggcagcggccccgcacccctcctccttgctgatttgcacacattggccgcttcagacacgcacttctggggccagcccctccccgcctcctccctgcctggcggcaggggtcgcgatgatgggctggagcagtttggggcagggggttctgggacccactccgactccccctccccggcatcatttcccctcccgcttcctccggctggacctggggtcccccctccctgtaatgcactcctgccccggcccaacctcgccctctctcaccagccttgaactgtggccacctagaaaggggcccattcagcctcgtctctttacagaagtagttttgttcatgaaataaagactcttggacttgaaaaaaaa

SEQ ID NO: 359467 - DNA, 1324 bp, Homo Sapiens
  misc_feature (60)..(72): n is a, c, g, or t
  misc_feature (163)..(172): n is a, c, g, or t
  misc_feature (1105)..(1121): n is a, c, g, or t
tataagagtagggaagaaggataaagggcgtcgagtgatagaaggacgccgcggttaaannnnnnnnnnnnnagggaagtacgtggaacgacaaggatgagagtggggggtggtaaatagagagaaaaagaggtgtagagggaaaggaagtggggggcccttnnnnnnnnnnaagggttcgtggggagggattcggaggctttggggggccccaggagtggggcacccccaaaattgggggcagacggtgcctggagagtcccccattacggccggctcttccttgagggcggggcccagggccagggctattcgggccacctggacggcccgtgcagttctctttgctttcagagggtgatggccaggtattccgaggcattctcctgtgcagcagtctccgtggcggcagcgatcttcttgtagcagtaaatcatctctgccacgagccatatggtcaacaccacaatgagcacatacatcatgatctcagacacgatggatgccatgtctctgttggctttgtccactacctcaatgtggatcttcttgacgacgctggtgttgtgctcgtagttttcgaagaagagcaggcggtagacgtggcactcgtagtcgcccgagtggttgtaggtgacattggtgatgaagatagacagatcctgcaggtctttggtgccccggctgccattccacaccacgcggccctcgaagcgctcatcctcctccagctgcaacacctcattctcatagcgcaggatcttgacaaactcctcagtgcccttctggcggaaggtccactcggtgaaggtctcagcgttggtctcgctgcggcgcttgcaggagatgcaaagaattttgaaggtcatcccatacacggcctcggtctccgagtccacctccacgcagcccccgcaggctgaggacaccagtgccgcgccgaccactaaggccagcagcctccccatggctgcgcggcgcgtgctgcgcccccctcccgggccgccggtattaatagcggggcgagaggcggcgggacctggcggcggttagaatgtccccgggagcgcgcgggcgcagcagctgcggctctgggaccggcgannnnnnnnnnnnnnnnncgcggcccccccgctccggttaccgccgggggcccagccccggggcccggcgtccgggcatccccgccgcgcgggcggcggccgctgctcgggctgctgcgctggcgcgcgcagccgggcacatccgctaggtgcaccgacacctgtcccgctccggctcgggcgcgctcgggcgcggaccgcggtctcctgcgcactccgct

SEQ ID NO: 359468 - DNA, 937 bp, Homo Sapiens
atagctataggctaggtagcgaggcccgggtggttaattcaggcacgagggttgccctggacttgtcttggttccagaacctgacgacccggcgacggcgacgtctcttttgactaaaagacagtgtccagtgctccagcctaggagtctacggggaccgcctcccgcgccgccaccatgcccaacttctctggcaactggaaaatcatccgatcggaaaacttcgaggaattgctcaaagtgctgggggtgaatgtgatgctgaggaagattgctgtggctgcagcgtccaagccagcagtggagatcaaacaggagggagacactttctacatcaaaacctccaccaccgtgcgcaccacagagattaacttcaaggttggggaggagtttgaggagcagactgtggatgggaggccctgtaagagcctggtgaaatgggagagtgagaataaaatggtctgtgagcagaagctcctgaagggagagggccccaagacctcgtggaccagagaactgaccaacgatggggaactgatcctgaccatgacggcggatgacgttgtgtgcaccagggtctacgtccgagagtgagtggccacaggtagaaccgcggccgaagcccaccactggccatgctcaccgccctgcttcactgccccctccgtcccacccctccttctaggatagcgctccccttaccccagtcacttctggggggtcactgggatgcctcttgcagggtcttgctttctttgacctcttctctcctccccctacaccaacaaaggaggaaatggctgcaagaaacccagaatcaccccattccgggttctacttccccggccttcccaagttcagcaggccctagccccccaaacccagcgctaggagccaggggtcctcctcctaaaagggggaaccttgaaggggccca

SEQ ID NO: 359469 - DNA, 547 bp, Homo Sapiens
gtctgtagaagaagctcttgagggagagggccccagacctctgggacaagagaactgcaaccgatgggaactgatcctgcccatgacgcgggatgacgttgtgtgcacaagggtatacgtcaaagagtaagtggccacaggtagaaccggggccgatagcccaccactggccatgctcaccgccatgtttcactgccccttccgtcccaccccctccttctaggatagcgctccccttaccccagtcacttttgggggtcactgggatgcctcttgcagggtcttgctttctttgacctcttctctcctcccctacaccaacaaagaggaatggctgcaagagcccagatcacccattccgggttcactccccgcctccccaagtcagcagtcctagccccaaaccagcccagagcagggtctctctaaaggggacttgagggcctgagcaggaaagactggccctctagcttctaccctttgtccctgtagcctatacagtttagaatatttatttgttaattttattaaaatgctttaaaaaaat

SEQ ID NO: 359470 - DNA, 1502 bp, Homo Sapiens
  misc_feature (1003)..(1021): n is a, c, g, or t
  misc_feature (1030)..(1068): n is a, c, g, or t
  misc_feature (1116)..(1186): n is a, c, g, or t
  misc_feature (1484)..(1484): n is a, c, g, or t
aaaacaatacggctaggtacgaggctgggtggcgaattcggcacgaggctggacttgtcttggttccagaacctgacgacccggcgacggcgacgtctcttttgactaaaagacagtgtccagtgctccagcctaggagtctacggggaccgcctcccgcgccgccaccatgcccaacttctctggcaactggaaaatcatccgatcggaaaacttcgaggaattgctcaaagtgctgggggtgaatgtgatgctgaggaagattgctgtggctgcagcgtccaagccagcagtggagatcaaacaggagggagacactttctacatcaaaacctccaccaccgtgcgcaccacagagattaacttcaaggttggggaggagtttgaggagcagactgtggatgggaggccctgtaagagcctggtgaaatgggagagtgagaataaaatggtctgtgagcagaagctcctgaagggagagggccccaagacctcgtggaccagagaactgaccaacgatggggaactgatcctgaccatgacggcggatgacgttgtgtgcaccagggtctacgtccgagagtgagtggccacaggtagaaccgcggccgaagcccaccactggccatgctcaccgccctgcttcactgccccctccgtcccaccccctccttctaggatagcgctccccttaccccagtcacttctgggggtcactgggatgcctcttgcagggtcttgctttctttgacctcttctctcctcccctacaccaacaaagaggaatggctgcaagagcccagatcacccattccgggttcactccccgcctccccaagtcagcagtcctagccccaaaccagcccagagcagggtctctctaaaggggacttgagggcctgagcaggaaagactggccctctagcttctaccctttgtccctgtagcctatacagtttagaatatttatttgttaattttattaaaatgctttaaaaaaatnnnnnnnnnnnnnnnnnnnctcgaggcnnnnnnnnnnnnnnnnnnnnnnnnnnnnnnnnnnnnnnncatggtcatagctgtttcctggacccacctttcttgtacaaaggggannnnnnnnnnnnnnnnnnnnnnnnnnnnnnnnnnnnnnnnnnnnnnnnnnnnnnnnnnnnnnnnnnnnnnncgctgcagtacccgggaaattaacccgcccaatgagccgggcttttttttgtgatccaaagggatcttcctggaaaccctttttttctgcggataatctgccgctttgcaaacaaaaaaaccacccctacccaaggggggttttgttttgcgggataaaagctcaccagctcttttttccgaaggtaaccgggcttcgccaaagagccaaatccaaatacggggttctctcacaggaaacccgcatgatgcgcccccgccttcaaagacattggtagcacaccgccacaacacccgcngcctcaccaacacacggc

SEQ ID NO: 359471 - DNA, 649 bp, Homo Sapiens
gaaaattgcacagaccgacagtcgtgaggatggcagagctgctgcattcacccacacggggatttctgtgtctgcttggcgacctcactgcgtgcacggcctaggaggtgcacgggccaccatagtcacactggcactgaaaagaaagcgttgccctggtgattctttcccccccgtttgtaatgttaactgatcaggaagtgcagtttgggtgggatgccgaatcgtcgtgctgacattgagtcacggatgaggaaggtacaagtcctttaagatcaaaactcaaacgggccgttctttctaaggtgtcggtatgtggggagtggtacaaaatggtctgatgctccttcaaaaacattcactttttacaacgtcaaggaattaagcataaaaaagattggttaaaagctttggtttctagtaaaggttagtgtgtgtggtttttttaagaagctgttttgctaaattatttttacttggaatgtttcaaacagatttcaggctgcaaacttgttttataatcgtttgcttctccaagtgaagctcagaaatacctaaaaatagctgtaacgttcgcgttaggaaagatggtgtttattccagtttgcatttttatggtgaaataaaatccttttccaatgaactaaaa

SEQ ID NO: 359472 - DNA, 545 bp, Homo Sapiens
tttctgtggaaatgtgccttatgtaaaccactatgtactttaccttttgcattgtccagacttctttattagatggagatgtttctttttctgtcttctagactaaatagagtatcatccaaataatggggcctatgacttgaatgaatagaaatgaataagctggtgtttgttttttcaaaatggaagtaatttagatttgttctcctcatacataaaatgattttagttcagttttaaccagtgaaaactttgtttttatgaaaaaaaaggaaaatggtttcccatttggttttatatgtgttaaataaatgtgtaaagtaaccaccaaatgttattagaatttttcttctagcatttataattttttcaactcctattgtgtttctttgtgtgtgatattttaatcaaaagtggttgagttgttaacagtgttctttgaaagaatctctaaaaggcttataaatgtttgaaatatcacacaaaggctgatttctaaaatatatatatattaaaacaataaagtatttattttgcctaaaaaa

SEQ ID NO: 359473 - DNA, 476 bp, Homo Sapiens
acatcccagaagtggtgtggacggcaaagcagcacttctcattccaggaggaagaacagattgacttccaggaaggggatttcttcaaagaccctcttccggaagctgatctgtacatcctggccagggtcctccatgactgggcagacggaaagtgctcacacctgctggagaggatctaccacacttgcaagccaggtggtggcattctggtaattgaaagcctcctggatgaagacaggcgagggtcctttgtcacgcagctctactctctgaacatgcttgtgcagacggaagggcaggagaggacccccacccactaccacattctcctctcttctgctggcttcagagacttccagtttaagaaaacaggagccatttatgatgccattttagccaggaaataactgtttcttgtgacctggaactaacgtcaaagcacacaagacataataataaagacatgtacctcc

SEQ ID NO: 359474 - DNA, 1200 bp, Homo Sapiens
  misc_feature (69)..(69): n is a, c, g, or t
tcctcatcgcttttgctttggtcttttatctcgtttttaataaagcaagctggtatccggtccgggatnctcaaaatggggaagaagagccgcgaccgacagaggccgccgagcgtccccgccctcagagagcagcctcccgagacagagcctcagcctgcctggaagatgccgagatcgtgctgcagccgctcgggggccctgttgctggccttgctgcttcaggcctccatggaagtgcgtggctggtgcctggagagcagccagtgtcaggacctcaccacggaaagcaacctgctggagtgcatccgggcctgcaagcccgacctctcggccgagactcccatgttcccgggaaatggcgacgagcagcctctgaccgagaacccccggaagtacgtcatgggccacttccgctgggaccgattcggccgccgcaacagcagcagcagcggcagcagcggcgcagggcagaagcgcgaggacgtctcagcgggcgaagactgcggcccgctgcctgagggcggccccgagccccgcagcgatggtgccaagccgggcccgcgcgagggcaagcgctcctactccatggagcacttccgctggggcaagccggtgggcaagaagcggcgcccagtgaaggtgtaccctaacggcgccgaggacgagtcggccgaggccttccccctggagttcaagagggagctgactggccagcgactccgggagggagatggccccgacggccctgccgatgacggcgcaggggcccaggccgacctggagcacagcctgctggtggcggccgagaagaaggacgagggcccctacaggatggagcacttccgctggggcagcccgcccaaggacaagcgctacggcggtttcatgacctccgagaagagccagacgcccctggtgacgctgttcaaaaacgccatcatcaagaacgcctacaagaagggcgagtgagggcacagcggggccccagggctaccctcccccaggaggtcgaccccaaagccccttgctctcccctgccctgctgccgcctcccagcctggggggtcgtggcagataatcagcctcttaaagctgcctgtagttaggaaataaaacctttcaaatttcacatccacctctgactttgaatgtaaactgtgtgaataaagtaaaaatacgtagccgtcaaataacagc

SEQ ID NO: 359475 - DNA, 1056 bp, Homo Sapiens
gggagagacaccaagaagaatcggaacatacaggctttgatatcaaaggtttataaagccaatatctgggaaagagaaaaccgtgagacttccagatcttctctggtgaagtgtgtttcctgcaacgatcacgaacatgaacatcaaaggatcgccatgtgaaagggtccctcctgctgctgctggtgtcaaacctgctcctgtgccagagcgtggcccccttgcccatctgtcccggcggggctgcccgatgccaggtgacccttcgagacctgtttgaccgcgccgtcgtcctgtcccactacatccataacctctcctcagaaatgttcagcgaattcgataaacggtatacccatggccgggggttcattaccaaggccatcaacagctgccacacttcttcccttgccacccccgaagacaaggagcaagcccaacagatgaatcaaaaagactttctgagcctgatagtcagcatattgcgatcctggaatgagcctctgtatcatctggtcacggaagtacgtggtatgcaagaagccccggaggctatcctatccaaagctgtagagattgaggagcaaaccaaacggcttctaaagggcatggagctgatagtcagccaggttcatcctgaaaacaaagaaaatgagatctacccctggctggtcgggacttccatccctgcaaatggctgatgaaaaagtctcgccctttctgcttaatataaacctgcctccactggcctacggacggggattcacataaaaaatcgaacaattaatctccaagctccctggaaagtggccgaatccatcccacaaacaaacaactggcttaagcccccacatcccattttcaaccatatttccctgaaaaaggtccccttaaaatgaatccggttcccattggcaaagcctttcctttttaatttggaatcccccctttttggaattccatgccttggggtggtaaaacaaggggtctcccctctttgaaaaaaattaaaaaccttgtaattccctttaatgagaacacttccaaaaaatcctc

SEQ ID NO: 359476 - DNA, 907 bp, Homo Sapiens
gctggtaccgggtccgggaattcttccggacctgcgacgatcacgaacatgaacatcaaaggatcgccatggaaagggtccctcctgctgctgctggtgtcaaacctgctcctgtgccagagcgtggcccccttgcccatctgtcccggcggggctgcccgatgccaggtgacccttcgagacctgtttgaccgcgccgtcgtcctgtcccactacatccataacctctcctcagaaatgttcagcgaattcgataaacggtatacccatggccgggggttcattaccaaggccatcaacagctgccacacttcttcccttgccacccccgaagacaaggagcaagcccaacagatgaatcaaaaagactttctgagcctgatagtcagcatattgcgatcctggaatgagcctctgtatcatctggtcacggaagtacgtggtatgcaagaagccccggaggctatcctatccaaagctgtagagattgaggagcaaaccaaacggcttctagagggcatggagctgatagtcagccaggttcatcctgaaaccaaagaaaatgagatctaccctgtctggtcgggacttccatccctgcagatggctgatgaagagtctcgcctttctgcttattataacctgctccactgcctacgcagggattcacataaaatcgacaattatctcaagctcctgaagtgccgaatcatccacaacaacaactgctaaaccccacatccatttcatccattttctgaaaaaggtccttaaatgattccgtttccattggcaaggccttcttttaaattggattccccttttggaaacccctggctttgggggtgtaaaacaggggtcctcccttcctttaaaaacaattataaaaacctgggaccctcccttc

SEQ ID NO: 359477 - DNA, 884 bp, Homo Sapiens
ccagatcttctctggtgaagtgtgtttcctgcaacgatcacgaacatgaacatcaaaggatcgccatggaaagggtccctcctgctgctgctggtgtcaaacctgctcctgtgccagagcgtggcccccttgcccatctgtcccggcggggctgcccgatgccaggtgacccttcgagacctgtttgaccgcgccgtcgtcctgtcccactacatccataacctctcctcagaaatgttcagcgaattcgataaacggtatacccatggccgggggttcattaccaaggccatcaacagctgccacacttcttcccttgccacccccgaagacaaggagcaagcccaacagatgaatcaaaaagactttctgagcctgatagtcagcatattgcgatcctggaatgagcctctgtatcatctggtcacggaagtacgtggtatgcaagaagccccggaggctatcctatccaaagctgtagagattgaggagcaaaccaaacggcttctagagggcatggagctgatagtcagccaggttcatcctgaaaccaaagaaaatgagatctaccctgtctggtcgggacttccatccctgcagatggctgatgaagagtctcgcctttctgcttattataaccctgctccactgcctacgcagggattcacataaaatcgacaattatctcaagctcctgaagtgccgaaatcatccaacaacaaacaactgctatagcccaccatcccatttcatctattttctgaagaaagggcccttaaatggatcccgttccaattggcaaagccttccttttaaaggtgggaaccccctttttgaaaaccccaggccttgggggtggttaaccaggtttcctcccctctttt

SEQ ID NO: 359478 - DNA, 840 bp, Homo Sapiens
gaacatgaacatcaaaggatcgccatggaaagggtccctcctgctgctgctggtgtcaaacctgctcctgtgccagagcgtggcccccttgcccatctgtcccggcggggctgcccgatgccaggtgacccttcgagacctgtttgaccgcgccgtcgtcctgtcccactacatccataacctctcctcagaaatgttcagcgaattcgataaacggtatacccatggccgggggttcattaccaaggccatcaacagctgccacacttcttcccttgccacccccgaagacaaggagcaagcccaacagatgaatcaaaaagactttctgagcctgatagtcagcatattgcgatcctggaatgagcctctgtatcatctggtcacggaagtacgtggtatgcaagaagccccggaggctatcctatccaaagctgtagagattgaggagcaaaccaaacggcttctagagggcatggagctgatagtcagccaggttcatcctgaaaccaaagaaaatgagatctaccctgtctggtcgggacttccatccctgcagatggctgatgaagagtctcgcctttctgcttattataacctgctccactgcctacgcagggattcacataaaatcgacaattatctcaagctcctgaagtgccgaatcatccacaacaacaactgctaagcccacatccatttcatctatttctgagaaggtccttaatgatccgttccattgcaagcttcttttagttgtatctcttttgaatccatgcttgggtgtaacaggtctcctcttaaaaaataaaactgactccttagagacatcaaaatctt

SEQ ID NO: 359479 - DNA, 1253 bp, Homo Sapiens
  misc_feature (902)..(902): n is a, c, g, or t
ggcgcgtcagctcggcttacatggtttccaccaaagtaaaaacaggctggggtaccggtccggattttccggatctggtgaagtgtgtttcctgcaacgatcacgaacatgaacatcaaaggatcgccatggaaagggtccctcctgctgctgctggtgtcaaacctgctcctgtgccagagcgtggcccccttgcccatctgtcccggcggggctgcccgatgccaggtgacccttcgagacctgtttgaccgcgccgtcgtcctgtcccactacatccataacctctcctcagaaatgttcagcgaattcgataaacggtatacccatggccgggggttcattaccaaggccatcaacagctgccacacttcttcccttgccacccccgaagacaaggagcaagcccaacagatgaatcaaaaagactttctgagcctgatagtcagcatattgcgatcctggaatgagcctctgtatcatctggtcacggaagtacgtggtatgcaagaagccccggaggctatcctatccaaagctgtacagattgaggagcaaaccaaacgggcttctagagggcatggagctgatagtcaacccagttcatcctgaaaaccaaggaaaatgaaatcctacccctgtctgggtcgggaactttccatcccctggcaaaatggcttgaatgaaaaaagttctccgcccattttcttgcctttacttaatacaaccctgggcttcccacattggcccttatcacccagggggaaattctctaccaattacgaagaattccggcacccaggatctatagtaccttactaaaacgcccctctccccctctgataaaggcttgggtccccgagaaaatcctcttttccccgctctaaataccacttacccanacccctgtggcccttacaatatccgctacaatcgaaaataccctcaaattttgtcccatttacatctatattttatcgcagagaaacgaaaagggggctcacccctttttaaagttgtgagatatcccccgcttttccacccaacttttgttccgcaaaagccatttcccagttttctttggcggtgtggtattcttctctaccaccttttgtgagagaaatacacccagtggaatatttggagagcgtggtaaaaccacattgggaaactccccctcctctttcgaggaaaatagtatgaaattacagcgtgtacatccctccctcttaagcgaaaatcacatttaaacg

SEQ ID NO: 359480 - DNA, 1248 bp, Homo Sapiens
  misc_feature (885)..(945): n is a, c, g, or t
ctggtccggtccggaattctcgggattccagatcttctctggtgaagtgtgtttcctgcaacgatcacgaacatgaacatcaaaggatcgccatggaaagggtccctcctgctgctgctggtgtcaaacctgctcctgtgccagagcgtggcccccttgcccatctgtcccggcggggctgcccgatgccaggtgacccttcgagacctgtttgaccgcgccgtcgtcctgtcccactacatccataacctctcctcagaaatgttcagcgaattcgataaacggtatacccatggccgggggttcattaccaaggccatcaacagctgccacacttcttcccttgccacccccgaagacaaggagcaagcccaacagatgaatcaaaaagactttctgagcctgatagtcagcatattgcgatcctggaatgagcctctgtatcatctggtcacggaagtacgtggtatgcaagaagccccggaggctatcctatccaaagctgtagagattgaggagcaaaccaaacggcttctagagggcatggagctgatagtcagccaggttcatcctgaaaccaaagaaaatgagatctaccctgtctggtcgggacttccatccctgcagatggctgatgaagagtctcgcctttctgcttattataacctgctccactgcctacgcagggattcacataaaatcgacaattatctcaagctcctgaagtgccgaatcatccacaacaacaactgctaagcccacatccatttcatctatttctgagaaggtcccttaatgatcccgttccattgcaagccttctttttagttggtatctcctttttgaatcccatgccttggggtggtaacaggtcctccctccttnnnnnnnnnnnnnnnnnnnnnnnnnnnnnnnnnnnnnnnnnnnnnnnnnnnnnnnnnnnnncaacaagagagtagggagtaaataacaattgaatgagggggggcggggtccgggctctctaataagttgttttcccccctccggaacggggcggcctcccccaggcggcttttacaccgccccataaccccccaaagcctattttcctacgggggatacaaaaaagggtggggcccgcccccctgaaaaatgtgggaggctcctccttatattaattcaaagctcttggaggggcaatcttgggagccccagtctcacgttttttttaccaatcacgttctccgttggagcaccgggtggggg

SEQ ID NO: 359481 - DNA, 968 bp, Homo Sapiens
ggcctgggtggcgaattcggcacgagggaatggctcaagtagaggagagttgaggcttcagtccagcacttttctcgggtcacggcctcctcctggttcccaagaccccaccataggcagaggcaggccttcctacaccctactctctgtgcctccagcctcgactagtccctaacactcgacgactgagtctcagaggtcacttcaccgtggtctccgcctcatccttggcgctagaccactgaggggagaggactggggtgctccgctgagccactcctgtgcctccctggccttgtctacttctcgccccccgaagggttagtgtcgagctcactccagcatcctacaacctcctggtggccttgccgcccccacaaccccgaggtataaagccaggtacaccaggcaggggacgcaccaaggatggagatgttccaggggctgctgctgttgctgctgctgagcatgggcggggcatgggcatccagggagccgcttcggccatggtgccaccccatcaatgccatcctggctgtggagaaggagggctgccccgtgtgcatcaccgtcaacaccaccatctgtgccggctactgccccaccatgatcgcgcgtgctgcaggcggtcctgccgcccctgcctcaggtggtgtgcaactaccgcgatgtgcgcttcgagtccatccggctccctggctgcccgcgcggcgtggaacccgtggtctcctaccccgtggctctcagctgtcaatgtgcaccctgccgccgcagcacacttgaactgcggggggtccccaggaccccccccttgacctgtgatgacccccgctttccaggccctccttcttcctaaaagggccccttccccccagcctttccaaaggccatttcccgaactcccggggggccctctcggaaaacccccaatcccttcccacaaataaaaggctttcttcaatcccgcc

SEQ ID NO: 359482 - DNA, 496 bp, Homo Sapiens
accccatatttggctgtggagtataaaaatagtcaaagctgtgctgcgcgcggtggctcacgccttggccttccaggtgctgggattacaggcttgagccaccaggcctttctttgttcttaggagtatagtcagactaacttctagtagttatatttctaataattgaggatgtaagtaaggatcaaatcttaaatcagtataatgcattgtcattccagagataaatcctagacccttcttggcctccttctgacataattctaatcctacagtctcagagatgctgttgtatcctgccccccaaccccatgatagtgatagtggtttttgccttgaaggaattgctttgtatttagcttttccccctctagatttctagttccttttcagtattggattggatttgagatttgattaacctagtactcaggttcagatgctcgcctctttgcaattttaacactcattcgacaataaagtcagtaaaaaacac

SEQ ID NO: 359483 - DNA, 499 bp, Homo Sapiens
gaccaagtatggggaaaaccaggcaccagcctttgcagcaatgggtccctttagcctgtggacaccagctgggggatccagggtcaggccccctcctctccccagtttccctctgctgtgggttttgggctgtcatgtctccaccacttaaggatgtctttacactgacttcaggatagatgctgggatgcctgggcatggccacatgttacatgtacagaactttgtctacagcacaaattaagttatataaacacagtgactggtatttaatgctgatctactataaggtattctatatttatatgacttcagagacgcgtatgtaataaaggacgccctccctccagtgtccacatccagttcaccccagagggtcgggcaggttgacatatttatttttgtctattctgtaggcttccatgtccagaatcctgcttaaggttttagggtaccttcagtactttttgcaataaaagtatttcctatccaaaaaaaa

SEQ ID NO: 359484 - DNA, 433 bp, Homo Sapiens
  misc_feature (365)..(374): n is a, c, g, or t
ttaagcaagcacaaagaagatgaggcagagaattgttagagctgaaagttcctttggttgctcacaactcaggtatgcacccatgtggcagccaggcagcggagccctactagactgccagtctcatgcacccagacctgtggccagattgtggcctctggctgcctcaggcattttcctctttgcattgggttttcctgcattagtaactacagctgcaacagacatcctccacattgtgcacactggttttgcctttgtcctcaagagttgatacttggcattagcatgaaacttgtgggtgtgggaggatggagagagaactctaacacaaaacatcttattaaaattgtacttgagagacnnnnnnnnnnctctgttgtattttgacagaattatttttattaaaatacacatccatgagcaaaaaaaa

SEQ ID NO: 359485 - DNA, 1064 bp, Homo Sapiens
aaaagcagtgttagtgagaggtgcaaagaattattctaacagacacctgaaagtatctgtaagcaatactagtaggtaagatttcactgtgtgtacacatacacatttgagattgtatgagaacatataatccatatgatatgttgtacattttatggaaatgtaatagaatctcacacattattttatagaaatagagtacagaagcatcacaagtattaaagttggttttagcaaggattaggattactacaattatttttactataataattattttccttctatggaactcagaatcctggctacatttgaggacaggaatatgttgagcctgattttcctggtgtgtgtaaaatatttcctaggaataaattaggcactttttagaagcaatgttaaatcattcaggttttattttctgccctgaagcagaaatttaaaaaatgatattgggacctggaaggtttaatatagttcacagtgcctgaattacacctgctccgaaaactagctttgtatttcttatgactttgcataagaactgttcatctttggatcttgagcaccttacagataaaactttttatggcatctctttcctggacagtgattgatcttttcacaatgtatgtagcctctagaattttgtacatatgtttgctctttctttgtacagactatttagttggttgagaaaacaccgggcgtttcccacatttggttctttaccctggcgacaacaacctttcaaccagactaagccttctcctttatcctcacagaatcccaaagcccccccctaagaataattgcgaattccccgtcaacaaggcctttttttgccaaaaaattctatggaaggttaaaaaagatccgtaaaaagcccaagatggaaaatgggaaaatatcctcactggacctgaatgacaaaggggcaattccccattttgggaacgaaacggttagaagaaaaaaattcttttggaaaaaaacccctacaccttggaaattttcgtgggtacgagcgcgtcataaaaccgaggcgctttcccaaatattcc

SEQ ID NO: 359486 - DNA, 388 bp, Homo Sapiens
ctgctgtgtgctactgggcaactccccgaggtgtgccgaaagctccccaaacccagcctaccccaaacaaaactcattttccacccagactagtctctgcttccctgatccctttcctggaggctgtttccacttgccatcccatcatggaagccagaaaaccagtcttcttgacctctccccttcctcactccatggagttagaggtcctgttgattttgccatgtaaacatttcggatttgcttacttcatccccactgccaccaacagtgcaggatggccctaagaggagaagtaatgtgctaccaagtggcccagccagagtgtgaaccaaacagtctggtaccaaaaccctattctggatcattcctcctttctgctccacca

SEQ ID NO: 359487 - DNA, 700 bp, Homo Sapiens
  misc_feature (17)..(17): n is a, c, g, or t
  misc_feature (32)..(32): n is a, c, g, or t
  misc_feature (54)..(110): n is a, c, g, or t
ccttccttcttggaaangtgtctgcaaaaccntggcgggggaatacttctcctnnnnnnnnnnnnnnnnnnnnnnnnnnnnnnnnnnnnnnnnnnnnnnnnnnnnnnnnncaaacataccctacacacacacactcctccttacaacctcccatccatgggaagtccaagtttcagaaacaaaagtcctcattcataagaggtccttagaagaaaataaccagttaacctgatttcaattttgataccgttttcctgaactaataaatctacccaatgagacttttcagcctttgtacatacaaaattcttccaaaagagagaggagaaaatacagctctgatggcatcaaacggactttgcatcaagtaatttcagatagtgtcctaggatcctttgagggtgctggtagcaggtgagcaggacaaagttgaccaaggacacttatttctagattatgattcttctgtttactcaacaatttacaaagaaaaaaaggacagacattgaagagctacacattgtatatatatcaccacagactataaggaaatggaattatttccctctttgtcacatatctgtagtaggatttgccaagatcagaaatgaaccatttgctgtttcttgttttccaaaggtcatacattgtgtttggttattgttaccagctcaataaatgtgtttaacgagttaatttc

SEQ ID NO: 359488 - DNA, 1297 bp, Homo Sapiens
  misc_feature (355)..(432): n is a, c, g, or t
  misc_feature (1283)..(1283): n is a, c, g, or t
ttttttttctttgtaaattgttgagtaaacagaagaatcataatctagaaataagtgtccttggtcaactttgtcctgctcacctgctaccagcaccctcaaaggatcctaggacactatctgaaattacttgatgcaaagtccgtttgatgccatcagagctgtattttctcctctctcttttggaagaattttgtatgtacaaaggctgaaaagtctcattgggtagatttattagttcaggaaaacggtatcaaaattgaaatcaggttaactggttattttcttctaagacctcttatgaatgagacttttgtttctgaaacttgacttcccatgatggaggttgtaagannnnnnnnnnnnnnnnnnnnnnnnnnnnnnnnnnnnnnnnnnnnnnnnnnnnnnnnnnnnnnnnnnnnnnnnnnnnnngagagatgtattcctctgccatggttttgcagacacttttcatgaagaaagggccaatcccaagaatgaatgaggcttgggggaaagaaggagagagaagcaagaagggggacattctaggttacgtcaattcacagttgtagcatttcactgaggtgggattcttcttggctttgttccctacttgaggagccattcatttactctatactgaagcttctgggctcggttgtttggacagtccttcccctgtaaactgaagttgatattggtgcggatgcagcggttgttgagtggctggacaggcctgaagttgtcactcatgctcagaaagatctgagatggctggttctggctgagcaggcgcaaggaatgcatctgcatcctggttatatagacaggtttgttcattatgatccaacttgctgtctcatagcagggtgggatagtcatcgacccatcgtaagtgatgaaactagaggtctctggatatagttcctctatattaagcccctgtagtaaatatgcatcatttttatatgttattcttgtgatagtatctctgttgagcattcgattaagaaatgggtttgatgaatcagaaacttttataaatatagaaactaccaccaatccatttggactctttgcagcttctgtgacattcgtatatagctcatggttatagtggatgagctgcacctccccagagaaggcctgtccattgaggaggtgctccgacccttggctgtcctcactcccaaagtgtagtcggatctccttcagccggtggctgtatgtcatgggccctccagatatgttgaccaagtgctccttgtccaggcgaaggnatacgtgtcttcca

SEQ ID NO: 359489 - DNA, 504 bp, Homo Sapiens
  misc_feature (86)..(86): n is a, c, g, or t
  misc_feature (471)..(471): n is a, c, g, or t
  misc_feature (478)..(478): n is a, c, g, or t
  misc_feature (490)..(490): n is a, c, g, or t
ctggaagacacgtatcccttcgcctggacaaggagcacttggtcaacatatctggagggcccatgacatacagccaccgctgaagngagatccgactacactttgggagtgaggacagccaagggtcggagcacctcctcaatggacaggccttctctggggaggtgcagctcatccactataaccatgagctatatacgaatgtcacagaagctgcaaagagtccaaatggattggtggtagtttctatatttataaaagtttctgattcatcaaacccatttcttaatcgaatgctcaacagagatactatcacaaggaataacatattaaaaatgatggcatatttactacagggggctttaatataggagggaactattatccaggggacctcttagttttcatcactttacggtggggttcgatggactattcccaccctgctatggggacagcagttggggtccntattggnacaaacccgttntttttaaccggggt

SEQ ID NO: 359490 - DNA, 562 bp, Homo Sapiens
  misc_feature (48)..(48): n is a, c, g, or t
  misc_feature (94)..(95): n is a, c, g, or t
  misc_feature (398)..(398): n is a, c, g, or t
  misc_feature (477)..(477): n is a, c, g, or t
  misc_feature (482)..(482): n is a, c, g, or t
  misc_feature (493)..(493): n is a, c, g, or t
  misc_feature (509)..(509): n is a, c, g, or t
  misc_feature (531)..(531): n is a, c, g, or t
ttggttggtttccgtaaatttagctatatgtaagcttgcgtgctttcncctgttcttttaattatgtgaaactgaagagttgcttttcttgttnncctttttagaagtttttttccttaatgtgaaagtaatttgaccaagttataatgcatttttgtttttaacaaatcccctccttaaacggagctataaggtggccaaatctgagaacaattaaattcattttagttataataaatttaatatttgtaaatgtaacatagtttcagtgtgatttctagagctaattcaaaatagtattgatatattttatgtgactgcatttttggggaggggtaccgaaatcgttaaatttgttagtttgcaaaaatatcaatctttaatggggaggaattttncaatttgccaattttttccttgcatggggtttaagtatggctacaatatacagtttcgggcaaagttttagggtgttanttatncttcattactnaggtgtggctgccttnccggtggcctgggttttccttnctggtggcggggaaaattaaaccaaccggtt

SEQ ID NO: 359491 - DNA, 357 bp, Homo Sapiens
  misc_feature (76)..(106): n is a, c, g, or t
cgatcgctctagaggtccccgatttgttaaaacaaaaatgcattataacttggtcaattactttcacattaagtgnnnnnnnnnnnnnnnnnnnnnnnnnnnnnnngcaactcttcagtttcacataattaaaagaacaggagaaagcacgcaaggctacatatagctaaatttacgaaaccaaccaaagccagggggatttctcttctgattatgtgtcataaaaaggtccactgtcttatatacacatgtatataatgttacattccatcactgtaaaaagtcccctttgccccctcccccaaaaaagtttcagtctagtctccaaacttggaaagcggcgctcgttcctgctgc

SEQ ID NO: 359492 - DNA, 473 bp, Homo Sapiens
  misc_feature (257)..(310): n is a, c, g, or t
gcggccgccatggcttgccacatgcacatccccacctcgggcgcaccgggcagccctgggacgctggcgctgcgcagcccccaccacgcgctgggactcagcagccgctaccacccctactccaagagcccgcttcccacgcctggcgcccccgtgccggtgcccgccgccaccggaccgtactactccccctacgccctctacggacagagactgaccaccgcctcggcgctggggtatcagtgagggcggccggnnnnnnnnnnnnnnnnnnnnnnnnnnnnnnnnnnnnnnnnnnnnnnnnnnnnnncgggatcacggcccaggctgctgacacccgcgcgtggggaggactcgggccacgaaaggaaagaaatgtataccgtatctatctacccgacagcagcgaccgagacccggtgggacactccccttctccccactttcacctccccacccaaactttataaaag

SEQ ID NO: 359493 - DNA, 476 bp, Homo Sapiens
  misc_feature (226)..(287): n is a, c, g, or t
tccccacctcgggcgcaccgggcagccctgggacgctggcgctgcgcagcccccaccacgcgctgggactcagcagccgctaccacccctactccaagagcccgcttcccacgcctggcgcccccgtgccggtgcccgccgccaccggaccgtactactccccctacgccctctacggacagagactgaccaccgcctcggcgctggggtatcagtgagggcggcnnnnnnnnnnnnnnnnnnnnnnnnnnnnnnnnnnnnnnnnnnnnnnnnnnnnnnnnnnnnnntcacggcccaggctgctgacacccgcgcgtggggaggactcgggccacgaaaggaaagaaatgtataccgtatctatctacccgacagcagcgaccgagacccggtgggacactccccttctccccactttcacctccccacccaaactttataaaagttgaaaaaatatcatttgactttctatagaa

SEQ ID NO: 359494 - DNA, 810 bp, Homo Sapiens
  misc_feature (751)..(751): n is a, c, g, or t
  misc_feature (758)..(758): n is a, c, g, or t
  misc_feature (766)..(766): n is a, c, g, or t
  misc_feature (772)..(772): n is a, c, g, or t
  misc_feature (788)..(788): n is a, c, g, or t
cccaaggaaaccatgaaagtccccagggcctgcagtcaagtttctatcaccttccccgtgagaaggaccttagttccatggagatgaagtgggtgaggttcaggtagaagccacaggggcaggcatccagaatgaggccccctgaggaaccctgagtgctgaccagtgccggcagaaatcagttccaccctgtgccctgacactatatgtcagggtgacaccaactgcagcaggcaggagccacaggaaggaagacgtcatccgatggagcctgacatccccaggttcccgccctggtgagcaaggtcttcatttggctttggtacatatgaccctatacagggaacctagtgtgtatcactcaccagcctctttctgtatctggggaaaccaaggcagtgaggtgactgcactcacctagcaataaagtaggcctttggtgcacttgcaggcatgtcctcctctggggcagagagcaggttccttgctgaagggcagatggtggcaaacatctccctcaactgtttccctgggccagtctttagggagcctagggacaagggcccaccctcccccttccacgtgtgccaaatcagcacctgaagtgaggcatttccagcaagcaactccacagacccgagaaaggaagggctctagtgggaagagctagcatctcaccaccccaggtcccctgggcctgggtccagggccagtccagcttgcattgtggaccattattgtttgccagctncccacanattccctnctgttnaaccagggttccaagncatttgaccaattaggattgaa

SEQ ID NO: 359495 - DNA, 486 bp, Homo Sapiens
  misc_feature (418)..(418): n is a, c, g, or t
  misc_feature (430)..(430): n is a, c, g, or t
  misc_feature (438)..(438): n is a, c, g, or t
  misc_feature (472)..(472): n is a, c, g, or t
gaaaagaatctgaagaagaattagaagcccaaatttccttccttcaagggcagttgaatgacctggatgccatgtgcaaatactgtgcaaaggtgatggacactcatcttgtaaatattcaagatgtgatattacaagaaaatttggaaaaagaagatcaaattctggtttccctggcaggattaaaacagatcaaagacattctaaaaggttccctgcgttttaaccagagccagctagaggccgaagagaacgaacagatcaccattgcggacaaccactactgctccagcggccagggccagggccgaggccaaggccagagcgttcaaatgtcaggggccattaaacaggcctcttcagaaacgccagggtgcactgatagaggggatttccgttgattcttctgatttccaangtgatgatgggngcatgccngggttccttttccggcagggccagctttttgganccttagaggacttt

SEQ ID NO: 359496 - DNA, 291 bp, Homo Sapiens
aaaagacaatagtattacccatgggacaaaatttgtactattagcaagaatcattttgtgtctcatttagaaacaatttgacttttgttccagtgtttaaactttgacaaaaatggttttgaatagatctttataacctgatgccataaatacaagattctctgataccttcatttaatatatcaatattgggcctaaaacagtattctgtaaagcttaaattggtattaactatgatcatcttgatgtctatgatagataataaacaaggtcatacataccttactaaac

SEQ ID NO: 359497 - DNA, 538 bp, Homo Sapiens
  misc_feature (27)..(27): n is a, c, g, or t
  misc_feature (42)..(42): n is a, c, g, or t
  misc_feature (97)..(97): n is a, c, g, or t
  misc_feature (109)..(109): n is a, c, g, or t
tagttttaagagggtaagctgatcccnagaatggatcagctncattgggacagcctccgatttgacctctccggctgcaagccagggggcctgggcnagcccagggctntgtccttccgtgactttattaaagcaacatttgcccacatgtttaagccgcaaaggtattagcaatgcttgcatcattaataatcattcagttgaaggtcaagccccatagacacacactctctgctggtaagaaaccatagcccagaactgagcccaataaggttgtttgaacctgagagtgtgtaatggtcatttgggccaagcctcagctagggctgctgcctggacgcctgaggggcagcttatcacagtgcaaggggacagggtaaacagcagggggtggggtgtgagcttggagggcccctcccctggatttcctccaacacctgcttggatactaggcccactgtccctgaagggaatgtcagggaagtgtgcctgtgagctgaattaaaggactggcctttccagaaaacgtcaaaaaaaa

SEQ ID NO: 359498 - DNA, 1765 bp, Homo Sapiens
  misc_feature (521)..(535): n is a, c, g, or t
  misc_feature (931)..(931): n is a, c, g, or t
  misc_feature (979)..(979): n is a, c, g, or t
  misc_feature (1360)..(1402): n is a, c, g, or t
  misc_feature (1433)..(1433): n is a, c, g, or t
aaaaacttcccttttcctcaatggaatggacaattcattgcactgaactctgggaatctcaaccctgctccctgggaagctggaagagcacttggagatcctaagggaccacacccttcctccttcccctgcccacagaggcagagggcacaggaaagaagccgggccaagctcggaattaatgtgccacaagtgttgtggccttccctgaaactgggaaagtcccctggctggcccccgggggagaggggcaaatgcctccgggactgacactcccaggcagctttgccttctctcccctgtcatttccagatttcattacctcctacttgccattcacccatcaatgtgaaagtcagggtcacagctggtctgtgtgtccagttccctaaaagcctgttctgttgggcagcctgaggctgttgcccgaatcctagttcagttttttgacttcctttgccctttttcccttttctccatgcttaatggtgtgaggcgtcaggagagaggccaagtacatnnnnnnnnnnnnnnngcagattatctctagagagtttgagcctttgctggtcacattgccttctgaagaggagggagtattagattataaatcctctttattttggtcctttatgcttgaggttccaacctggagccacagtgtgtgagaggaggaggagagggagaattctgttctcccagagctgcacctgcctcgcagggccagcaccccactctcctgcctccagtggccctgccgcagatgtctcccaaaaagttgagcctttctagatggcttaggtggcaccatggctcagcaggaggggcgggaggcaccagggttcttgtttggaccctgcccctgggccatggccaggctgaccatggctacattgccaaacctctgactgccacagcttgcagactgagnagggtgggtctgagtccccacaatgtctgaagctgcccctgggattcntcaggccaacctgccaacagcaagccggattttcttgcaagatccggggaccccattttctggcacccggtggctcccgggccggccttcaggaggaacccaaccgcgcatcctagcaaactcagtcatggtccccaactccgggggggtttaaaaagcgcaagctttccgtatcaacaccgcacccccaggcgcctggcactccgaagcacctctttctggaaccaagaagtgctttggcgcaatctcccaacctacccagttcggccatccgccttcataccagggtctcgcgccactccctccttctttcaccgcgcatgccgtgggtgtcctcactcgccccagacagctaggagcgccgccgcgttccgtgttttnnnnnnnnnnnnnnnnnnnnnnnnnnnnnnnnnnnnnnnnnnnaccgggccactacttcacaccattcacaaanacaactagaagatcctccgtcatcgatgctgtcgggccgcgcgcctgtttctggacaattgatattgctctccgtgctgtgctgaccgcaaggcggccgccctatatcatatcgcggtccgtcctctgtcgttgttgcaatgccttctaatcgggcaagcgtgtcaagcagacatggtgttactccggcgtttaatacgcggcggatccagaggtggtgtgtggtatcgcgcccgccccactcatgagagttcggggtgcgcgcggtcaccacccctttccctctacctctgtcgtagcaatgccctggtgcacatgtgtatacctacggtg

SEQ ID NO: 359499 - DNA, 1375 bp, Homo Sapiens
ttttaaaactatgtcaaacattttatttggtgtttcatgctatgttgatttaaacaaattaaacaagtttgttgaacagctttcttttctaatataatgactatgtgtacatggacaactgaaaacagggaaaacccccaaattaatgttttcacaaattacaagccattactaaagaccatatgcctggattaaaaaaaatagtccaatagatgaagtctctcattcaacctagcagttcaaccaatttctcttttaataaaagctgcacattacagtggtataaatttatcttttaaacactccacataaaaacatgtgcaccctctccttctacatttaatcattagtagtctctaaaatggtaaaataaaactgaatttatattagcaaatgaaagtgcaagtttgtacagctaggctcagcagcaaaagtgaagaataagaatgaaaggtgaaaagctgacagatgccacgcagagcaaggacttccatgaaggtccgtgtcctgtgtgccaaacacagtcaacattccatcattttctcattgctcttaaacgagcaaaaccaaattcttgttctatttaaagaaatattaaatctttattttccccaacataatttgtgatcaggtaaggcaaagataagtccaccatcactggggacagcagcaacatacagacttcagaaatagccctgaatcatcagtaacattctatcgtggtaacatcagaaggaatgcagctaacaaattaaatttgtaatgttgtcacattattctaatttatttgattagtttatctggaaaaactttataaatacatctatgtaagagggcagtaaattattttccttgtctttgaaaaaataatgttttttcacattttaaaacattatagtctgcttttgcaaaaggagttgcaagaaaaatgtgacagctgggtttgcagaatgtccatgtacaagctgtatttataagaacctggtaatctgcctataatttgcttctacaaatagagctctttgcaataatattttaaaaaaacaggcttaaactcttctcctattcattctacttgtagaacaaagaggtacttatttttcaagtattataaaaggtaaaaaattttttttgccaattttacatgttaagcttttaagaccaaaaaaatcatgcctagtcagcccatttcttttataaccaaattctcttgtcttttaaagaatgcagaaaaatattgattgctaagaaggagcacactggaaaaagccattttaaagtattgaagaatgagacgtatttcttttttcctattgatgaaaattattagaaaagctatccagtctgttgtctttagctagttttaataaatctt

SEQ ID NO: 359500 - DNA, 545 bp, Homo Sapiens
agtttttccctatgaaggctccttttgaatgtgtcttgagacccaaattgagcatgttgctgttattcctgccctgcacctgtggagcaggagtggcagggctggctgtgctgggttccagctcgctcctgccgagggactagcttggcctttgcgctttgattccagatagtaagatgagtggaagtgtttatcgagcatgcaaaagaaaccctcacggctaagggctctgggagttgtgtctgtgtgacctgagagtgatccatctcctgcctgtgtgaggtagcagtgggcacttttcattgagacaaactccagggtgtccagagggggttctgccccttgtgaaggcccattcctggcacttagagacagaaagaactcagcaatctttcgttctagttatattcggtctttgaaactgacaatctttgaaatgtgaatactgtaacaatatgttttcttggattgttgtctttaaaaaggatttttgtgaagcaattgatttatcaaagcaaaaaaattaaaaatagaaacttgcttta

SEQ ID NO: 359501 - DNA, 499 bp, Homo Sapiens
  misc_feature (410)..(410): n is a, c, g, or t
  misc_feature (425)..(425): n is a, c, g, or t
  misc_feature (436)..(436): n is a, c, g, or t
  misc_feature (477)..(477): n is a, c, g, or t
cagagagggagctcatgggcatgctctctacatccttagctgaccaggatattttcaatgccgtcatcaaacaaaaccccttccttgtgtaccagctcccctgcttctggaatgtgcagctgtcagaccacacccgctccgagcagtgctacagagacgtgtctgatctaaaggtcattcactggaactcccccaagaagctccgggtgaagaacaagcatgtggagttttttcgcaacctctacctgaccttcctgggagtatgacggcaatcttctgaggcgggaactgtttggctgccccagtgaggctgatgtcaacagtggaaaacctccagtaagcagctgtctgagctggacgaggacgacctgtgctatgagttccggcgagagcgcttcactgtccaccgnacccaactgtacttnctgcactacgngtatgagcctgcagcagacagcacggacgtcaaccttggtnggtcagctgttccatggacaag

SEQ ID NO: 359502 - DNA, 371 bp, Homo Sapiens
tgattagacatcgctgctcctcaagctgtatctggagcattagcctaaaaaaatatctttaaaagtgctttgcaggtatcacctcatctcatggaaccatagagggatctaagaaaaggctactccaatctaaaggactattttcaagcaaaaatagaggaattctgtgtatcatcaatgaaagaagtttaggggaagggtatagtacatattacaataatttaaaatcatacgcacatttcactttccatgcacgatgattttaacatgaaacaatgtaactatacatcactgaaaatacaatcaagctttgccccagaacttacagccactctctatagtcagttaagaaaaaccctggaagaatatat

SEQ ID NO: 359503 - DNA, 914 bp, Homo Sapiens
taagggcctgcgtttacccgcccccctccgagtaccgggatcggcggtaccgcctctgtttctgcggcgattgaacagccgagctttgcggccgggatcgcggaaagtgatggctgtcgtcccggcgtctctctcaggacaggacgtgggatcatttgcatatcttacaattaaagacagaataccacagatcttaactaaggttattgatacattgcatcgacataaaagtgaattttttgagaaacacggagaggaaggcgtggaagctgaaaagaaagctatctctctcctttctaaattacggaatgaattgcaaacagataaaccatttatccccttggttgagaaatttgttgatactgatatatggaatcagtacctagaatatcaacagagtcttttaaatgaaagtgatggaaaatcaagatggttctactcaccgtggttgttggtagaatgttacatgtatcgaagaattcatgaagcaattatccagagtccaccaatcgattactttgatgtatttaaagaatcaaaagagcaaaatttctatgggtcacaggaatccatcattgctttatgtactcacctgcaacaattgataagaactattgaagacctagatgaaaatcagctgaaagatgagttttttaaacttctgcagatttcactgtggggaaataagtgtgatctgtctctctcaggtggagaaagtagttctcagaataccaatgtactaaattcattggaagacctaaaacctttcctttattgaatgatctggaacatctttggtcactgcttagcaatgcgaggacaacagagaaaaggttctgctactagagtggagaatggtccgataatctgggatggcgcttgtaccgatttaatagccggatcttgtgggcccg

SEQ ID NO: 359504 - DNA, 879 bp, Homo Sapiens
  misc_feature (809)..(817): n is a, c, g, or t
ccgcacagctttgtgaaaacagtgaagtgcttgcttactcctgaataaaaaaaatcactgagaaaaatttgatgatgaaatatgggagaattctgtttttacccttcccactgaaaatactcctctaagaacagccctatacccaccctctgatcctgtttcctccatcttttaatcaccctagcatgtccctccttgctgcttgtgacataaaaaatagttatttgtgctgggagtgtcctggccaaataagcagttgatacttgggtgtttacagggagaaaaagggaagtctcggttctatttctgagtgattcttctttaaatgaaatgagactgagctttggaatctcactgcatgatcatgtcggtagggcttagtcggcagcttaggattcccatgccaagagatcagtgtggaatgcaataagctttataaaatatgctttgggggctgctttgctttgcaaatggaccttacatgttacatgtcgagcaagtggctcacaatggcaatttgcaggacttagacattttccagtgcttgggagaatgaagattccataccaccttataggttttgaataaataaggttataaaacctctttgggatttgagcccagcaagttctacctgtagctgaagcaatgaataagagtttatgagaataaatactttaaggtattttaaaatactgtattttcagtacacataataaaaatatatccatacaatgatcttgatgctaccataatttttctctttaaaaaaataatcccttgaaagtgctatcaggagctacctgtgnnnnnnnnngaaaggcaaacttcctgggtttatagtactgctataattcttatgtcatccctagagtcttc

SEQ ID NO: 359505 - DNA, 706 bp, Homo Sapiens
agcgtgggagcattctccacaatgcattttttcatgccagagaaaaatctagaaaaaaatgaataaaacgaagaaattctttccccttggtatctgtagctaacttgcctaagtgttctttcccacagtttaagtcttcagtccatagttcataagcaaaggggtgtagcgagctctgatcttgccagaagagagaataagtgagctaccccacggtggacattctggccatctgaaatgagtcgatgcatgtggcttttgtctaaaggctacaaataaaatgtaaccactttcttctttgagtagttgatatagcaaatagttgaaacagaagttttgattggcaaatcaggatgtggtagatactttaacaaagagtagaactattaccagttttatgtgttgctgtttgtatctctttcacagttttgataatatcacatcctggaaagtgaaacagaaaattattattccattttaaatgactaaatttgctttcatggtatttacagtgaaagagtaaattagaacagtgaatggatgactgttcatgagaaaaagcagggtaaacaacgattcttactcttaattaattgaaaactattagggtcaaaacataggcttatgtctatgtctgtgaattgtgctgtgttgtagacatttgatgagtcctaacatagaattgatctagctcttgacaatacca

SEQ ID NO: 359506 - DNA, 1439 bp, Homo Sapiens
  misc_feature (13)..(13): n is a, c, g, or t
  misc_feature (27)..(27): n is a, c, g, or t
  misc_feature (34)..(34): n is a, c, g, or t
  misc_feature (43)..(43): n is a, c, g, or t
  misc_feature (67)..(67): n is a, c, g, or t
  misc_feature (90)..(90): n is a, c, g, or t
  misc_feature (223)..(223): n is a, c, g, or t
  misc_feature (234)..(234): n is a, c, g, or t
  misc_feature (240)..(240): n is a, c, g, or t
  misc_feature (1071)..(1071): n is a, c, g, or t
aaaaaatttaccnggcttccaattgcncaaatcnttttttatnggcttatgtatatggttcccctgngttttaaaatgtagtagatgccntaccatttttcagaaccaaggagcagacatgcattccatccttaagattgaaatttaggccacacttgaaagggaatattgcagtggcacttacaaaatcattttggtgccttcccacacataaatttggtgnattttaaaggnggccanttttaattttaaagatcactttctagaaaagggctaaacttaactttgtacactttgtagtttgatatgacaaatatatccaaattaacttatttttgaagatagttttgtttcttcgatacaataaaaaatatataaaggaccacataggcaaacacaaggaactaagatgaaagaaatgctatacatgcattttgaccaagtaaaagaaaccattatattcaagagtacgtgttgaatctgaaatgtctatgtaaactgtggcatataaatttttttccttaaaaaagtaccttcaatttttttactcaaacacttacttttaaaaaaatatgcaactttccccaatttttaaaataaaatgccacaatatagtgtcattacttccagcatacatttaaatttcttaatttttaaaagatagactgggtgatatgcatacaaactttcctataaaatcaccatccaggagaggattctgacatgctattaggcaacagactcaaagcagtgttattgctttatcaaggaggagattaactgtgagggaaaaaaaattaaatatccaggtccggtacatgatcaaactgtattacaccttgaaaatcttgagtcaccttcagcagatcattaacatagatggtacagaaattaagaattcatggtatgaattaagaatctgttttaactaagggagttgggtgcgtggattttttaataaaactactcactgatcccgatgcctgagtatgccaaataagcagtgctgattttgacaagaaatgagatttttatatttcacatgttatacatgaatgggggtggatatgncacgtaaaagccaagggagacggggccacagcatctactcccattttggatagtaagagaccatttaataacatacagtaggccacaatccaagggcatagttggaagacctgaatctattatcttattaacactaatcactaataattacatggcaggatacctgctgaggtaattgataaatctacaatttgcacacttataaaccttttacttctatttaaaagcattatttatttcaattaactaaaaattccaaaacttatcacaaaaaatgagacaactgacttagcattacctaaaattcccttatgttaagatacagaagtcagaaagtaccaacttgttgatccaaaaataataatttc

SEQ ID NO: 359507 - DNA, 652 bp, Homo Sapiens
ccattgccttgacttgctcttgaccaggccgctgatgctcttaagctgcttgtagcagagccggcacttatgcagcctctcctccctgctgatatccacacccacagagggtggggccgccagcatgtctgtgatgaggggcagaaaccgctgcaggatcagcttcagggaggtgcagcccgtctggacgtagctctcatacttgctctgcagaagcttctcaatctgtggcaggacggtggtgcacaggtccagcttccacagggaggctttctggttgacgatgttcaggaggtccaccaccaccgacaggtcgttgatggccacagcggagtccaccgacgtcttgatgtcgcccatggtccacacagcccgcacagggtccaggttcttgtggcggctggtgagcaccacacacatggtgtcgtggcctttgcggatctgtgacatggcatcctcgtccaccagctcggcctgctggcggatcttcacggcgggcaggaagtcggaggccttcagcccgatgggctcgttccgggctggcagggactgatggcaggctcagccttgcggtgcacgtgtcgcaaccaacccactgggggccgggtgcaccgacctccagatcctggcccccggcaacttgcccatccat

SEQ ID NO: 359508 - DNA, 1340 bp, Homo Sapiens
  misc_feature (17)..(17): n is a, c, g, or t
  misc_feature (44)..(44): n is a, c, g, or t
  misc_feature (55)..(55): n is a, c, g, or t
  misc_feature (95)..(95): n is a, c, g, or t
caatcccaccccacatnctgggccctgccacaatcaccctttangttgaaactgnaaacaggaaaccggaaaccccccaaggcggcccgaaccanagtgggtaactgggaaggccatacacactgggccagcaacactggacatgtttccatacagaggctcctttggtgatgaagggaagaaggatcatgtgtgggaagtgtgagaaaggatgagtgtccgattcggtgacggggggcagggcggtcgcaggggagcaggcctcacagcggcggacagtgttcactgctggagggggtgatggcctcggggccaagtcagtaagagcttctgtcttcactggcaaccaaccgggggttatgggacttcttaatggcaagaggggtgggtgttttgaaagtgggtatttatttggatttatagtaattggcaaaattcagtccttggaggcgaaagtacctctcccagttaatgggcaaactggagaaagggcctcacctggaaactgtaggattcacattgtggacgctgtctgctaaagtgagcaccattaagaccattttctagctgcagctttcctggaaaacagcacaataatctcttaagtggctcctggtagctggcaagaccatgcggtgctccaaaaggaagttcaggcgagtgttcgctgtcggggtttgatccgtggctacagccccagcaggtttttgggcacatagccctcccggtctccaaggcgagcccaccaccactcagtctcgctttcgtccttgcgcctcaggatggtgagggcgtccccttcgtggaaggacagctcgtcactgttctgggcctcgtagtcccacagagcatacgccacacctttgttcatcacacccagcttttcctgcaccccatatagaaactgggagcactggatgtagccttcctccatctcctcacacttgtctgcagcagtttcaatgtcgcttatggttgaggcaaaaatggcggcaccactctccaccagctgtttgcagaggtgaacgctgttacaagaggcagcgcagtgcagcggcgtccatccatcactatcagcagcattcacgttgacaccaaaatccagcaggaacttcacgatgtgatggtggccggcgcagacggcgttgtgcagtggggtgatcccttcgtcgttgggcttgctgggatcttccacctcatagatgatcctctgcaccagatcgaactctccttccagagacgcgtctaggagcagtgccagggggctaaaccggactctcagcccgtgccccgtccgctccgagttgggcttcttccaagttggtccgcatgtacgcttg

SEQ ID NO: 359509 - DNA, 439 bp, Homo Sapiens
  misc_feature (84)..(85): n is a, c, g, or t
  misc_feature (341)..(341): n is a, c, g, or t
  misc_feature (414)..(414): n is a, c, g, or t
tgctaagcgtcaccttaagaacagcacactcttgccctggggctcaggagctcgtttgtcctgtctgtcctgcaggtcttaganngggccggcagcaggagcagcagctgggccgggcaggggaggtatcgggtgggggccctagtcttcaatagtgtctcatctccctcgctggcctctgtggggcctgctgagagcagcctcggcagcagcacgactgtttcctgttcctcgagcagggtcccttgctgcaggccaccctctgctgaggcctgaccattgctctctggctccaggggtgcaggaaaagctgggtgtgatgaacaaaggtgtggcgtatnttctgtgggactacgaggcccagaacagtgacgagctgtccttccacgaaaggggaacgccctcaccatcctnaggcgcaaggacgaaagcgagactt

SEQ ID NO: 359510 - DNA, 2317 bp, Homo Sapiens
tgcgtgtcgtgtttgtctgcagtcagctgagctaaaaagctgttgatcactgttgttttttgaagtgccaatcccatgccatgcagtattatgtccctctcctatctgtgtattacacattcccctctcccctgtatcaaaaccatccatctgtgggttcttcttgacagttctagaacagccttgcaaattaatacaagtcccaggcccaatgcctaagagaccagacgtgggcaaagacaagtttggatgaaaaggtgttatcacagagccctgtccagctcctagaattcctcaggccagtgacacttttttgctgctggccacccatgcctccgatgagaacacttgccaatttggccagcagaaagagagtaggccggatgttttcatgagcccacaaatttagaaactctcctagtagtactttttctctatccatttaagagacaactacggtcaaaagtttgagccattctcttctaccccttcagtgtctgaccctttcactggctcttatctgtaaacacagggaggcaggtatggatttttcacagtagacaatgggtcaacagcatgagtttgaggacctgctgtgaagatttctcctccaaaatacatctcatgggcaggattcttcctgctccatatctgtttcaattttaagaaagcaccacatacaagacacattcagaagtcattcctgagcattgctggtgtttgcacacttgccacctgcattaccaattctgtaaatttcaattcctggtggaaagtgaccactttgaccatggatttcccaaagaagagttcctttgcagaccataggtggaaaagtcaatgagcatctccttccttgccaaagcatgtcccaacatgtaacaaactctagggatacaaaaggtttatattcagcatctgatgtcagatgtacagttcctcccctcccatatataaacccccggtgtagaatctgcagcgccctgctcttcggaaaccaaggaacaagccacctgctcacacaccttgttcaacttttcagctcctaaggaaccccacccccatgcaatttgactgtgcttgagaggtgaatacagttaccttcgagaaacagagggagctcctcaccccgtccttccagtccttttggctaaaatgcttaactatcactcacaaacaaatgtggagataccaggagctcatttgattcataccccaactttgtgttctgaaaaacatcagagggattttacattgcccagtttctccaccaacaagccttagggtggacccaaccctttccgcaagtggtaggaacgaatgcatcttagcaattacctgatttccaaagtccttttgtagcaaatgtcacctcattcgtggtctttttacctatcctaagcttatgatgatgagttatgtatgccaaatatttatctggaaggagtttctcctcattgtgaatgtgtatgtaaaatatgaagacaagaaagggtgctttcatctgaggaaccaaggggtgagagtatcccaaaggaggacaccagcatcatcttttcttcgtactccaggacccaccaatattccagttctgggtcatttagagagataatggggcgtttattcccctattacctttgctaagtgctatattattggctgtttctcccgtaaccatgctgaaaagggggtcttagggagaactgtcatccaagtggcattcctagtaagttgggtagaaatgacattttccagagctgaaggagtgaagagcccttggccatactagggctctccttcccccggggagtgggaactcagccacattcagaattcacatcgcctttgttatgtccagaggagaggcataaaaaggcactctcccccaccacccctaccaaatctgggtttggtttggttttatttaactagcaaagttaatccagtaatcgcaaattactccagatggttaaagaaaaccctttcagaatacagaacgagaaaactagagtttgaccaataagaccaatttctgccatgaagaaccgggggacgcaagttaattgtttaacgtactctcattttaagcaccttctttcctgtctcttgattgttttttctgaaggaagtgtaaagaatgtctcagtctgccttaaaggaactgtgaaggcttctctgtaatttaagcttgattgaagtgaactgaaacattgtctaatgtctttgtggctttagagcttttgttatattgtgcctataaagcaaattatgtttacataaaaatataaataaagtattcagcatagcaaaccctaaa

SEQ ID NO: 359511 - DNA, 752 bp, Homo Sapiens
  misc_feature (688)..(688): n is a, c, g, or t
  misc_feature (706)..(706): n is a, c, g, or t
  misc_feature (714)..(714): n is a, c, g, or t
ccctggatatgacataaaaaggattttggcttcttttttgaagtatttaaaattaatcaccttagctctaccatatactagatctgtgaccgctacacaaattgtttatcatctttgggtctctattgccttctttataaaataagtgtaagttgttcagcctgcctcacagggctgttgtgaggaaataaaatgaaatggagtatgtgaaattgcttcagcaacagcaaagtgctacgtaaatgtaaagtgttgtttttagctaataatggatttaagtgtttggataattgtagatgcatttactttgataaagcgtgtgcttaaagtggtatcaccagtgatttctaacatgattttaaaaaaataaaaccccaattaaaatgttctttaatattcatttaatttgtgcatgacttgtggcctttttgtattttctcaagcctattactctagagctgtaaaagctcttgcacagcattgttgtgtcagtgtagaatagtggcataaataaatgaattaagctacatttccatgcaggcatttgcactttgaagttagggctgcccagtgccacatgcaaagagtgtatttggtctaaacagttctttccaaacaaccaaatggctgggcagcttgttgtcacggataaattgatataaaatggtaaccactgaaccatttgacnactttggttgccattaancatttttnaaaaaaagatggaagcatttccaaaatcctggttaacc

SEQ ID NO: 359512 - DNA, 881 bp, Homo Sapiens
  misc_feature (721)..(737): n is a, c, g, or t
cattaaatgataaaaagcacctcatgagattcccttgatcagccctgcagctgtagtacaggtgctgtgccctcacctccacccttcctgttgttcccacgtgggcaataccagggacccatggggaaactcaagaatgacagcttctatattttgtaattctggatgaaagataactgtgttgaacaaacaggtgctccaggctttgattatagatacgacttcaaaaatatgctaagacgcttgacttattaaggactttaacctactcaacagtatttcatatccatgtggttagttactcagttatgtgagaagaatctggagctaaaagcagagatgtttgaggtgacggtaggaatgtgagcaggatggtgatgggggtttttgttaaaatgcatctgagcaagtcagccagccccgaagtcccctcagtgtgtgtgtctcgagtggctacctgttgggcttgtgggcagtgattgtacagagcctgtccattgggtgcagtcatgtagatctgaagccctgaaaagcctcatgtctgcatcccctttccaaggctgcttccctggtgtgtctgttctctcctctgtcccaggtgctgggagcgtcctcttcagcgtcttttcctagagctggtcaccactaggctgtcactatacaattccttgaactataagtaaacagttattaatgaaacttctaacactttctaaatttnnnnnnnnnnnnnnnnnttatttattaaaaggtcgctggtaaagaggggcctaacacacatttggggcaattctaagagacttacgcaattttagaaagctcaaagaagcctaccagaggactagattaagggagtccccgggcgagtcctaaaccccctg

SEQ ID NO: 359513 - DNA, 1033 bp, Homo Sapiens
  misc_feature (948)..(948): n is a, c, g, or t
  misc_feature (971)..(971): n is a, c, g, or t
  misc_feature (989)..(989): n is a, c, g, or t
  misc_feature (1006)..(1006): n is a, c, g, or t
tcaagtggtatcaccctggaaatacctatgcaatccagtctccctaggagagagtgcatggaagcaggggtatgtgcagtgtagaatacagatgctacagcatatatgttgtatatatggacatatacagtacgtatacacacagagtaagagagtaaatcacgtctatatatctataaataatatcctatatatttatacatttctatgttttaaatagatataaaaatagagtctatagagctgggagagcagtgggaagcctggcgctgtgctgtgcaaaggggaagggagcacggccttcggagagggagccggggaaggccagcaggcagggttggctggcaagggggcctcctacccggagtgttggagaggagagtggctgggtcccggctcgctccatgcactttctctccttttccacaggcttggtctgaggttggaaggagataccccctgagctccagctgaggtgccccctacctctccccacccccacagcccacgcttaggcggtcactgctgcttggcagtaggacgtggtctctgactcctgggtggagggaccactgcacaaactccttcaaaaccctcccccaccagggactgagcagcgtcagtggcaataggaaaggtccaaactggatcaagagctggtccaggaaagataccgcccctgccctgttagatgcttctgctgcccctagaggccaagcccctgaagtgcagccgtcctggcctccctcacttgctcaaccactgtcaggaggagaggatgtgggcagcatgagcatcgccaggcagcgctgcccaccatccacaggctttctggccagggcagggggcatcagctagcaggaaacggtgggagagacatattttgcacacttcataaattcaatggcttacttccagttccagaagcagggctttggccaggcccgnttccggcagagcttgctgttggnttgtactcaggacaacgntgtttccccttccttanagagggccccgtgggcccttacccctt

SEQ ID NO: 359514 - DNA, 1827 bp, Homo Sapiens
  misc_feature (23)..(23): n is a, c, g, or t
  misc_feature (31)..(31): n is a, c, g, or t
  misc_feature (40)..(40): n is a, c, g, or t
  misc_feature (66)..(66): n is a, c, g, or t
  misc_feature (128)..(128): n is a, c, g, or t
  misc_feature (1001)..(1001): n is a, c, g, or t
ggatagacacccaaaggcaaggnactatttnaaagttttnaaactgagttataaaatgcatctggncttctgaacaaagagggaaacatagaaaaatgatacagattaaagtaaggaattcatccctntgtcgtttgcaaagtctcttaatcaactcaacagttagagagtaaaatgactacatttgtgactgcaatctgaggacacagtaaaggacatcttggtgaaacacacacacattataacccgagctgcctgaggagtttcacatctagggcatgcacatatttcatactgatacagtttacaacaactcaagggagaaagatcataataggtacatgggaaatgtcaccaaatctatatacaaacgcattaacagggagaacacatgaagtcaaagggagacccaaatacaagtttaaaaatacatttgaaaatcattccaaagccaaggaacttatttactgaaaactctgacattctacagaataccttgaaaaccttaagaatgcagttttaaataattcacagtctcaaaagaaaataaatttctggtttatcatcactgcttggctcagtctgcaaaacagaattatctgaacaaaactggtcaacgtggccatagtgaagagccgtgcatgccccctctgggatgccccggccttcaaggccaccccctttcgtgttcttcaggtagcctgcgatgtaggagccggtggagtggcgattcactgcaggggtgggtgctgagggtttgtttctaagaaccactcctgccccattgctggggtttggaactttctgcttgttggcttcctgtttctccttggcacgactagcaatattgcgcactctgctctgacttctggatgacaacttcctgaccagtgcccgggggagctgattggcatcctgctttgaatatagcacttggcagttgtcttcctggtcaaaggacacaagcttccgaagctgctcggtcagggcatctataggcntctaacgactttgtcttcacagtcacgcccttcttgtctctaatgccagttgtaacaaaactcttactaatacactggtacttgctctcaaaattgcaggcaatgtcctctgatgttaagtcccccagacttttggatttgcaaggactaggcagtttcagagcaggcaaaggaagatgtgccaactgcttgggtacagggacatgcatatcttgagcactagattgctggggcacacaggtctggaacatttttgcatctgaatctgagaaatgattatgcacaaagccagcaccctgataggctagataagaaatactttgagaattgacatcttgaatattgttgaatatttcagggacagaagggcggagggtctctttacagtagccgtttctcaaacctctttgaaagtgttctaccacaccctgattgtacttgagttttaaaggagaagcaagttgacttgtgccctctctcctatattcacaggttgttagagaaagattttctgattctccatcaatttccacaaggctgctctccccagaattgaaacagagagtgggatcagctattacatcctccagggtcaaatcaggggaagaggcagggctgcagctcttcagtgtttcccagtcttctcccttggtaggactttttggtaaccagccacgagaagtattaggggatccaggcaggttgctttctaaggccgctgtcctggccttactagaaaggtcatcatctggtttggttttagagatgggagtgcaggtagtttcataaactgtgttcgttgcatgtttggtggtctcagaactcg

SEQ ID NO: 359515 - DNA, 533 bp, Homo Sapiens
gcttgcggccgcccgtgccccgccgtcctccttcccgcggccgtgagggagaccgcggctcggccgtagcggagctgcgagttacagaatgtctgaaggggacagtgtgggagaatccgtccatgggaaaccttcggtggtgtacagatttttcacaagacttggacagatttatcagtcctggctagacaagtccacaccctacacggctgtgccaggtgggcaggcaggagcaaggcctgcgagggaggaacgggccgctccccgccagccgccttccccagcagccgcaggtggtgccagccactccacagagcccgagggatgatctagcctgattcctgcgtgtccgaaagaacttaacgttttaaaggtgattgtcaagtaactgtgtggggttctaatgccagtttcctaattccatctcactggagatgtttaaagttggcctctatcctaatgactcaaaacttggttcttaactaccatgattgcttttgagggcccggaattataaatatatattatatttt

SEQ ID NO: 359516 - DNA, 1502 bp, Homo Sapiens
ggcctgggtggcgaattccgcacgaggagtgctcgctgcagcttcccggagccggagcgcagcgcctgcggccgcccgtgccccgccgtcctccttcccgcggccgtgagggagaccgcggctcggccgtagcggagctgcgagttacagaatgtctgaaggggacagtgtgggagaatccgtccatgggaaaccttcggtggtgtacagatttttcacaagacttggacagatttatcagtcctggctagacaagtccacaccctacacggctgtgcgatgggtcgtgacactgggcctgagctttgtctacatgattcgagtttacctgctgcagggttggtacattgtgacctatgccttggggatctaccatctaaatcttttcatagcttttctttctcccaaagtggatccttccttaatggaagactcagatgacggtccttcgctacccaccaaacagaacgaggaattccgccccttcattcgaaggctcccagagtttaaattttggcatgcggctaccaagggcatccttgtggctatggtctgtactttcttcgacgctttcaacgtcccggtgttctggccgattctggtgatgtacttcatcatgctcttctgtatcacgatgaagaggcaaatcaagcacatgattaagtaccggtacatcccgttcacacatgggaagagaaggtacagaggcaaggaggatgccggcaaggccttcgccagctagaagcgggactgaggctgcctcacgtgttgcaagaacagttttgagccattgttaacaatgccttttttcttcacataaagtagttgattacgagggagtcaaattttctttttaaaaaggagcttcaatgatttgtaactgaaatatcaggttctagaagaaactggcgcttaaaccaaatcgcatggatttctttttcagtgacgttcaagtgtttctcacggatggaattctagtcagctgcaggcgggaagccaggcgggtggagcccatgggagcaaagggcgagtggccggtccccgctgtgccaggtgggcaggcaggagcaaggcctgccagggaggaaccggccgcttccccgccagccgccttccccagcagccgcaggtggtgccagccactccacagagcccgagggatgatctagcctgattcctgcgtgtccgaaagaacttaacgttttaaaggtgattgtcaagtaactgtgtggggttctaatgccagttcctaattccatctcactggagatgttaacaggtgggcctcttatccctaatgactcaaaacctgggtcttaaactaccatgaatggctttgagggccggaactataagtactctattaactacctggtggatttttggaccatttctggcactcggggctgggaaataacttgccctggcacctctaggcgcgcatgcggccgaggtggaggacgctccccggggacgggcccggtgcggttggggaaataccg

SEQ ID NO: 359517 - DNA, 919 bp, Homo Sapiens
gagggagtcaaattttctttttaaaaaggagcttcaatgatttgtaactgaaatatcaggttctagaagaaactggcgcttaaaccaaatcgcatggatttctttttcagtgacgttcaagtgtttctcacggatggaattctagtcagctgcaggcgggaagccaggcgggtggagcccatgggagcaagggcgagtggccggtccccgctgtgccaggtgggcaggcaggagcaaggcctgcgagggaggaacgggccgctccccgccagccgccttccccagcagccgcaggtggtgccagccactccacagagcccgagggatgatctagcctgattcctgcgtgtccgaaagaacttaacgttttaaaggtgattgtcaagtaactgtgtggggttctaatgccagtttcctaattccatctcactggagatgtttaaagttggcctctatcctaatgactcaaaacttggttcttaactaccatgattgcttttgagggcccggaattataaatatatattatattttaattgtttgagattattttgacacatttctttgatacgtagagtgttttgtttttaatttaaatctgtcctcatgcaaccctccatgaggggcagcgaagtgccaggggagcagactggctttgtaggttcagcactcggccccccactgcgggagaggcggaacccacttgcatgtcagcgtttttgattcgagaaaagaaatactctcaacgttttaccaagtgattttacctccacctttactaaagtctttacctaaaacatgggcagtcgctggacacagggaaagcccaccttttgtttggccttttccgaaaggtgacccatattggcacagcaggaacatcacagctgtgggtcccagatggaggacattgacatgg

SEQ ID NO: 359518 - DNA, 628 bp, Homo Sapiens
  misc_feature (545)..(545): n is a, c, g, or t
  misc_feature (563)..(563): n is a, c, g, or t
  misc_feature (579)..(579): n is a, c, g, or t
gtgctcgctgcagcttcccggagccggagcgcagcgcctgcggccgcccgtgccccgccgtcctccttcccgcggccgtgagggaaaccgcggctcggccgtagcggaactgcgaaggaagcctgtgtacctgctactttttcctgaacaattcatgttacagaatgcctgaaggggacagtgtgggagaacccgtccatgggaaaccttcggtggtgtacagatttttcacaagacttggacagatttatcagtcctggctagacaagtccacaccctacacggctgtgcgatgggtcgtgacactgggcctgagctttgtctacatgattcgagtttacctgctgcagggttggtacattgtgacctatgccttggggatctaccatctaaatcttttcatagcttttctttctcccaaagtggatccttccttaatggaagactcagatgacggtccttccctacccaccaaacagaacgaagaattccgccccttcattcgaaggctcccagaatttaaattttggcatgcggctaccaanggcatccttgtggctatngtccgtactttcttcnacctttcaacgtcccggtgttctggccgattctggtgatgttcttcatc

SEQ ID NO: 359519 - DNA, 485 bp, Homo Sapiens
  misc_feature (60)..(60): n is a, c, g, or t
acaccacaggggacctgggaatctactgaggatacagatttcccacaatccgagactgtntgtctgcctgattgttacataattttaattgggtgccacacaccgagagaggttgtttactggtgggccattcggtttccagtaaaagcccttccactcactgtggcatggtaaatggagctcatcacatggtcccttcagcctttccttgaatcatttccaccccttccctaattaccctctgtgatccctttcccggcaagggtccttctagccttgctaccttggtaaacctgtggccttaggatcgaggtgtggacattaacttttctgctctggcggcttcctgggctgtcctctccatgttcccagcactcaggggcactgtcctttcctggcagcctagtaaatcccaggcctctgttttgggccctttggcttcttggtgcctgttatgctgaagcgtagaagtgtcttagtcagag

SEQ ID NO: 359520 - DNA, 1117 bp, Homo Sapiens
acctcttgcaggccagggcagccccgggtgcccccaactatgagggctctgacatggtggagagtgattatggcagctgtgaggaggtcatgttctagcttcccattcccagagcaaggcaggcgggaggccaaggactggacttggcttatttcttcctgtctcgtagggggtgagttgagtgtggctgggagagtgggagggaagccctcagcccaggctgttgtcccttgaaatgtgctcttccaatcccccacctagtccctgagggtggagggaagctgaggatagagctccagaaacagcactagggtcccaggagaggggcatttctagagcagtgaccctggaaaaccaggaacaattgactcccggggtgggcgagagacaggagggctccctgatctgccggctctcagtccccggggcagagcctgattgactgtgctggctcaacttcaccaagatgcattctcatacctgcccacagctccattttggaggcaggcaggttggtgcctgacagacaaccactacgcgggccgtacagaggagctctagagggctgcgtggcatcctcctaggggctgagaggtgagcagcaggggagcgggcacagtcccctctgcccctgcctcagtcgagcactcactgtgtctttgtcaagtgtctgctccacgtcaggcactgtgctttgcaccggggagaaaatggtgatggagggcaacaaggactccgaggagcaccaccaggcctcgggccccagaggtcccactcctcagcctacacgcagaggaacgggacccacctcagagtcacaccactggctgccagtcagggcctgccaggagtctacacagctctgaaccttctttgttaaagaattcagacctcatggaactctgggttcttcatcccaagatttaccaggcacttttggacaaaggaaggaaggaactaatacttcatttaaacaaattcttaggcactttattgaccttgctgtctggatgagtatactcaatgggatatataattccctagaaacaaggaagtctgaactcctatttagggaccggatggaagcagggagctggaccgagatgtccaggctgga

SEQ ID NO: 359521 - DNA, 947 bp, Homo Sapiens
  misc_feature (44)..(44): n is a, c, g, or t
  misc_feature (48)..(48): n is a, c, g, or t
  misc_feature (66)..(66): n is a, c, g, or t
ccattttccaaaatcttcagttttaacaaaaggcgcagaataanctantaaatctagatgttttcncattattttgcatgagtgtcaaatactatgtaaaaattaacgtaaaatcttaagttggccaaaactagtgtctctaaagatcaaaattcttcactcttttagcatggctgataaatcttttctgcctttgtcactaatgcttgtcaaaccaaagaactttgcaaaagaatatgcactgctgaaggaagacagtaccaaaaataccatattgaacttcggtcttaagacacacacagttcctgttggatactggactgtgaaagtttattatcttcagtcttttcatgtcctggagcatggcaagtagtcttccgcttaaataaccgaagactcaatcgaagtaattcattgtctaccattggagcactcgtgtaagcttgttttatggtgcccttctcatttttaacaagctgctttcgaattgcagaatcccgtctgaagcacaacgccttacaacatgggccaagattactaagaagacttgctctttcttcttttcgtagtaatgcagccatattgagagcccccaattcatgttcaaagagattgtctgcatctttgggtttttctaaaagtctctgacatgtttctttgactttggccaaagagttcagaacctgccaactttttagaaatcccaactcttagcataacagctccaggtgtgaattttaagagtgcagccccaggctctcgtggttcttttggatgctttggcataagaccagaccaatccacatctatcacatctaagggatctggcatcttctcctcatcctgttggtcctccctcttttctgcatcacctgccagaatttcatctagttcgtcatcactgattggctcgtatccttctccagcaccagagcctaatgaatgtg

SEQ ID NO: 359522 - DNA, 951 bp, Homo Sapiens
  misc_feature (131)..(156): n is a, c, g, or t
  misc_feature (859)..(859): n is a, c, g, or t
  misc_feature (877)..(885): n is a, c, g, or t
gggattatcgccaccatcacctctttcaattgccactttctcttcttttgaatttgaactctggagttactgttctacagtttggcggggacggggcttgggggttttctcttttgtttgtttccctttcnnnnnnnnnnnnnnnnnnnnnnnnnngctggctttgcgttaggatgctctgatctgacatttgacatgaacacaaagttgctagatgctcttgttgacttccagcagatgggatgggggaaacacagcagttcttggtaaagtcctttgtaataatagtttgattctttttatttccagagaaatctttcatttgcctatggatgccttttttccttttttgcccagtttccttatcacttgctgtagatggcttattttgcattcatgcagactatgttgcaagtctgtttcatctagtaaactgaaaattattgcttaatcaaactgccgtttgtcttttatatttaaggccttccccccccttccttatgagttctaacttagtaatttcaaatgtgaccttttatatctaagaccagtatagtaaacttagcccacagtggcaaataatgagtaatattgtaatatgttccagttgcacctcagtatgttaaacaggtaatgtaagaagttctctgaaatgtcagcaagtaagttctgaaacacatcatgcatgagtaagaataaaaacccaaggttccccataacgtagataacttaatgctgcataaaaatatgaaagtgtaacccatgaaagacactttttctttcccctgcaaaggtagccactttgctgttttttccttctttttaaaccttggaaaaaagactcctttccaaaaatggnagcaataatggtggtttnnnnnnnnnggatttaattaatttgtgaaaaatttttaagggaacttttggggcaaaactggaatggattacctt

SEQ ID NO: 359523 - DNA, 1724 bp, Homo Sapiens
  misc_feature (252)..(253): n is a, c, g, or t
  misc_feature (255)..(256): n is a, c, g, or t
  misc_feature (258)..(259): n is a, c, g, or t
  misc_feature (261)..(263): n is a, c, g, or t
  misc_feature (265)..(269): n is a, c, g, or t
ccaggaaacgctcttcgggtttttccccgcccccggggcctttttttcctatttgggtggggagaattcccaaagcccccttagtttcatggccccaagggatttttcctaagggaaacccagccttattggacccaatgttccccctttacccttaactgggggccccgcggccgcccaaaacgaaatgggttctagaaaagacttcctccgaagggcccgagggcgggccgacaaagtttcttttttttnntnntnntnnngnnnnnttccaagagcaaacaaccaaactttatccagaaaagcatatttgtaatcaccactaaacaatgaggcacatcggtcccctctccccaaccaccctcactcttcccaaacccactctctcttttggcttttatagaacactgtagaaatcctttcctgagtctgcaaatggccccagactgggatgggagctgcccagagtagtcttgggctggactgagtcctggtgcccagagagggagacctatgcaactgcctccagtatccaaaagttctgggggcaggtcgggtggccacccctatggcacagggccttgagggagggtgagtgtggtggcggtcttacgtgttcttctcatacctggcagacagagtgagcacaagccgctggaagccaagcgggaaggcacatctagaagggcagtgagctctggaatgctacaggcacgtgtggatggatgaggctcccatggcggccaaggaggatatctgctcctgagtaaggtccacctgaccacagacagcacccaggggctggggggctaagaaggagatcttgagaaggatggacctgagctaaagatgtaacttagatggtgatctgaaaaaaggaaaaaagaataaacgctggaactcaaatccactgtttagggtacaggagtacacagctaagttccaggtatccagaatcttgtgtccaaatcatagcacaaggagaacaggaattctcttgagttaaggcaaaatcaatcttcacccatctgggctcttccattgcatggttttggaaaggaaggggctgggcagagatcattcctctccccatctccccctactgccagtgaagactctgaaagcttctgcaggccaaggccagaatggtgttgccagcccagggcagcgggccctgagagcggtcggtgtgaccagctctgggaatctccatggcctcagcaacatggaaaccttacaggcccagccagcaggtcaccccagcgccagagagtggttcttctctttggtaagggagacccaccctgtcagctgctccagatcagtgccgggatctcttgcaggtgactttcctttagcctgggaaaaccatctgaataactttggcttcatttctccaacaatgtaaaggaatgttcaaattccccagttcaggtctctggctagaggcagcaatctacttcctcactggggtgggtcccctccctctgctagagaattccctggggaagaaagagaaggcgccccccaaatcttcaaacagaacacagccaatgggttgggccttcggcatgaatgagagccgggacagcacagggatgctgggaatcttaaggtgggaatactgctccaggcccaggagcagttaatacagcaaactaaattatttctgtaacagcgggacttctcagtctttgataagctaatgagcatctccaagaaag

SEQ ID NO: 359524 - DNA, 476 bp, Homo Sapiens
  misc_feature (72)..(72): n is a, c, g, or t
  misc_feature (95)..(95): n is a, c, g, or t
  misc_feature (139)..(139): n is a, c, g, or t
  misc_feature (147)..(147): n is a, c, g, or t
aaaacccatccaaaagtgccctgtaacaatcccaaaactcaatgccccttcctaaaatgtgcccttccccgncttggcttcccaacggcttgtgnctcactctgtctgcccaggtatgaagaagaacacgtaagaccgnccacccanactcaccctccctcaaggccctgtgcccataggggtggcccacccgacctgcccccagaacttttggatactggaggcagttgcataggtctccctctctgggcacccaggactcagtccagcccaagactactctgggcagctcccatcccagtctggggctatttgcagactcaggaaaggatttctacagtgttctataaaagccaaaagagagagtgggtttgggaagagtgagggtggttggggagaggggaccgatgtgcctcattgtttagtggtgattacaaatatgcttttctggataaagtttggttgtttgctcttgg

SEQ ID NO: 359525 - DNA, 704 bp, Homo Sapiens
  misc_feature (414)..(424): n is a, c, g, or t
  misc_feature (466)..(466): n is a, c, g, or t
  misc_feature (493)..(493): n is a, c, g, or t
  misc_feature (530)..(530): n is a, c, g, or t
  misc_feature (580)..(580): n is a, c, g, or t
  misc_feature (599)..(599): n is a, c, g, or t
  misc_feature (602)..(602): n is a, c, g, or t
  misc_feature (622)..(622): n is a, c, g, or t
  misc_feature (638)..(638): n is a, c, g, or t
  misc_feature (640)..(640): n is a, c, g, or t
  misc_feature (673)..(673): n is a, c, g, or t
gctttgaggttgctgaaaggggagtctgctttactgtggttacgttaggacttctcgaagttctgtttcttaggcggtcatatgccctacttttagtagcaacatgactaaggtctcaaaatcaatgaatactttgcagagttggtggcattcattaagcatttactaagaagcacctacgtgccagatttgagtttgattctagacatgtagaatcttttgagtgccatccaacctcttgaatactttgatggctataaaacaaccctcaaatgttgaaccaaactagaagtctagtttctgacttctacacattggtaatgtaactctgtggcaacactgagcaagtttattccacatatagtaagactccccttccccttcccattccatgagtccttaatcccatttgcnnnnnnnnnnncttggagacaagggtcactctgtcaaccaggctggaatgcantggtgcaagcatggctactgcagcctnacttccaggctcaagcaatcccctcacctgtcttcanagtagctgggattacaggcatgcaccactcgcccaactaattattaaaancttttgtagggaagggggnctnactggtacccaagctggctnaaactcctgggctcangnaatccacattgggaccctaaggctgggatacangcatgaaccactggacttaagcccatttggt

SEQ ID NO: 359526 - DNA, 817 bp, Homo Sapiens
agcggcgggggcggggccaccggagtgcctaagagctgtcttccgatgtcgctcttcctttcccgcgcgaccggcgagggaggaagaagcgcgaagagccgttagtcatgccggtgtggtggcggcggcggagactgcgggcccgtagctgggctctgcgaggtgcaagaaagcctttgaggtgaaggtgtatgaaagtcatcataacagatgttttccaaaaacttgtagaaggttgtgaaaaaactactaggatcacgcggcatgtattgagcatataggttgctgtagatgaatgttcttagctgtcatgtttaaaaatacttctgcttcgttacctcaagtgtggcatgcagcattttggaaggaaaattgaagacgtgttcaagaaaacatgaacagaagcaaatgatgaaaatgagcattttacttgatgttgataacatcacaataaattatggagaaaaatacatatttggctaacttttaattgctgaacaataaagtgttttcttttaaatcaactctaaatagctccattctcatagtcactagtcagacctgttttgaacatattcgaacagattataatcttgtcaataattagcttatttatgggtggtgattctcattgaggctgacagctggggagacattgcttgtacctctaggttccctgtctggcttccccttcagagcctgctgttgtaccaggtggttgaatcttaaaactctttaataccaaatagcaatcaaattcccccttacagatacaggtttcaccttttttattcagtttgctttcatctttgtgaac

SEQ ID NO: 359527 - DNA, 706 bp, Homo Sapiens
  misc_feature (689)..(689): n is a, c, g, or t
ggacaagaataatgtcctttgacattgtttgaaatctgaaaggagaaaaaaatcaagaatctgaagtgggccttaaaaaaatcagtaagtcccttgtgactctgatttttatgaatcttgtctctcaaaagccagggtccccccagaagaactgagacaaactgagtttctgaacattttgaaaatgaggagcaggctcagaacccacagggtgtaaccatcccgtgaggccctgcctgagcagccagccagtcagtgaggctcttcaccttacttccatttctctgattccacctatgtacaacttacgaaaacttgcattattatagactgggagttcttaaattggaatctgtgaatctaaaggggccagaggatagaaatcaggaaatctgaaaacttcgatggaaaaaagaagtttttatttatttccatcaggaaaataggcaacaaaccacagcagtattagtacctgtgtctctgtcatcactaggagtcacagatatccacgttacagatatcttaaaatatttatgtacagcaccactctgaaattatggtaataattagatccaccccctaggtcttgtaatctttaatatgttaataaagaagcacatctattatgtgacagatttaaatgtttaagaatttgatttcaatgaaattgcatttcaataaaattgggnccccttttcaaaaaaaa

SEQ ID NO: 359528 - DNA, 317 bp, Homo Sapiens
cagagctggaagggccgtctcattgaaggcaggcaagcaagagaggacaagggatgtagccgcctgacagtgagctacagcactggccccaggatgcaaacccctctctcctcctcatgccactgcctctccccaagtgcaacacctatggccaggatcaggggtacagatggctcgttaccagccaacccttttgaattcttctacttctacctgaccccctctcctcactggcctggggtcaagaagtttgagtctgggagctggattgcctgcaaatagtgaaagcctgaaacataatggtttgccatgttttg

SEQ ID NO: 359529 - DNA, 449 bp, Homo Sapiens
ccccttgattactggggacaagggaaaacactgaggcaaaagtaggtccgtcaatccacattaactttgaccccagctggtgccagaacccctttcctacctgcaggtgttaattccaattcaatgcaaatatccttttcaatccggtccattccttggagaagaaacccattgtaagagctgtcttctgtggttgggatattactttgtaaagtattaaagcactaaaccagtttttgcaatatgtagtaaatcttgctttcattttggaaaacttccagtaatgactactgcactttttatagaagaattgtatttaatttctttcttttatgaaagattatttcaagtaaaaatagctctgtaatctgtgtgacatggcttctccattacctgacacagagagaagctttgatgcctactcaataaaattaacatgtttgtaaagt

SEQ ID NO: 359530 - DNA, 696 bp, Homo Sapiens
caagaacagagagatccagctgaaaaagagtgatcctcaatatcctaactaactggtcctcaactcaagcagagtttcttcactctggcactgtgatcatgaaacttagtagaggggattgtgtgtattttatacaaatttaatacaatgtcttacattgataaaattcttaaagagcaaaactgcattttatttctgcatccacattccaatcatattagaactaagatatttatctatgaagatataaatggtgcagagagactttcatctgtggattgcgttgtttcttagggttcctagcactgatgcctgcacaagcatgtgatatgtgaaataaaatggattcttctatagctaaatgagttccctctggggagagttctggtactgcaatcacaatgccagatggtgtttatgggctatttgtgtaagtaagtggtaagatgctatgaagtaagtgtgtttgttttcatcttatggaaactcttgatgcatgtgcttttgtatggaataaattttggtgcaatatgatgtcattcaactttgcattgaattgaattttggttgtatttatatgtattatacctgtcacgcttctagttgcttcaaccattttataaccatttttgtacatattttacttgaaaatattttaaatggaaatttaaataaacatttgatagtttacataat

SEQ ID NO: 359531 - DNA, 456 bp, Homo Sapiens
  misc_feature (12)..(12): n is a, c, g, or t
  misc_feature (25)..(25): n is a, c, g, or t
  misc_feature (42)..(42): n is a, c, g, or t
  misc_feature (96)..(96): n is a, c, g, or t
  misc_feature (116)..(116): n is a, c, g, or t
aacttccaccgnggaatcccgtgtncccctaggggcccccanccaccgaagccccgccacaagccaggtgatatgtgaaataaaaagggatccccncccatagcccaaaagaagtncccccccggggagagttcctggtaccgccaatccacaatgcccagatggtgtttaatgggcctatttgtgtaagtaagtggtaagatgcctatgaagtaagtgtgtttgttttccatccttatggaaactcttgatgcatgtgcttttgtatggaataaattttggtgcaatatgatgtcattcaactttgcattgaattgaattttggttgtatttatatgtattatacctgtcacgcttctagttgcttcaaccattttataaccatttttgtacatattttacttgaaaatattttaaatggaaatttaaataaacatttgatagtttacataatac

SEQ ID NO: 359532 - DNA, 690 bp, Homo Sapiens
  misc_feature (23)..(23): n is a, c, g, or t
  misc_feature (25)..(25): n is a, c, g, or t
  misc_feature (49)..(49): n is a, c, g, or t
tgaaagcagcacaatccgtcccntntagtcttggagttgttaacggatntgctggaactagctttatctaacataccgtagaatctaatcctccctacttgaatcatgaatccctttgaaataattcatattttcattgacttctcactaaatgtcaaaataaccttgttttcacttggataggctcaacctacctggcatatttattttgcagtcttgttgaaagttcatgaaactttgtactttttaataagatgatacactcgaaggaaacttttaatctctgcagtttattctctcttaaggaataaacactcccactgtttgttctcttcaatgtgtaaggagattaaatgacattttagaaatattacaattaaaaatagtgatgtagctgtaacatatgctggaattggatatttaatttatgtttgtgtcaactataatcctttccccacccctttcatttatggtaaacatcttgggcaaacccaaagatggaaagtgcttgttgggtgggtaagcaccacctggtctctcagcaaacactcctgagtggttgaagatgctggacattggattctagcactgggtttatctggtgacatagtctcctgtgggtcttgagttggttatttcaagctcaaactctgaatatgattaaaccagaacaccccacccccaactgcc

SEQ ID NO: 359533 - DNA, 591 bp, Homo Sapiens
  misc_feature (273)..(286): n is a, c, g, or t
  misc_feature (521)..(521): n is a, c, g, or t
  misc_feature (558)..(558): n is a, c, g, or t
  misc_feature (574)..(574): n is a, c, g, or t
acgactgcctcactaaaggaagctaaaagctgtgctgattgcctcccagacgagcctcgttggaagcacagaaccttcacggctcggagccgctgacaccgtgacaaagggagccctgctcaggagaaagagcaaatgagaggcagttgcactttttcaggtgtcaggctggaggaagccacttgaagatgaatctacctctgccttaggattgcctgatggcctgtgccattccatgttatatctactgatttgctccctgtattcaaagannnnnnnnnnnnnnacttaattctctcttactgaccctgagagtgaccatatttttaaccaatttggtcttcagcctcaaaacttagctctttccttttgtgggtccccgaatcctatcacgtgtcatgggtgggctgtggaaggatgttttgccaagcctgctggagaaaggctcatcttgtgggcatccaaaaggcaggagattttcaactttgggacccctgtggacccgcctttgtaatttgggntacccagcattgtttttgaaatttcagtggggcatcnggttttttaaaagccntcagagttttgggggga

SEQ ID NO: 359534 - DNA, 572 bp, Homo Sapiens
tatctctaagtacaggctgtgccgtgtctcacccacacccccctggggacttcagttccatttcaggttacctggggtataccttgatccctagagtgactggcagagtaagagaaggggagagataataggtgtgattattttaatatggaggtggaagtgtggttggagatagaaaggctcctccccaccatgtaatggcttcctctcagaattttattccaggctagcttgctgcaggtctgggtagttggatcatggctccactgggattggggtggaaagcttgaggggagtagggttccagctctgggacattgtgctcaggaatttgaaaacgctgctatacttactctggttactacatttcttccactcccctttcccctacctgccttaaccaaggctcatactgtcctgtccttaccctcagatggagccaggaagctcagtgaaaggcttccctaccctttgcactagtgtctctgcaggttgctggttgtgttgtatgtgctgttccatggtgttgactgcactaataataaaccttttactcaactctctaaaaaaaa

SEQ ID NO: 359535 - DNA, 774 bp, Homo Sapiens
cgtcttgaaagctggcagctctctgttggaaaatctctgcccagtgaaaaaatgtaccgacaagattactaagtaacacagtcttctgggaatgccttatcaatgccagctatttgaagagcacccaaagtcaaactagtgctccgcgctggcagtctggaaaaggcagatgtattgttaaacaggaaatggagaaacaggcaccaagaagaaaggagagagatgaggcgttctatgaacatctgtccctgatgaattccaaggaaagacgggcccactcatgagagatctactaccccccgcaacccatgtattctaggatccacgcagctcttttcagaagtttcatcagttatacctgcttccctgagagctgaatgttctgactaaaggcaagttttgctctcctatagccacaatgtgggcattcattagctatgccaatcagttgctcagactcggactttgaaccggggctaacattacaaagaagtggaagccatgaagaatctattctgtgggaggcctagggtcacaacagcagcaacatcaagttttcaagaacagaagcagtgctctgagctgatatactctataacatgatgtccttctgctccacatgcatgcggaatcttttcactttttcaaagatggctttggcctgttcaccctccttcttgtccaggacactggaagttggggctttctattgccagctgactccaaactggctgtggggtagggccaatgacttgtttgccggaatctatatca

SEQ ID NO: 359536 - DNA, 2385 bp, Homo Sapiens
  misc_feature (2363)..(2363): n is a, c, g, or t
  misc_feature (2369)..(2369): n is a, c, g, or t
tgctccagggctttaaatgaaaagtaaaattttctaagttaataaagatgaaaaaggggtgactatttagtgattgaacaataacttaaaggtgtcttattaaagcaacgtgagtgtctagccctaaatttaaccagggtaaaaacgggttaacactaaccgtgaagtttgggtgaaataacgtgtctctttaacttatggagatgttgcaagaaagtgcacattccagggggacggggagctatgaaatgtgactaaatttcctccttgcaggtgtttaccttcaagatgtgtataggtattctctcctcttcttcccccagtccccattacttattggcacactgtgttttaactggactcccggtttggatatttatcaccaagaccataaactcatcaatatgaatttctggatgtatactcacgacggtcttggatttatgtccctaaaattttttagatagggtatgtggtgctgtggccagaattctttggggctaaatttttacttcctttccccaagcttgcttgagtcttccttaaccgtggttttctcttaacaccaatgatgaaccctgagaaaaatgcctgcatttggcctttgcctagaacaggagctgagtatttaacgatgtattatcctcggggcatcctgaaaattaatgtattccctaaaatttcttcttgtctatcatcaaggcctttttttatttgttaagaatttttatattaaatgtaaaacatataaatattttctattgtataatcttggattcaacatctgtgaggatcatttttgtaagatacatagaatttgtgcatttctttatgaacttactgttagtgttcttggtttcggctgtttatgactcatgtttatgtacattctgctccaaaatgtttttgtactctgcaactaattacttttggataacaaaagccttgtgtttaatgccctaaagtatttgggggtttccttgtgagagggtggccgaatcatctacctctctcttccatagttgctgtgcaatcgtacgggtaaaattcttaattacttacaaaaactgtgatagaggggagaggtacagatttggtttttaaattgattttaaaatactttatagaaatttagtaagagttaaagcaaaagactttttttccctccatctatgtaatctctagctatgattataatgtaaaacagcctctattcagtgtctaaaatgagttctcaaaacccacaaagaaatagatccatttaactgaaattcatctcatgcctttatctaactcttctggaaaatacattttgctcctttttataaagagctttgtgcttggccttttattatgcatatttttaatgaataaaatcaactgactcatttttgggaaatgtacatctttaatatgtttttccctaagggtctaggcattatgatgccacctcttcattttggatataactatgaagaaatctattaactgcacctacacaaaactggaaaacactataggtaaacagtactgtgtatatggaattgtggtgcgtggtatgtgttttctcttgctttgttccagaaagatgaaagtgagtctttaaagcatagcaaatagagcttcccctcacctgccacacactcctgcactaaagttcaaagaaaagaattattcaaatcaaatgaaatttgaataatattagctatcaggaatataggacaccaaacacactgcctcacacattattgtttattctgaacggaaaggaacagtgtaaaataaactacttaccaaaacttgcctttagtcagaacattcagctctcagggaagcaggtataactgatgaaacttctaggacttcagaaaacagattctaattatatccatgttttttgttgttattttcattttttaaagtgtgagttgatgtttattttagtgtttcacaatagaattatcatgtatactgattccagtgtggcatgtgattaagttttggacatgaatatgccaaaagtgcttaaatgtttttggccacataactagctagaatttcaaaacaaaattcagatttgctaccattcacctgacgaacttctccatggctcgtcactggtttggttcaactgcagaagtcattggctaaattttccttatcacctacgtaaatttctagaagaatttactagcaggattaataatgaattataaactgctttccacacactaggggtataattattgggtgcaatctatgttgttcttggatgccatgggttttacatcttttaatttaaaaccttatacaccagtgtttaggttcgcttttggggacagggtggcccggatggcaggganaaatgngggctactactttcac

SEQ ID NO: 359537 - DNA, 436 bp, Homo Sapiens
  misc_feature (425)..(425): n is a, c, g, or t
gaagaatttctaggtcataaacatgaataatactcagtatatgtataatatcatatttaattgttgcaacttttcttggcgtgtttaaatcctcatgtctttgagggatcccaccacaggtgaaggaagtaaagaccacttctcccccagtctctgctttctgcagtgctcactcatatcctggcatttagcatggtgtgttgaaattaggtttacttcttgtctctccaagtggctcctctcttaaaagacagaaactagggtttagtcatcatttgtgcttcctgctagaaacccacagccttgaaataatggcttcctgcctccttgagtcactttaatatccctgggtgcatagggacctgggcatgcgtcagggctgctcggggaaatgtgggggaactgggacacccaggaacactggntgtgctggggg

SEQ ID NO: 359538 - DNA, 1220 bp, Homo Sapiens
  misc_feature (792)..(792): n is a, c, g, or t
cgcggtggttactgaaaacctgaagcggaaatgcaagtgtcatggcacatcaggcagctgccagttcaagacatgctggagggcggccccagagttccgggcagtgggggcggcgttgagggagcggctgggccgggccatcttcattgatacccacaaccgcaattctggagccttccagccccgtctgcgtccccgtcgcctctcaggagagctggtctactttgagaagtctcctgacttctgtgagcgagaccccactatgggctccccagggacaaggggccgggcctgcaacaagaccagccgcctgttggatggctgtggcagcctgtgctgtggccgtgggcacaacgtgctccggcagacacgagttgagcgctgccattgccgcttccactggtgctgctatgtgctgtgtgatgagtgcaaggttacagagtgggtgaatgtgtgtaagtgagggtcagccttaccttggggctggggaagaggactgtgtgagaggggcgccttttcagccctttgctctgatttccttccaaggtcactcttggtccctggaagcttaaagtatctacctggaaacagctttaggggtggtgggggtcaggtggactctgggatgtgtagccttctccccaacaattggagggtcttgaggggaagctgccacccctcttctgctccttagacacctgaatggactaagatgaaatgcactgtattgctcctcccacttctcaactccagagcccctttaaccctgattcatactccttttgggctggngagtccctatagtttcaccactcctctcccttgagggataaccccaggcactgtttggagccataagatctgtatcctagaaagagatcaccccactcctatgtactatccccaaactcctttactgcagcctgggctccctcttgtgggataatgggagacagtggtagagaggtttttcttgggaaagagacagagtgctgaggggcactctcccctgaatcctcagagagttgtctgtccaggcccttagggaagttgtctccttccattcagatgttaatggggaccctccaaaggaaggggttttcccatgactcttggagcctctttttccttcttcagcaggaagggtgggaagggataatttatcatactgagacttgttcttggttcctgtttgaaactaaaataaattaagttactgg

SEQ ID NO: 359539 - DNA, 211 bp, Homo Sapiens
gcaacgccggaagttggagcagcagatggcactcatggaggctcagcaggccgaggaggtggcggtgctcgaagccactgcaagggccctggggaagcccaggcctcccctcccgcctccccagcttggggacacctttctgtaggccccttacccagccatgtctggacatgccagacagctgtggcatgtcataaactgtcctggagtg

SEQ ID NO: 359540 - DNA, 465 bp, Homo Sapiens
  misc_feature (44)..(44): n is a, c, g, or t
ccttgccttcatcatggggtcctagcataggcgccagaagtgangctgggagcacaaagctggcttgctgacagcactttctatccaagagactgcaagaaattgcaggtggaccagctgctgcgggtgaggcacaggaaacagctgtgcttctgaactactgttgtcaggggctgtgcagtgtcccctccaggtgcctgaagtttgtctcctgtgccacacaacagagatacagtcaggggaccatactgccaggtacacagcctccccactcctgacttgcaggcgagcacctaaggacactgactgtctcctttcgcctctgcaggctctggctgccgagtgcacataaatactgtaaaaggagaagctggttcagggaggggaatggtaagaagggttcttttagcaaaatgcaatgttattgatctgtgactgcatttaagacctgaaagctgttgtttt

SEQ ID NO: 359541 - DNA, 465 bp, Homo Sapiens
  misc_feature (308)..(308): n is a, c, g, or t
cgccccaaaaatgaacctgggaacaacaaagctggccttgcctgaacagccactttcctatcccaaaagaactgccagaaattgccaggtggacccagctgcctgcgggtgaggcacaggaaacagctgtgccttctgaactactgttgttcaggggctgtgccagtgtcccctcccaggtgccctgaagtttgtctcctgtgcccacacaacagagatacagtccaggggacccatactgcccaggtacacagcctccccactcctgacttgcaggcgagcacctaaggacactgactgtctccttntcgcctctgcaggctctggctgccgagtgcacataaatactgtaaaaggagaagctggttcagggaggggaatggtaagaagggttcttttagcaaaatgcaatgttattgatctgtgactgcatttaagacctgaaagctgttgttttaaaaaaaa

SEQ ID NO: 359542 - DNA, 458 bp, Homo Sapiens
  misc_feature (412)..(412): n is a, c, g, or t
gagatggaaagcccagaaccagtccctttaatgcacttatttgcaaaacaagatgtcactatgcagcagagtgacagtcctttcccctggaactgtcccagagttctccaagctgaagccagggctacattcaccatctcagactcctgctgagctaagtaaccaccctctcctaccttctcttcaggagccctggcacccttgctctggggagagtttgaagagcaacctgaaagttcccacagtttttcctcaaatctgggtttccatgagcatgggccaccagtcgggagagccacatgcctgcccttgcctgggcttcaaggactgttcactctgttcaggatttcattattcgcttcttctggaccctttaggcctttccagtttggggatctttggaccttggaantggggattctgttaggggaaggtttctttaaacatttaaaggggag

SEQ ID NO: 359543 - DNA, 332 bp, Homo Sapiens
  misc_feature (45)..(45): n is a, c, g, or t
ggtagtaaacacgatcttagacatccccatctttgtaagcagaanagtacggcacttcaccacatctgcttcccaccatgcttctaagcagctgtcttccccctgctaatgttacaaccaaagcagccaccccacctcctctcgtgttgagcctcacgaccgctgacccagctggaaagccagcgccctgccgcgtcaccctgactctgctcagagccagcattccagccacaaagagggcctccttcctttcctctttcataaaaatgttttttgaagagttagagtatattttaggctttttatctttattaaaatttcatgtgcatgtg

SEQ ID NO: 359544 - DNA, 521 bp, Homo Sapiens
  misc_feature (58)..(58): n is a, c, g, or t
  misc_feature (108)..(108): n is a, c, g, or t
  misc_feature (188)..(188): n is a, c, g, or t
tgatgtctctctttgagcctggcccagaacctctcccatggctagggaaaatggctcngttgggtcctatttcagatgctaaagaaaacccttatggcgaggatgacnataagagtccattccccctgcagcccaaaaacaaacgcagttatgcccagaatgtgactgtctggatcaaacccagcggnctgcagacagatgtacagaagattttaagaaatgcaaggaaactacctgaaaaaacacagacattctataaggagctgaaccgtttgcgaaaggccgctctagcctttggtttcctggacctgctgaaaggggtggctgacatgctggaaagggaatgcacactgctgcctgagacagcccaccctgatgctgcattccagcttgacccatgcttgcccagcagctcaagctggccagtacctgcacctctgagtatgccgcttatgaccagaacatcacacctttgcacacggacttctctgggagcatcactgaaagaatttgaaactgac

SEQ ID NO: 359545 - DNA, 1350 bp, Homo Sapiens
  misc_feature (1300)..(1300): n is a, c, g, or t
  misc_feature (1310)..(1310): n is a, c, g, or t
  misc_feature (1319)..(1319): n is a, c, g, or t
  misc_feature (1325)..(1325): n is a, c, g, or t
  misc_feature (1330)..(1330): n is a, c, g, or t
tgattgggacactgggatcattttcatcatgccgacagtggtggtaatggatgtatccctttccatgacccgacctgtgtctattgaggggtccgaggaataccagcgtaagcacctagcagcccatggtttaacgatgctgtttgagcacatggccacaaattacaagcttgaatttacagcacttgtggttttttcatcactttgggagttgatggtccccttcacgagagattataataccctacaggaagcactaagtaatatggatgattatgacaaaacctgcttggagtctgcattagttggtgtttgcaatatcgttcagcaagaatggggtggtgcaattccttgccaggttgtcctggtgacagacggctgtcttggcattggtagagggtcactgcgacattccctagccactcaaaatcaacgaagtgagagcaacagctccagagcaccgattccttggaatgccttgaacgtctcatagatttaaacaatggtgaagggcagatttttactattgatggccccctgtgcttgaagaatgtacagtctatgtttggaaaactgatagatttggcatatacgcctttccatgctgttctcaagtgtggccacctaactgctgatgtacaagtcttccccaggccagaaccttttgttgtagatgaagaaattgatcctatccctaaagtcattaacacagatttggaaatagtgggatttattgatatagctgatatttcaagtcccccagttctgtccagacatctggtcttacctatagcacttaacaaagaaggtgatgaggtgggtactggcatcactgatgacaatgaagatgaaaattcagccaatcagattgcaggcaaaatacctaacttttgtgtcctgctccatggtagcctaaaagtggaaggaatggtagcgattgttcaattaggtcctgaatggcatggaatgctctactcccaagctgacagcaagaagaaatcaaacctcatgatgtctctctttgagcctggcccagaacctctcccatggctagggaaaatggcacagttgggtcctatttcagatgctaaagaaaacccttatggcgaggatgacaataagagtccattccccctgcagcccaaaaacaaacgcagtttattgcccaggaatgttgactgtcctgggttccaaacccagcgggccttgcaggacaggatgttacaggaaggtttttaaggaaatgccaagggaaacttacctggaaaaaaacacaggacttttttttaagggggtttgnaccctttttncggaaaggncctttntggcntttgggtttccggggggccc

SEQ ID NO: 359546 - DNA, 1012 bp, Homo Sapiens
ggcctgggtggcgaattcggcacgaggggcgcgcggacggaaagtttatgccgacggaaagtttatgccgacggactgtgtccggcgatgggcacgggcatttcttcgtttatagctgtctgtttgcattctgattgggaacactgggatcattttcatcatgccgacagtggtggtaatggatgtatccctttccatgacccgacctgtgtctattgaggggtccgaggaataccagcgtaagcacctagcagcccatggtttaacgatgctgtttgagcacatggccacaaattacaagcttgaatttacagcacttgtggttttttcatcactttgggagttgatggtccccttcacgagagattataataccctacaggaagcactaagtaatatggatgattatgacaaaacctgcttggagtctgcattagttggtgtttgcaatatcgttcagcaagaatggggtggtgcaattccttgccaggttgtcctggtgacagacggctgtcttggcattggtagagggtcactgcgacattccctagccactcaaaatcaacgaagtgagagcaacaggtttccactaccttttcctttcccatctaagttatatatcatgtgcatggcgaatttggaggagctccagagcaccgattccttggaatgccttgaacgtctcatagatttaaacaatggtgaagggcagatttttactattgatggccccctgtgcttgaagaatgtacagtctatgtttggaaaactgatagatttggcatatacgcctttccatgctgttctcaagtgtggccacctaactgctgatgtacaagtcttccccaggccagaacctttttgttgaagatgaaagaaattgatcctatccctaaaggcatttaccacagatttggaaaatagggggaatttatttgatatagctgatattttcaggtccccccagttcggtcccagacatctgggccttaactatagccacttaccagga

SEQ ID NO: 359547 - DNA, 467 bp, Homo Sapiens
tgactcatccctgccacaggggaggttcacagcaagagcaaaaaaactaggcccagtgcccggttgtgtgaccttgagtaagttctttttcccttgaacagggagagagacacaatggatcagagtgtctctgccagttctaacttggggattcctagtgggttgaaccgaacggtagtccgtttccaaaagaggaagccaagaccagagggggagtggttccttcaagtttgcagaaccagtaagtggcagagcaggactcatatctagttagtggttcagagcatgggctccggagctagactgcctggatttgaaccccggctttgccacttgcctgttgggtgactttggacaagctgcttaaattatgtctccatttcctaatccacagaacaagtgtaatactagttatctgtttcatggagtgattgtgaggattaaataaagttaatataacacaaagc

SEQ ID NO: 359548 - DNA, 679 bp, Homo Sapiens
gccactttctccggccggtccccgccagcacctcccccatacaaagccccccggctggatgaagatggagaggcctcagaggatacccctcaggttccagtgcttggcagtggcgggtttagccgtgtgaggatggagaaacccccacagtgcgtggggtccttgacctggtatcggctctggggagcccgctggggaagaaagtcctgggcccctccaggaacggtcccctttgatgctcacttccggaagatggtcctccccaggtccccgatggtccctcagacctgctgcttgagtcccagtggcaccactattcaggtgaggcttcgagctctgaggaagagcctccatccccagatgataaagagaaccaggccccaaaacggactggcccacatctgcgcttcgagatcagcagtgaggatgggttcacgcgtgtgaggcagagagcttggagtggggcgtggagaactctgatcgagaaagtgcaatgaggcccgagggcaatgacccgactcagaaatctctcctttagtggaatgagtggggcgagactcctgggcatccacatgatgctgtcatcttcctggccgagcagctccccggagcccagctgtggccagcactataagttccgttacaaccagaagggagagggcaaggaggagccgccctg

SEQ ID NO: 359549 - DNA, 1442 bp, Homo Sapiens
gggaagggtgatcttcactccaacctgcttcttgggaccaggtgaggcttcgagctctgaggaagagcctccatccccagatgataaagagaaccaggccccaaaacggactggcccacatctgcgcttcgagatcagcagtgaggatgggttcagcgttgaggcagagagcttggagggtgagtggggggagtgcagtggcaggagggagagtgtccataaaacaccatcctgactcagctctggctctgctgtctccccaggggcgtggagaactctgatcgagaaagtgcaagaggcccgagggcatgcccgactcagacatctctcctttagtggaatgagtggggcgagactcctgggcatccaccatgatgctgtcatcttcctggccgagcagctccccggagcccagcgttgccagcactataagttccgttaccaccagcagggagagggccaggaggagccgcccctgaatccccatggggctgctcgggcagaggtctatctccggaagtgcacctttgacatgttcaacttcctggcctcccagcaccgggtgctccctgagggggccacctgtgatgaggaagaggatgaggtgcagctcaggtcaaccagacgtgccaccagcctggagctgcccatggccatgcgttttcgtcaccttaagaagacgtccaaagaagctgtgggtgtctacagatcagccatccacgggcgaggcctgttctgtaagcgcaacatcgacgcgggggagatggtcatcgagtactctggcattgtcatccgctcggtgttgactgacaagcgggagaagttctacgatgggaagggcatcgggtgctatatgttccgcatggatgactttgatgtagtggacgccacgatgcatggcaatgccgcccgcttcatcaaccactcctgtgagcccaactgcttctctcgggtcatccacgtggagggccagaaacacattgttatcttcgccctgcgccgcatcctgcgtggtgaggagctcacctacgactacaagttccccatcgaggatgccagcaacaagctgccctgcaactgtggcgccaagcgctgccgtcggttccttaactgaggccgtggctgcccaccacgacccctcacacctcctgctgccgtcgctgccatcttgcccctagcctgggggctccctagcccctcccagagcatctcacccccaccctcatgttcagggtggatgtgggcatgcaggtgacaagggccctgcctccacccctccagcccatccagcaatcgccccctttctgccctgggggcccaggatgtagatattgtacaaaggtttctaaatcccttcttttctatgcacttttttatttaagaggtggggtcccaggtgggaacccccccacaataaagtctgtcaatgtttggaaaaaaaa

SEQ ID NO: 359550 - DNA, 504 bp, Homo Sapiens
ttcccagtctccagaacaatgaaaaataaatttctgttctttagaaattacccagtctgtgatgttttgttatagcagcaccaaccaacaaagtgaaacatgcatttgctcctgacttgagcacaaacatcttcattgacttttaagataccttatagcatcacttctcaatgtctccagggtcctaccaatgcttcatggctcaagtcacgctcttgctcaggagaagtgtactcaactacaccagcccaaattcatcaagcacttctccaaactctaacatcacatactgcccagtaagtttaggatttgataattctgcagtggttctctgagtgccactttgctcctcagtgacatcacacagttcttcaagctagagttgttcttatcttcttgtttgccttctaacacttactatagttcaggatgtttgcaagcaattcccaataaatacaggttgaccaaatatctctgttttacagttttgtgttgataatttag

SEQ ID NO: 359551 - DNA, 777 bp, Homo Sapiens
  misc_feature (18)..(18): n is a, c, g, or t
  misc_feature (389)..(389): n is a, c, g, or t
aaacccttataaggtganacttgccatcacccttcctgccgggtgccattaggccccaaggttaatcatttcccaagagtgatcagcagaggcacagccacagagacacgtccgcacagagagctttccagatcaccagtaacagcgtgagatcatggtgcagaaggtcatgacggaggatggcagacgagcgagacacagccggttggtgctcacaagacattggtagatctgactgaggccaggtcggctaggccttcccaggtgacaggagcccagtgccggccttggtgcacacagcgcgtccttgtgctttccccaggagagcttcactggggacactctgtgatgtttttggagggtccatttggtaatgtgttcaggagccnaaaaaatatgcataatattcagtcttacaattacattttttgaatttatctcaaggaaatcccagggatctgtgtgaagctgcacatgctgctgctgctcagtgcgggactgtttataatatttgtaactcaaatgtccagaagaactgtacactctgtgcatgttttcagtaagttcatatttgtaagaaaaagtgggtgtgttgagagacaaatttttgtgtacatttacctggaaacaagcagtagtacacatatgcatgcatgaagtggtgttttcctgagtgttaagattgtgaatgttttattatgatcatttctactttttctattggaaaatactttgtgtaattaaaacatgaagatggagctaccatccaaaatggtg

SEQ ID NO: 359552 - DNA, 306 bp, Homo Sapiens
  misc_feature (52)..(52): n is a, c, g, or t
  misc_feature (237)..(237): n is a, c, g, or t
  misc_feature (248)..(248): n is a, c, g, or t
  misc_feature (260)..(260): n is a, c, g, or t
aaagccataggtcaacaaagaaatgaagattccagttctgaaggtgagtttnctgaagccaaagtggatacatgcaaaattaatatagttttactgtatatcagttgtcaccaatcagaaatggaaaacagatcctatttataattgcaaacaaaactgtaaaatagactttttaaagtctgggaatagacttctaaaataagctataacacttaaaaaggagagatatactatgtncctagataggncaattgaaaatnctggagatgacagtttttcaaaaatctattgaggccaggtgcagtg

SEQ ID NO: 359553 - DNA, 490 bp, Homo Sapiens
aacaaaacaacacaaaaaaacaatgtgcccccagatgtcagaatgaggcgactagggcaccatactcactttccagggctgggggaagggggacgcaggatcatcccctcccaaggagatctgtgggggtcccaccgtccatctggacttctcagcctgtttggctagaactcaggcctggagtctgggtctgccccctccccggctccttggggctctctggtctcaggccagctggcgatgggtggctagagtgatgaactcaagccctgtggccacagttctgggagccttcaaccctggctcatgctgccatagtctccacggtgcccttcacagagggcttggtagtggcagaatggccatgcccaggtgtgtgttgagaccattgacaactgctcgtgtacaggcaccccacagccccagagcatggggcacagcaggcatgcgagtgagaggatgaaggggaataaagtcagtacaactcgtg

SEQ ID NO: 359554 - DNA, 460 bp, Homo Sapiens
aaacgaataaggcaaccaaactctactttcccaaggctgggggaaaaggggaacgcaaggatcatccccctccccaaggaaaatctgtgggggtccccaaccgtcccatctggacttcctcagcctgtttggcctaaaactcaggccctggaatctgggtctgccccctccccggctccttggggctctctggtctcaggccagctggcgatgggtggctagagtgatgaactcaagccctgtggccacagttctgggagccttcaaccctggctcatgctgccatagtctccacggtgcccttcacagagggcttggtagtggcagaatggccatgcccaggtgtgtgttgagaccattgacaactgctcgtgtacaggcaccccacagccccagagcatggggcacagcaggcatgcgagtgagaggatgaaggggaataaagtcagtacaactcgtg

SEQ ID NO: 359555 - DNA, 936 bp, Homo Sapiens
cacatccctcctccttggagacgcttttgcagggcttctgtggcttgactgtcatcctaggcacctacctagcccgtgcctctgcctgaatctgcactcctctcacaggagacagatgagtagtgcctagcgagagaggcagcaggagagccacaataatgtcttcagaggctgctcaagcagtggtcacgacggaaaacctgagacgtgcacccccatgggatggagacccgaagggactcacgcacggagccgccgtgttggcagcgcctgggtgtgggcccattttggggacctttacagcaagctgtagcgtcggatgagtgccatggacctgtgtacctgggacacgtgggagtcctcccagcatgatgcttgactgacccgaggaaggtcctcatgtttcgtgcctgtcattctcggatggctgctcgaggcaatccctggcaagggacgctgcgtaccaacggtcctcaccgcatctcacatggctcctgtgatgcatgttgtcgctttcccacccgggatctccatctctcttcccttcctgctgtcagtaagagatcacatgtctgtgtagtgtgaatgccttgtcgctgtcctgtgcttttgcaccattgagttgactgcctctgagaagcagcactaggcctgttgaaatgcaatgtgctgccctgagatccagtttcaagaatgggcaggtaaacgcagtgtgggaaaggaatgtggaatgagaacttggtggttcaccgctgtactatttgtgtaaatgtttacgtatgtgataagctacatgtatgtaaatgttgcaatacccctaacagtcgagtagtagtctcccttacaggaatttttgacggggttcctcatcatcaataccaaataaatatatgtaggaatgcatgattcaaacagcttcctgaattttaatcttgt

SEQ ID NO: 359556 - DNA, 312 bp, Homo Sapiens
  misc_feature (16)..(16): n is a, c, g, or t
  misc_feature (50)..(50): n is a, c, g, or t
  misc_feature (95)..(95): n is a, c, g, or t
  misc_feature (110)..(110): n is a, c, g, or t
atttgatcaaagtccncctctggaatccaatgcagccatattcatatttnggtctctcttaatggaccttgctggaaagaacattctgtgctaanaaaatggaaaataancgtgagaaaactttaagaatgagccttcacacctcctgcagcaggtgatagctctgtacttcagagcttgtctccaggttgagaattacctgttttccactctgaggggattagaaagatactgttttaatgggttataaaacttgtgtgaagaagattggccttctccacctctcctgtgaaataaattgtttgaaaactc

SEQ ID NO: 359557 - DNA, 484 bp, Homo Sapiens
  misc_feature (399)..(399): n is a, c, g, or t
  misc_feature (412)..(412): n is a, c, g, or t
  misc_feature (421)..(421): n is a, c, g, or t
  misc_feature (426)..(426): n is a, c, g, or t
  misc_feature (432)..(432): n is a, c, g, or t
  misc_feature (460)..(460): n is a, c, g, or t
  misc_feature (468)..(468): n is a, c, g, or t
actaggccctgcttcagtgcccacctgggcccccccagggacctggaaacagtgctggggagttctgcctgtgtatacttggccgtgggcatgagaccgagggtgaggctggagggtccaaagctggcccagcgagcaccagggtcccaggtgtcatggcaacagaacgtgggatgctggaggcatgcctgcagaaggactgttgatgcgacccaaagatacagcggtgggatctctgctgccagctctcccagcccctcagcttcgcagcctggcgcagatcctctgaggccccggggcctgttggggcggggttggaagagccgtctgcagctacttcagaggagctgtttatccctctccacgcgggggcagactctgggcgggtctcctagcctnccaagagatgggntatttttcnaacantatttnaaaatggatgcagccttaactgcaaaantcagaganggttacaaggaccaat

SEQ ID NO: 359558 - DNA, 832 bp, Homo Sapiens
ggtctggagataattcagaaatacagatgataattgttttcaaattcttgaaggaaatgggagagagaataggctaattctgtattgcttcagaaaccaaatggaaacaattaaattccattagagaaacggttggaaaatatgaggaggatttagttcagtacgaggaagctgtttctaatactttttgttggttaaaaatacattccgctgctgtggaaagcctgtagctgccaggagtgttacagagggcattcctcccttgagttgacatttgtgccaaaccggcttttagggcttctccagcttttaagatgcgataatgataagatgatcatcgggaaaacatccctcagatgaaacgttcacaggctggctctgaaaactggcattcagatgattgcggctcccccatactgtaggaatattgtttatggcttaaggttgcctcgctcctcatctgtaatcagtgaaagtttatccagaggttaattaccggttttctggtgggtatctgggaactgaggatgggagattaactgttgtatatgaccatagtaaagcaaaagactgttagagaatgagtaaacgttcgttttcctccctacagaatttacagttactctctgtccattccactcactactgtcttcatcacacacacagaggcaaacgtctgattcagatagccaggtgtgccatgcatgcactccaccatattgtgatctcttcgaggcttgtttctgtcccctgtcctccacagtcctggattgttaatgaatagttcatacatgtttgttaaataaatataccttctttaaaattaaaaaaa

SEQ ID NO: 359559 - DNA, 398 bp, Homo Sapiens
ccgtttgtaaaagtgtatctattagataacggagtctgcatagccaaaaagaaaacaaaagtggcaagaaaaacgctggaacccctttacccagcagctattatctttcgaagagagtcccacaaggaaaagttttacagatcatcgtctggggagattatggccgcatggatcacaaatcttttatgggagtggcccagatacttttagatgaactagagctatccaatatggtgatcggatggttcaaacttttcccaccttcctccctagtagatccaaccttggcccctctgacaagaagagcttcccaatcatctctggaaagttcaactggaccttcttactctcgttcatagcagctgtaaaaaaattgttgtcacagcaaccagcgttac

SEQ ID NO: 359560 - DNA, 418 bp, Homo Sapiens
gaatggacagacatcgtgtcatggatgaccattattctccagatagagacagggattgtgaagcagcagatagacagccatatcacagatccagatcaacagaacaacggcctctccttgagcggaccaccacccgctccagatccactgaacgtcctgatacaaacctcatgaggtcgatgccttcattaatgactggaagatctgcccctccttcacctgccttatcgaggtctcatcctcgtactgggtctgtccagacaagcccatcaagtactccagtcgcaggacgaaggggccgacagcttccacagcttccaccaaagggaacgttggatagaaacaatggagtcaaggagatagaaccttatgaagaagcaggaggtaaaaaattaaggagcactgttccaaaggaagt

SEQ ID NO: 359561 - DNA, 840 bp, Homo Sapiens
  misc_feature (743)..(743): n is a, c, g, or t
  misc_feature (802)..(802): n is a, c, g, or t
gaagagaatttcgggaacgaatgctagagattaccctttgggatcaagctcgtgttcgagaggaagaaagtgaattcttaggcgagattttaattgaattagaaacagcattattagatgatgagccacattggtacaaacttcagacgcatgatgtctcttcattgccacttccccacccttctccatatatgccacgaagacagctccatggagagagcccaacacggaggttgcaaaggtcaaagagaataagtgatagtgaagtctctgactatgactgtgatgatggaattggtgtagtatcagattatcgacatgatggtcgagatcttcaaagctcaacattatcagtgccagaacaagtaatgtcattcaaaccactgttcaccatcagggtctcctcatcgagtagatgttataggaaggactagatcatggtcacccagtgtccctcctccacaaagtcggaatgtggaacaggggcttcgagggacccgcactatgaccggacattataatacaattagccgaatggacagacatcgtgtcatggatgaccattattctccagatagagacagtcattttcttactctacctcgctccagatacagtcagaccattgaccatcatcacagggatgggcagggattgtgaagcagcagatagacagccatattcacagatccagattcaacaggaacaacggcctcttcctttgaggcgggaccaccacccgnttccaggatccactggaacgtcctggattacaaaccttcatggagggtcgatggccttncattaattgattgggaggtttttgcccttcctttcatt

SEQ ID NO: 359562 - DNA, 841 bp, Homo Sapiens
ttagcgtggtcgcggccgaggtacattgagggaatatcaaaaaatagcgttcatggctacgaatatgtataatgttaaaagcacagcacactgcactgcacttataaagcaaatctattagaaaaaaagcatttttctaaatgctcaaatgttatcaaaatactatatttatagaagtaatcttctctgctaacagccaagatttgctgttagaaataactcttgtgagttttatattgagctttttggaggatctaatcatttcagcagtagcgtcttaaacagcagtattactataagcagttgcttcaaaatgtgaattaactcgttgaaactgtggctttaacatccatgtgactagtgtatatggtatttgctctccattagcaaaataattcattgttaggtaaacttcactagtgcaaattgcagatctgtgagcaatgtttcctattgaatataaactactgtctaaaatatacatatcagcagcccagcctttatcaggaaaattatacttggcaagttgctgaaaatgcacaaagttatgaaagttaaaggtatgctgcaaataactagccattattctatgtattattaaatatttactagttctgttaaaagcagagcagaagttagacactaaggatctctttgtgaactctgtgttctctatattagattgctgtttatatgtaagaattttattgcttatgtggcatacaatatttataactataaactttatagaagtacagtattaaagtcagtggtacacagacattctgtacatatcctgtgaaacgtgctgtcatatgaaataaatatatctgtctttaca

SEQ ID NO: 359563 - DNA, 492 bp, Homo Sapiens
tggttcatatttgagtttaattgtactgaccctggacccagataagcagcaactttgtgtctttggggtcacagaacattttggggcagtttaatgtggtaccaaactgaaaataggagctatttatagatggagcagcacttagtgcttcatagaaagcaatgcctatttttaaagttacaaacgcagatatctacatagatatgctttgctgagaagttaggtctgtggtagaccagaaaccacaaattgactttttttcttagaaaatatttctatttgcggtaaatatagtaatatgtaaataatgtacatctgttgatttctggagtgtctgttattcaatgatgtatatactcccacagctcgcatgaaggaacagcctctattgatacttggttgtaaagtgaagtaagattggagggtggatggctgtcagagctcttgcagatactgtgttcactaaataaaaatcacatgtattgttaaaac

SEQ ID NO: 359564 - DNA, 487 bp, Homo Sapiens
  misc_feature (24)..(24): n is a, c, g, or t
  misc_feature (42)..(42): n is a, c, g, or t
  misc_feature (65)..(65): n is a, c, g, or t
  misc_feature (74)..(74): n is a, c, g, or t
  misc_feature (112)..(112): n is a, c, g, or t
  misc_feature (117)..(117): n is a, c, g, or t
  misc_feature (160)..(160): n is a, c, g, or t
  misc_feature (210)..(210): n is a, c, g, or t
  misc_feature (253)..(253): n is a, c, g, or t
ggggaacttgaactcaactgcaancctctgcctcccccgggnatcaagtgaatccccctgccctnagccccccngaagtagctgggtattaccagatgccttggccaaccangcccnggcctaatttttgtaatttttaagtaagaagaacagggttttngcccatgttgaatcaggctggtccttgaaactccctgaccctcatgaatnctgcccttggccctccccaaagtgtcggaattaacaggcatgnagcccactgcgccctggccccactttagtctatttttaaaaataggacctattgttttggattactatctgagaatttcatggattcactcctgggtataggagataagaatacgtttaattcataacttttatattaaccaatatagtaaaaaaataaagctcacacatacaaaaactaagttgcctttccttgaatgaaccctgtctgaataaaacaatgaaaaataaaaat

SEQ ID NO: 359565 - DNA, 563 bp, Homo Sapiens
tgcacctgaggcgctcagccgtgggaggaccattttgcgagtgtagccctgtttcactcggatcaggttggcacggccgcctgcgtgtctgtccacctcatccctccgtgtatctgagggagtaaaggtgaggtctttattgcttcactgcctaattttctcacccacattcgctgaagcgatggagagtcgggggccagtagccagccaaccccgtggggaccggggttgtctgtcatttatgtggctggaaagcacccaaagtggtggtcaggagggtcgctgctgtggaaggggtctccgttcttggtgctgtatttgaaacgggtgtagagagaagcttgtgtttttgtttgtaatggggagaagcgtggccaggcaggtggcacgtggcatcgcatggtgggctcggcagcaccttgcctgtgtttctgtgagggaggctgctttctgtgaaatttcatttatatttttctatttttagtactgtatggatgttactgagcactacacatgatccttctgtgcttgcttgcatctttaataaagacatgttcccggca

SEQ ID NO: 359566 - DNA, 395 bp, Homo Sapiens
  misc_feature (27)..(27): n is a, c, g, or t
  misc_feature (101)..(101): n is a, c, g, or t
  misc_feature (139)..(139): n is a, c, g, or t
  misc_feature (203)..(203): n is a, c, g, or t
ggaaaagtccgggggcccagtaagccnagcccaaacccctggggaaccggggttgtcctgtccatttaatgtggcctggaaagcaccccaaagtggtggtncaggagggtccgcctgcctgtggaaggggtctccgttncttggtgctgtatttgaaacgggtgtagagagaagcttgtgtttttgtttgtaatggggagaancgtggccaggcaggtggcacgtggcatcgcatggtgggctcggcagcaccttgcctgtgtttctgtgagggaggctgctttctgtgaaatttcatttatatttttctatttttagtactgtatggatgttactgagcactacacatgatccttctgtgcttgcttgcatctttaataaagacatgttcccgg

SEQ ID NO: 359567 - DNA, 413 bp, Homo Sapiens
ttaacgggcccactttgcattgtgtagaagccgaatatggggagagaaacaggcaatgggaagaattccccatctttgtgcttaggaggacagaggacagatccccgtcaagggtccaaagagcccacaactgccttcttgaagggccagtgcagaattctgagggttgcactgttccacctgtaccgggtctctctaaatgtgatctaagacttaagatgctgtaaggctttaagacttgtcctttgtcttagagaatcccaggcacgggtggggcctcaggacccccagaggcacaaaacctcatgggttacttttccaactgaatctcccccgcagcccaccctgaggtggggaattactgtcactcattcaaagaatgacatcaaccgcttaatggcaaaagaattact

SEQ ID NO: 359568 - DNA, 435 bp, Homo Sapiens
  misc_feature (328)..(336): n is a, c, g, or t
gttcaccctattaactacttcaaacagtcctttgagatgattatgccctctttacagataaaaacaggttttggagtaatttacccacggtccacagctagtaagtggaatttgaacctagatccagttggcccaagagctccttcccccgcccccataatgctcttacaacaacctgaacccctagttattctgttgtcatcatctgttgtcatcaagctgaaagcttttttccccagagacatcttgctgcccattcagaatcaatttttactaagctgtaatatttagcatagcacgtattagtcattgagtgtgaaggtgtttnnnnnnnnntcaaacttgaaaaatacacaaacatttctgtgtagtctgaattatttggacatgacttgttttgacttagcctttctccaagcataatctccattaaag

SEQ ID NO: 359569 - DNA, 596 bp, Homo Sapiens
  misc_feature (139)..(165): n is a, c, g, or t
atatatagcatataacatacaaaatgagtttatcaactgtttgttattggtaagtcagcagtgggctattggtggttaagttttggggagtcaaaagttacatgcaaattttttactgtgcggggtgtcagcatccctnnnnnnnnnnnnnnnnnnnnnnnnnnntagtttaaaatgactcctgtctcaaaaaaccaaaggataacctttaagggattggtaactttgactcaaaactgctttgtaatcttttcacaatgtactgaaaagtgtggctagttatgtttgatccacattctagagaaatttgtaggttttaatttcttttctcttggtcctctcttcatgtataatggttgcttttaacagctgttcgctgatgtggtcctgctctgtcccagtctagcagctttagtgtatggaaaaattgaactaggaattgagttttgaagaaataaaggtgtaagagcaaacattcaacagttgctgtccccagtaatgaagttcatacagacaaaagatggcatgtcactgtacatcataccttgcaataaatattctgttaaattgtgctggtgcaattttaacatgctttt

SEQ ID NO: 359570 - DNA, 533 bp, Homo Sapiens
  misc_feature (36)..(36): n is a, c, g, or t
  misc_feature (43)..(43): n is a, c, g, or t
  misc_feature (68)..(68): n is a, c, g, or t
aaaacttagaaggcaacaacaactctcggcaaacangctcaancctgcaacgaaacttgcaaaggcanctctctctaaactggcaaaaaacctttcttggtcatggttttccctccttgcaatctggccctcactttagggagatattctcatcagggaggctgagaccaactccctctccctgggggtggcgcctccctgacaccagctgtggtgtgcagatgtgcagtaaatgtcgcatcgttatcacttcaaagataatttcattcctggaagactggaaatccttaccctgggttttggcaaacacttacattagagttgctcagtcagttgcagctttaaaccatggcgccccctgcccacccagccagctgataatttatgagaaacaggtgtacaaagaatgagtacattgggctgcggacccagatcaaacttcagaaaatgcagattaccaagggttaatcatttttgagcaatcttatttccactgagactgcatctgcacagcaaagcaagccactgaggca

SEQ ID NO: 359571 - DNA, 989 bp, Homo Sapiens
  misc_feature (933)..(933): n is a, c, g, or t
  misc_feature (951)..(951): n is a, c, g, or t
gtagcttagaaaaaaatctgcttgcagaccattttagagagaaaggacaatgaagtgattttctgaatgggaatgacagacctctgggaagccagctaccactgaatctcggtatcagttttttttaaagtttagagttagaaggggtggtcgcctcctttcacagatgcggaagtaagggaccagcaaggcggggtgcccacggctgcacagctagttcatatcagaattgggagtggaaggcccactgcctcccagcatagcaatacataacctagcaaaggacttaacacctatctcactgtcaggttttttagtattttatgatgatgatgacttctactagaaaataacctccattaaaattattaaagatggtcacacctctatctctaagccttacttataaaatgagggtatttggactaaagtcttcttccagttctagaattctacaactcattaaaaagccaccttaaaaagtctactgagttacccaagggttgctcctacctgcccagagttccaccagcctgggtatagtatttgttataatctagtcgtaacagtagttgagccaaatctgagttgatctgatgattccgaacactggagagaatcttgaacaggagtgaagactggcggctaaagccctgcagagagaaggactcagctgtcattccacttcagctcaccaactctccatatggaggatgggggcggagggaggagtttcttggaaaagccttgttcaaaattctacagaaccacctggccttcccacattcctatttctattagttcctaaaatgacttgtaccaaatccatacatgcatgacttcctatgaaagtactctttcatcagtagggaatttagtagctggtttccagttaatgtattttgtcaagtactgggggttggggagaacccntttttgattacaagcagntaattatctcagtgaggtggggggttgtttcaagggga

SEQ ID NO: 359572 - DNA, 386 bp, Homo Sapiens
gaaaataacctccattaaaattattaaagatggtcacacctctatctctaagccttacttataaaatgagggtatttggactaaagtcttcttccagttctagaattctacaactcattaaaaagccaccttaaaaagtctactgagttacccaagggttgctcctacctgcccagagttccaccagcctgggtatagtatttgttataatctagtcgtaacagtagttgagccaaatctgagttgatctgatgattccgaacactgggagaggaatcttgaacagggagtgaagactgggcggctaaagccctgcagagaggaagggactcaagctgttcatttccactttcaagcttcaccaactctccatatgggagggtggg

SEQ ID NO: 359573 - DNA, 3438 bp, Homo Sapiens
  misc_feature (130)..(130): n is a, c, g, or t
  misc_feature (196)..(196): n is a, c, g, or t
tattatgatatccagctaagtatcaaaggaaagaaaaatatatttgaatcatttgtggattatgtggcagtagaacagctcgatggggacaataaatacgacgctggggaacatggcttacaggaagcanagaaaggtgtgaaattcctaacattgccaccagtgttacatctacaactgatgagatttatgtatnaccctcagacggaccaaaatatcaagatcaatgataggtttgaattcccagagcagttaccacttgatgaatttttgcaaaaaacagatcctaaggaccctgcaaattatattcttcatgcagtcctggttcatagtggagataatcatgctggacattatgtggtttatctaaaccccaaaggggatggcaaatggtgtaaattttgatgacgacgtggtgtcaaggtgtactaaagaggaagcaattgagcacaattatgggggtcacgatgacgacctgtctgttcgacactgcactaatgcttacatgttagtctacatcagggaatcaaaactgagtgaacttttacaggcggtcaccgaccatgatattcctcagcagttggtggagcgattacaagaagagaaaaggatcgaggctcagaagcggaaggagcggcaggaagcccatctctatatgcaagtgcagatagtcgcagaggaccagttttgtggccatccaagggaatgacatgtacgatgaagaaaaagtgaaatacactgtgttcaaagtattgaagaactcctcgcttgctgagtttgttcagagcctctctcagaccatgggatttccacaagatcaaattcgattgtggcccatgcaagcaaggagtaatggaacaaaacgaccagcaatgttagataatgaagccgacggcaataaaacaatgattgagctcagtgataatgaaaacccttggacaatattcctggaaacagttgatcccgagctggctgctagtggagcgaccttacccaagtttgataaagatcatgatgtaatgttatttttgaagatgtatgatcccaaaacgcggagcttgaattactgtgggcatatctacacaccaatatcctgtaaaatacgtgacttgctcccagttatgtgtgacagagcaggatttattcaagatactagccttatcctctatgaggaagttaaaccgaatttaacagagagaattcaggactatgacgtgtctcttgataaagcccttgatgaactaatggatggtgacatcatagtatttcagaaggatgaccctgaaaatgataacagtgaattacccaccgcaaaggagtatttccgagatctctaccaccgcgttgatgtcattttctgtgataaaacaatccctaatgatcctggatttgtggttacgttatcaaatagaatgaattattttcaggttgcaaagacagttgcacagaggctcaacacagatccaatgttgctgcagtttttcaagtctcaaggttatagggatggcccaggtaatcctcttagacataattatgaaggtactttaagagatcttctacagttcttcaagcctagacaacctaagaaactttactatcagcagcttaagatgaaaatcacagactttgagaacaggcgaagttttaaatgtatatggttaaacagccaatttagggaagaggaaataacactatatccagacaagcatgggtgtgtccgggacctgttagaagaatgtaaaaaggccgtggagcttggggagaaagcatcagggaaacttaggctgctagaaattgtaagctacaaaatcattggtgttcatcaagaagatgaactattagaatgtttatctcctgcaacgagccggacgtttcgaatagaggaaatccctttggaccaggtggacatagacaaagagaatgagatgcttgtcacagtggcgcatttccacaaagaggtcttcggaacgttcggaatcccgtttttgctgaggatacaccagggcgagcattttcgagaagtgatgaagcgaatccagagcctgctggacatccaggagaaggagtttgagaagtttaaatttgcaattgtaatgatgggccgacaccagtacataaatgaagacgagtatgaagtaaatttgaaagactttgagccacagcccggtaatatgtctcatcctcggccttggctagggctcgaccacttcaacaaagccccaaagaggagtcgctacacttaccttgaaaaggccattaaaatccataactgatttccaagctggtgtgttcaaggcgaggacggtgtgtgggtggccccttaacagcctagaactttggtgcacgtgccctctagccgaagtcttcagcaagaggattcgctgctggtgttaattttattttattgaggctgttcagtttggcttctctgtatctattgactgccctttttgagcaaaatgaagatgtttttataaagcttggatgccaatgagagttattttatggtaaccacagtgcaaggcaactgtcagcgcaatgggggagaagaggttagtggatcgggggtccctggctcaaggtctctgggctgtccctagtgggcacgagtggctcggctgccttcctggggtcccgtgcaccagccctgcagctagcaagtcttgtgtttaggctcgtctgacctatttccttcagttatactttcaatgaccttttgtgcatctgttaaggcaaaacagagaaactcacaacctaataaatagcgctcttcccttcattgtgtgcattgtcggcccttcctcgggttctcctcctccagctgcctgggggctttttaataaacttgtctcacctcgtcagccactactgtctgcagcccctttgcaaagtggatgcactgaatacagtccggacagacattgtgggggtctttttattaaatcaagaacattgttaaattcaattaaggtttactctgctgccttggcagacttacgatctcaacagttcatacgagcaggtgaaaggattataaatagaatttcgttaaagtggaacagacgacaagaaagccttttagcaagagggcatgctcactagtggttagtaagctgtcgactttgtaaaaaagttaaaaatgaacaaaacaaaggaaacaatgaatggtatatttacatgacatgaacatgtacaactttggccactgggcaggaggttcctttaggtcgggtgagtctgcagtgaatttcactgatgtggatattcatcgtgtgtagtctaatgttcgggtccaagccccggtttcctttattctgggagctaatgccagctgcgtgtctagtttcgagtgcagtaaacatagagtccagcacatcactcttcatttgcatcctattccggtatataagagttgtactgtgggagcagtgtccacca

SEQ ID NO: 359574 - DNA, 450 bp, Homo Sapiens
  misc_feature (22)..(22): n is a, c, g, or t
  misc_feature (57)..(57): n is a, c, g, or t
  misc_feature (246)..(246): n is a, c, g, or t
caagccaaaaaggaatccgccngccgggtggttaaaattttaaatttaaaatgaagnccggttccaagtttgggcctccccctgtaatcctaattgaactgcccccttttgaagcaaaaatgaaagatgtttttaataaaaccttggatgcccaatgaagagttattttaatggtaacccacagtgcaaggcaactgtccagcgcaatgggggagaagaggttaagtggatcgggggtcccctggnctcaaggtctctgggctgtccctagtgggcacgagtggctcggctgccttccctggggtcccgtgcaccagccctgcagctagcaagtcttgtgtttaggctcgtctgacctatttccttcagttatactttcaatgaccttttgtgcatctgttaaggcaaaacagagaaactcacaacctaataaatagcgctcttcccttc

SEQ ID NO: 359575 - DNA, 1438 bp, Homo Sapiens
  misc_feature (1182)..(1182): n is a, c, g, or t
caggctgtacggccggaagtaacgggatatcgtcgaccacgcgtccgaatataactattgtattttcctaggtgtagatgctctcagattagaatggcattgcactgatttttttatgtagatttatataaatatatagatacatatatatttgcttgaagaatcaccaagcaaatgggtgagagggtcttttccaatagaatttacacctccattatgttgtgttgtcttgcacttcccaatgttgatgtctctatggctccaatgaactggtgtattttgcagcaaatctgatgacttgtatggaaatggcatgaaagttacccagattacatctggtgcaaatgcactcggagcctggggccagactggtgctaacactgcaaactttgtccagagctctctccaacctgaaggcttgctgggggtgcaatgtcaccttcacacatgctgggccctttcagaaaagtgccagatcgtgtaactggtgctatttttcatgctctggtacaatgtgtagcaccacgggggtctcagctttaccaaaatcaaaattccatttgtcagctaagtgcagaggcatttgttttttgctctcctcccacagaattgtcggccatttatttgcaggccttttgcgggatttcttggctatttatttgcaggccttttttcccagccccaaattcttgggttggctctgtctgcttaaagagcctgtcttcacaaagctgcactcgggtgcctctgtgcgctgtcttagatcctactgccggcccttcaggactccgagccaggaaagaactctccaacctctggctcgagactctactttttgtctcagttcttttccttactctcgctccgtccttctacttccgactagtgccgtctcttggtctcggtggttccgctcctgtttcctattcctccgtgtcccaccggatctcgtgaggtggtggactttcttcctatagtcgttgccctctagtgtcccgtttcgtcttttggtccaccttctcctttagtctcgtgtgttcgtcgtggcccttgcttattcctcttcgtggtcgcttgtcgtgccgtccgtcctgcgaagatctgctgatcatcttctcccgtacttccctggtattggatttttgactggtccgtctaaaggggctcacgggctggattcgngacatgcaggtccatggcgcctgggactgatgtgacgcaagtacttgaggtcagccgtgttcacctactcagccgcagaaaggtaaagctgaggcgtgaggccctgaccttggagccggctccagcgcgcctcccggagccagtgctgacccgttgccctggccagcgatgatgcatgtgctgtgggccctgccggcgcctgagggtgctctgcctgaacagtgttcctaaggcgagcccactcccaggactaccg

SEQ ID NO: 359576 - DNA, 968 bp, Homo Sapiens
cgcatatgaaagggatttaaccgggtacagcctgggcactcagaagtaagaaacacttaggaacccactccaaagggagagaagaaagtctccatcccattgggagtcaacctgcccacttggttgtctgtcctcatgagttgctagggagatacttatactctttagatgatctttgtctaaattgtccgcctgtctttagcttttgtcctcagctgttacaagaaaactgcacagctgtacaagaaaatgatttccaaagcacaggtttcaagtgaggaaggatattttacagacttgagttgtgtgtgtgtgtttccaaccacagtcattcatactcaatgtaacgtgtgtacatggtatacataccatatataccatacatacacagaagtaaaatgtatatcacagaattctgtagggagtccctggcaagtcagctgtcacaggaggtactccacatgcttcaagggaattgatctttttccctctaggagtaacaattaatgtgatcaacttaggaattagcctgagtccttggcttaaatatatttgtaggaatttaggcaggaccaagacaggaaagcaagagatttcatttcaccagcaagtccattcagtctcaccagagcaatcaccagctgaaaagccagagggggcttcacataaaaatgggaaaaagaaagcttatgaatgggaaaaaaatgtctctctccaaaccaaggtgatggcatggcttcaatgaggaggaagaggtttgctatcagaataattggggccagagtctgcctttattgaaagaaaatgtcctcagagccatgcggtagtgctgggagtgggctcgcttaggagcagtgttcaggcagaggcactcaggcgccggcagggcccacagcacatgcatcatcgctgccagggcaacggtgcaggctggctccgggaggcgggctgagcaggctccaggtcag

SEQ ID NO: 359577 - DNA, 588 bp, Homo Sapiens
ccttgtaacagctgtgcagtttccttgtaacagctgaggaacaaacctaagacaggcggacaatttaagacaaagatcatcctaaagagtatagtatctcccctagcaactcatgaggacagacaacccaagtggcaaggttgaactcccaatgggatggcagacttttccttctctcctttttgagtttgtgtttcctaagtgtttcttaacttctgagtgcacccaggctgtacccgttagatcctttcaatatgacagttttgtgcttctctctgacaggatgtttctccaccgagctgtagcacaggatgggagggaggtgggaatactccttgcctaggctggagtttacagagacactgcacagcttacactcctgttaagtgtaaatattcaacacttccattccatttgtgtaaaaaataaagcacacacgattataaaatcaagatgtatatttcatactcagtgtgtctgtgcatatttattgcgtttctagttgtcagcggtgggtggccccattgtaaaaatgcctgatagagtgtttataaacatgtcatggttttattataagatataaatatt

SEQ ID NO: 359578 - DNA, 427 bp, Homo Sapiens
ggtgaaaaccggccgaccctaaagtatttgtgtccatttagtccccagtgccatggaccttgcctgtcctgaatccagcccatgagcccctttagaggacagaaaaatcaatacagggatgtacgggagaagatgatcagagatttgaggagaggagaaaggacagaagaggaataagaagggcagagaaacagagactaaaggagaggtggacaaaaagagaaagggaatagagaaggattataggagaaagtcaacaactcagagatggtgggaaggaggaataggaaaaggagaggaacaaaaaaaaaaaagagatggaattagtcggaagtagaaggaggaggagagtaaggaaaagaatgagaaaaaaagtagagtctcgagccagaggttggagagttctttcctggctcggagtcctgaa

SEQ ID NO: 359579 - DNA, 702 bp, Homo Sapiens
cctctccttttcctattcctccttcccaccatctctgagttgttgactttctcctataatccttctctattccctttctctttttgtccacctctcctttagtctctgtttctctgcccttcttattcctcttctgtcctttctcctctcctcaaatctctgatcatcttctcccgtacatccctgtattgatttttctgtcctctaaagggctcatggctgattcagacagcaagtccatgcactggactaatgacacaaatactttaggtcgccgtttcacctactcagcccagaaagtaaagctgagcgtgaggccctgacctggagcctgctccagcccgcctcccggagccagcctgcaccgttgccctggcagcgatgatgcatgtgctgtgggccctgccggcgcctgagtgcctctgcctgaacactgctcctaagcgagcccactcccagcactaccgcatggctctgaggacattttctttcaataaaggcagactctggccccaattattctgatagcaaacctcttcctcctcattgaagccatgccatcaccttggtttggagagagacatttttttcccattcataagctttctttttcccatttttatgtgaaggccccctctgcttttcagctgggtgattgctctgggtgagattgaatgggatttgctgggggaaatggaaatc

SEQ ID NO: 359580 - DNA, 456 bp, Homo Sapiens
  misc_feature (20)..(20): n is a, c, g, or t
  misc_feature (33)..(33): n is a, c, g, or t
  misc_feature (249)..(249): n is a, c, g, or t
ccccctttttggagtttggngttcccctaaggngtttcttaaacttcctggagtgcacccaggctgtaccccgtttagaccctttccaatatgacagttttggggcctctctctgacaggatgtttctccaccgagctgtagccacaggatgggagggaggtggaaatactcccttgccctaggctggagtttacagagacactgcacagccttacactccctgttaagtgtaaatattccaacacttnccattcccatttgtgtaaaaaataaagcacacacgattataaaatcaagatgtatatttcatactcagtgtgtctgtgcatatttattgcgtttctagttgtcagcggtgggtggccccattgtaaaaatgcctgatagagtgtttataaacatgtccatggttttattataagatataaatattaaaacattttatactttatggc

SEQ ID NO: 359581 - DNA, 274 bp, Homo Sapiens
tttttaaatagctatactgacctccacaacactgagcttctaacatgagacactcatgttagaatgcattaaaattcaaaacaagaaagttcacagggcaggaaaagttttatctcagggaactcttgccaagactgtttctatgagctaaaccggtaaagctttcacaatttaagcaagaacaatcttattcttggtagacatgaaaccccatgaatacaactcagtggcctatgctaaaaccacaggacagggcactccacaggggcgtttt

SEQ ID NO: 359582 - DNA, 1657 bp, Homo Sapiens
tcccctcacacggtgtctgcgctctcgctgggcaggggtgctgccccacgtccccattctggacaagccaacgccctcccacccagtgctgagagctgcatgcgagtcccatgagcaccctctgtgcacacaccttccagaacttagagccccaacaaagcgggagtgggggcagcatggtcccaacaatccccagggacgctcctctgtggctcccatgcaagtgcccatttgggctgcacgcttccctgaccggacgctgaaggccggcctgccacgactggccatgcccctcaaacgaccgagatgtcctctagtccctcagcccagagcagcagatgagaggctgaagttagcgggggaaacaagaggaaccctgtggcttcctgtgcatgggggctccctttggacataagctgccacagtccctgcctgcccaccttggctgacaaggcgctgcattgggagtgccccagacctagtttcaggtacttctgtgaggagaggggtagagagcccaggtgctcctcctcaccaccccctccacactcctggggaagtcactggccgcacaatacatctgtggaaatcgggcccaggtggcttgggacgtggcttttgtgctcacacaaaagaggtggcagtgttagctcaagcagtgagggggactgggctgcttttgcctgcgttcacacagggacggcccagggcaccaccatgctttccctccacccccaattacgtgaggagctgaccaggtgagcataacctcgaaaagggggcggggtcagtaaatggggccgtttcctcatctgctggggtccagggctgggggagtttgggaacgtttctgccaacctcagctaaaacgaaacacagatgtcaccttccagccaaccctgggcctacagggccaggcacagctccaccagaagagacaaaaattcatcatccaacattcacagaaaacacgcctgaaccctgggtttgttctccgatttgtgttcctcaaaaggcggtaaaacttgcaaggttaggtgtttccaagcaccttcgttggccattgagaactggagacagtgagccagccgtccccagagggagctcgggagccgaagggccactcccgtctccaaccactgcaggcgggcacgggcagggcagctgcagacgcccgggaaaggtgtccatcaggccccctggaatacaccacagatcctatttcttaaagtgcaacgagccccaagggctgtctggcatggggccctctgcaccccactagctctcgcctggggggtgcctagtgtcaggcttcctggccgcagaggccacagcccagccatgcaagtttgaggtgctggggggcagaggtggccaggagaagagcttttcctggggcagtgggaaggctgggctagggtggtggtggatgatatgcaggcacagcgcctctgggtcagcgaagaccaggaaggatgccccttcgagggcaccagcagaccgccattccttcaaagtgccccacctcgcccacatccccatgaacactcctgctggtggcctccatggctgggatgaaacgagttccacttcaacacccaacacaccaaccccaaccccaagtgcaccggcacgttccacctgtccccaaccccaa

SEQ ID NO: 359583 - DNA, 2198 bp, Homo Sapiens
  misc_feature (1687)..(1743): n is a, c, g, or t
agcccgtgcctctacctttgcaggaacgcgctcatgttcaacaacgagctcatggccgacgtgcacttcgtcgtggggcccccgggggcgaccaggacggtgcccgcccacaagtacgtcttggctgtcggcagctccgtcttctatgccatgttctacggagacctggcggaagtcaaatctgaaattcacattccagacgtggagcccgcagcctttctgatcctcttaaagtacatgtacagtgatgagatcgatctggaagccgacacggtgctggccactctgtacgctgctaagaagtacatcgtcccagcattggcaaaagcctgtgtcaactttctggagacaagtttggaagccaagaacgcctgcgtcctgctgtcccagagccggctgtttgaggagcccgagctgacgcagcgctgctgggaggtcattgacgcacaggccgagatggccctacggtccgaaggcttctgtgagatagaccggcagacgctggagatcattgtcactcgggaggccctcaacaccaaagaggcggtggtcttcgaggccgtcctgaactgggccgaggcggagtgcaagaggcaggggctgccaatcaccccacgaaacaagaggcatgttctggggcgagccctctatctggtccgaattccaaccatgaccctagaggagtttgccaacggcgctgccaagtcagacatcctgactctggaggagacccacagcatcttcctgtggtacacggccaccaacaagccccgcctggactttcccctgaccaagaggaagggcctcgccccgcagaggtgccaccgattccagtcttctgcctaccgcagcaaccagtggcggtaccgcgggcgctgcgacagcatccagtttgcagtggacagaagggtatttattgcagggctgggcctgtatggctccagctctgggaaggctgagtacagcgtgaagattgagctcaagcggctcggggtggttctggctcagaacttgaccaagttcatgtcagacggatccagtaacaccttcccggtctggtttgaacacccggtccaggttgaacaagacaccttctacacggccagtgccgtcctggacggcagcgaactcagctactttgggcaggaggggatgacggaagtgcagtgtggaaaggtggccttccagttccagtgctcctcggacagcaccaacgggactggggtccagggtgggcagatccctgagctcattttctatgcctgaggtgcccggggaggctgcagcaggtcagcgagtgagtggaggggaagtcaagatgctaactgcttcttgacaccatgaaaggctgctcttaactttgtctctctttgacatgtagtcagctgaagcttgactgtgtagagacattttccacacagccagaacccagggattggagtcttaggcatctctggtacagtggggtgcacgtctcaggtggaggaagatttacggctcaagacaggccccagatcccctcccagtggcacccatgccacctgctttgaggggttggatcttcctgctaccctcttggattctaagtggttccaagcttaacttgagaccttcccttcaaatctaaaattggcaaaaagtcacttaaaatagtggacttctgtaataaaggttgcctaaaataacnnnnnnnnnnnnnnnnnnnnnnnnnnnnnnnnnnnnnnnnnnnnnnnnnnnnnnnnngaggggggggcgcgcgcctcaaagttttccccgaggggggcccccatttttcgggcgcccccccggttttgtgtgaaaaagggggcccccaataaggaggggcgactatataaagcaccacaggagccacggggccgcagctattaaacacagaaggggcagggggcgggcaaaacaccgcggccacacaggtggggaaacacattcggtgggaggaagagacacactccctaaccagcggggcggagggggacacacaacatgggtgggccacaaccacccccatccagagcgatgaatccacccgagccgcttcaggaggacaccaatcactacaacgacctcgcaagccggtaacataaggggtggtacacacaaccaaggagcggggcaacatatacatgcgcgcccgcagcaaagcaaatcttggccacccagggagacgacagacgcca

SEQ ID NO: 359584 - DNA, 599 bp, Homo Sapiens
tatgtgttgtatatgcctttataaccataaaccatgtctggcagaatacacagaaactattaacagattacccaggagtgggactcgggggtaagtgaggttatagagagagaggcttactttttgctttgtacttttttgtattatttaaattagaaacaattaaaactaggaacaggattatttccataatttaaaaaaataggagcccacggggttagtgaataagctgttacgtgtcataatgaaccccccctgtttgtgtaacgaatccccatttacagtagtctgtaggcagacattgtgaagaaactagtagttctttctttctcctatatgcacctataggccggcagaaatatctagccctgaaaagtgaaatgaagcatgctttctgaatggttcatcatttactgtttccttccagtgaatggaagattttaacacaaaggagagtttgcaggcagatgttgagaagaagctagtagaagcttccaccttgttaatctttatgtatttatttagttatcaagtcatttgtcttgatattagttcatttaattatttaaatgaattaatgcctgtaatgtaggcagaag

SEQ ID NO: 359585 - DNA, 310 bp, Homo Sapiens
cccaggcagcatgcaggagggtctgtggggctcacctcctcaccttacccaccatcactcgcgcctagctctcacctctcagttgaatgaatagtgggagatcatttgacttttaatttatgagaattattttatgttatttatgtatataattaactgttttatacatagtagtctcatcaaatgaattcgggcttggggtgatattgtctccattctccagatacaagtgctccaggcatccatggaatcagcaggagaccagggctcctaagatatatttttaaaaatcagtatcgatttctttttg

SEQ ID NO: 359586 - DNA, 1584 bp, Homo Sapiens
gtggacttcacctcgtgcacagtcctcttctgtgtcctgggaattgtgctcctggtgactgggatgttcactagcattgtgctctacttccaatacgtttactggctccacatgctctatgctgctctgggggccatttgtttcaccctgttcctggcttacgacacacagctggtcctggggaaccggaagcacaccatcagccccgaggactacatcactggcgccctgcagatttacacagacatcatctacatcttcacctttgtgctgcagctgatgggggatcgcaattaaggagcaagcccccattttcacccgatcctgggctctcccttccaagctagagggctgggccctatgactgtggtctgggctttaggcccctttccttccccttgagtaacatgcccagtttcctttctgtcctggagacaggtggcctctctggctatggatgtgtgggtacttggtggggacggaggagctagggactaactgttgctcttggtgggcttggcagggactaggctgaagatgtgtcttctccccgccacctactgtatgacaccacattcttcctaacagctggggttgtgaggaatatgaaaagagcctattcgatagctagaagggaatatgaaaggtagaagtgacttcaaggtcacgaggttcccctcccacctctgtcacaggcttcttgactacgtagttggagctatttcttcccccagcaaagccagagagctttgtccccggcctcctggacacataggccattatcctgtattcctttggcttggcatcttttagctcaggaaggtagaagagatctgtgcccatgggtctccttgcttcaatcccttcttgtttcagtgacatatgtattgtttatctgggttagggatgggggacagataatagaacgagcaaagtaacctatacaggccagcatggaacagcatctcccctgggcttgctcctggcttgtgacgctataagacagagcaggccacatgtggccatctgctccccattcttgaaagctgctggggcctccttgcaggcttctggatctctggtcagagtgaactcttgcttcctgtattcaggcagctcagagcagaaagtaaggggcagagtcatacgtgtggccaggaagtagccagggtgaagagagactcggtgcgggcagggagaatgcctgggggtccctcacctggctagggagataccgaagcctactgtggtactgaagacttctgggttctttccttctgctaacccagggagggtcctaagaggaaggtgacttctctctgtttgtcttaagttgcactgggggatttctgacttgaggcccatctctccagccagccactgccttctttgtaatattaagtgccttgagctggaatggggaagggggacaagggtcagtctgtcgggtgggggcagaaatcaaatcagcccaaggatatagttaggattaattacttaatagagaaatcctaactatatcacacaaagggatacaactataaatgtaataaaatttatgtctagaagttaaaacccaaaaaa

SEQ ID NO: 359587 - DNA, 469 bp, Homo Sapiens
  misc_feature (44)..(44): n is a, c, g, or t
ttaaggggccaaaatcaaaacgtttgccccaggaaataaccccnggtgaaagaaaagactcggtgccgggccagggaagaaatgccctgggggtcccctcaccctggcctagggagatacccgaagccctactgtggtactgaagacttctgggttctttccttctgcctaaccccagggagggtccctaagaggaaggtgacttctctctgtttgtcttaagttgcactgggggatttctgacttgaggcccatctctccagccagccactgccttctttgtaatattaagtgccttgagctggaatggggaagggggacaagggtcagtctgtcgggtgggggcagaaatcaaatcagcccaaggatatagttaggattaattacttaatagagaaatcctaactatatcacacaaagggatacaactataaatgtaataaaatttatgtctagaagttaaaaaaaa

SEQ ID NO: 359588 - DNA, 907 bp, Homo Sapiens
  misc_feature (425)..(444): n is a, c, g, or t
atctttttaatgatttatttgcaagtattgagatttgacctgaaaaacaatgaaacacatgaacacacttccgattttctcctcgctgattagcttcctgcctgctgtcagtgctggacgaagtgctataactactttatgtaacattacagaacagctagaggtcctggggtaagagaaaaaaagcacatcacaacaaatgtgaaagccttcattattacacgttccagtttgtctcgctgtgtaggcataagctaatggtttattttcagaaagctgcctgaaacgttgctttgtattcttctaggaagaactttaattcctcctgaggaactctactttctgagccaaactgctaattttctgcggaactgtctagaagatcattcaagagaccctgcagttgcactttctcgtaaaagttnnnnnnnnnnnnnnnnnnnnggggttttcccggggccttgggaacatttgggcctatgaagaagtttgggcatatattttatactggagttgagaacaactttagataatccatatttatactatccgcagaaagccattggggcaaagcgttcagcccattagcactcatttaacccggggttagcaataattctttgtgaaaacagggtgccagtccttatgtggtgataaactaagaaagccccatgggaattttaaaagtgtggtgtaggatgtgaaaccaggtggaccttatattatggccgagagggaatttgcagcattaacgttcctaacgggggccaaaaccaagagaaagggttccagcaactttcgatgacacgtagttgggccacatggtcaggccaatttggtgtggactatttatggtacctttttcataactgggattggcaaattaagctggggagatctaaatgag

SEQ ID NO: 359589 - DNA, 922 bp, Homo Sapiens
  misc_feature (41)..(41): n is a, c, g, or t
  misc_feature (54)..(54): n is a, c, g, or t
  misc_feature (141)..(154): n is a, c, g, or t
  misc_feature (474)..(520): n is a, c, g, or t
  misc_feature (759)..(769): n is a, c, g, or t
gccctaaagcccccagctgcctcgggaggctgaggcttganaaatcgccttganccctaggaggtggaggttgccattccaactgaggatccatacccacttcattcccagcccgggtgacagagcaagactctgtcctcnnnnnnnnnnnnnnggaaaactctgtgatggacatttgtttagtaaatcccttcagtatttatccctcctttccccacagcagctttctttcctgtcaactagaaaggagcaggatgtaataaatacattttggtgtgactaggccacaccaactcttaatcatctcccattttccttagacatttaaatttcaaggcaggtaccctctgtgtactcagaaatttgaagaagttatttggttttccaaaatgcacactgcgggttattgatttgttctttacaactattgttctcatatttctcacactaaataaatctctatgagagcttctnnnnnnnnnnnnnnnnnnnnnnnnnnnnnnnnnnnnnnnnnnnnnnngaggggggggggcgagcataaaaagataccaccgacggagcgccccactgatagcgcgtaacccagcatttttcgttgtcagaagcggggtccccacatgagagagaggaggcaaataaaaacgacgagacagcggggcacagagtatacacacacggcggcgacgggggggaacagaccgcgccgacgacggtgagacaacccctcgtggggagaagggagacccactatgaacaacnnnnnnnnnnnagagacagaaagtattgttgggggagacagaaaacttctatactatggaaaggaagaataatattaaagagagcgcttctgacaagagggcgcggaacaactaattataaacagacgttttagcaacaggggtggagaagaaggtggtggtgt

SEQ ID NO: 359590 - DNA, 601 bp, Homo Sapiens
  misc_feature (554)..(554): n is a, c, g, or t
taagcacctccttgaacactgaattgatcagcctgctgcgtggagtgcccaggccgctgtggacatcaaggacttacaaagggcatgcggccgctgcactatgcggcctggcagggccggaaggagcccatgaagctggtgctgaaggcgggctcggccgtgaacatcccgtctgatgagggccacatccccctgcacctggcggcccagcatggtcactatgatgtgtctgagatgctgctacagcaccagtctaacccgtgcatggtggacaactcggggaagacgcccctggacctggcctgcgagttcggccgcgttggggtggtccagctgctcctcagcagcaatatgtgtgcggcgctgctggagccccggccgggagacgccaccgaccccaacggcaccagccctttgcacctcgcagctaaaaacggccacatcgacatcatcaggtaggagccggtagcaggggaggggcctcagcctttaggggttccccaggggtttcagcagcagccggggggttcaggggcaccagtttttgggttttnggggataaggggcgggacaagggcagggttccaggttccttggttca

SEQ ID NO: 359591 - DNA, 495 bp, Homo Sapiens
  misc_feature (12)..(12): n is a, c, g, or t
accagatcctgncctcagcccttccggagtagcctgggacctaacgggtgccaggcccacccacacccctgcctaatttttgtaatttttaagtaagaagacgggggttccccacccataattggtccaggccttatccttgaaactccctgaccctcaggtgaatcccaccctgccctctgccctccccaaagtgcctgagattaccaggcataagcccagtgcacccagccgagaattagtatttttatgtatggttaaaccttggcgtctagccatattttatgtcataatacaatggatttgtgaagagcagattccatgagtaactctgacaggtattttagatcatgatctcaacaatattcttccaaaatggcatacatcttttgtacaaagaacttgaaatgtaaatactgtgtttgtgctgtaagagttgtgtatttcaaaaactgaaatctcataaaaagttaaatttttgtctgacaaaaaaaa

SEQ ID NO: 359592 - DNA, 383 bp, Homo Sapiens
atgtcctttgaatgcgttgctgccctcagtcaaaacatagcataacttcatctcagcaatgtcagcttgtgtaaacactcgagtgctctggtttccaaggccagttttgataatgaagccatgctctggtcctctggtcactttatacttcagaagcctgtggggactgtcctgatcttctgccttcagagacttgctggtaatcaggaagcccatgtgtccagtgtgaaggcgcttcaaggctggggcacccctgttggtagtaatctggggaagcctattgtctaatgatcttatctggaccctcattacttgaggtttgtgtgtcgccagggcagtgtctggtaggacatagaaatcagtgtgagtgccgtctgtcacag

SEQ ID NO: 359593 - DNA, 421 bp, Homo Sapiens
tgtgacagacggcactcacactgatttctatgtcctaccagacactgccctggcgacacacaaacctcaagtaatgagggtccagataagatcattagacaataggcttccccagattactaccaacaggggtgccccagccttgaagcgccttcacactggacacatgggcttcctgattaccagcaagtctctgaaggcagaagatcaggacagtccccacaggcttctgaagtataaagtgaccagaggaccagagcatggctttcattattcaaaactgggccttgggaaaccagaggcactcgagtgttttacacaagctggacatttgatgaggatgaaggatatcctatgtctttgaattgaggggcaggcaacggattcaaaagggacatcttctatttatcttgtttggatg

SEQ ID NO: 359594 - DNA, 456 bp, Homo Sapiens
  misc_feature (445)..(445): n is a, c, g, or t
ctcggctctaccttgtctttggtgcgcaccaaagactcgggagaactggaaaggctgtctggggtcttctgactgcaggggaaggatgtactttccaaacaaatgatacaaccctgaccaagctaaaagacgcttgttaaaggctattttctatatttattgttgggaaaagtcactttaaagacttgtgctatttggaagcaaagctattttttttgtcagtggaatgcagtttttttactattccatcatgaggaacaacatagattccatgatctttttaatgacagtacagactgagatttgaaggaaacatgcacaaatctgtaaaacatagaccttcgctttatttttgtaagtatcacctgccaccatgttttgtaatttgaggtcttgatttcaccattgtcggtgaagaaaattttcaataaatatgtattaccanaatgaagctta

SEQ ID NO: 359595 - DNA, 877 bp, Homo Sapiens
cacccacttatcccttcatttgacaccattcattaagtgccttctgtgtgtcagtccctggccactcactgcagttcaaggccccctttccgctctgctgtactcctcgcctacctactccttgccttttctgtcgcacagccccttctttccaggcgagattcctcagcttctgagtaggaaacactccgggctccaggcttctggttgggaagggaaggccaggccaaaagctccaccggccgtatagataatgtactcgcagttttgtatcttccattcatactttaacctacaggtcatttgagtcttcacacaaataataacctatctggccaggagaattatctcagaacagaagtcatcagatcatcagagcccccagatggctacagaccagagattccacgctctcaggctgactagagtccgcatctcatctccaaactacacttccctggagaacaagtgccacaaaaatgaaaacaggccacttctcaggagttgaataatcaggggtcaccggaccccttggttgatgcactgcagcatggtggctttctgagtcctgttggccaccaagtgtcagcctcagcactcccgggactattgccaagaaggggcaagggatgagtcaagaaggtgagacccttcccggtgggcacgtgggccaggctgtgtgagatgttggatgtttggtactgtccatgtctgggtgtgtgcctattacctcagcatttctcacaaagtgtaccatgtagcatgttttgtgtatataaaagggagggtttttttaaaaatatattcccagattatccttgtaatgacacgaatctgcaataaaagccatcagtgctatttggatgtatctacaaaa

SEQ ID NO: 359596 - DNA, 385 bp, Homo Sapiens
  misc_feature (85)..(85): n is a, c, g, or t
  misc_feature (143)..(143): n is a, c, g, or t
agactcggcacggctagggaacagcggcggctggtagcgagcactggctgaggggcagcagcggggagggcagctgcaggagcantgacacaacagttgtcccaagcactgtcgtcagctgtagctgggcggctagagcgcanatacgggatgagatcaagaagacagtccctccatgtgtctcaaggagtctggagcctatggcaggccaactgagcaactcagtggctaccaagctcacagctgtggagggcagcatgaaagagaacatctccaagctgctcaagtccaagaacttgactgatgccatcgcccgagcagctgcagacacattacaagggccgatgcaggctgcctaccgggaagccttccagagtgtggtgct

SEQ ID NO: 359597 - DNA, 416 bp, Homo Sapiens
ccgattccaggcactttctgtagcaaatgactgtgaattacgacttctcttgcccttccttctagcagtctgtgcctcctctctgaccagtttggagggcactgaagaaaggcaagggccgtgctgctgctgggcggggcaggagaggagcctggccagtgtgccacattaaatacccgtgcaggcgcggagaagcaaccggcacccccttccggcctgaaagccctccctgcaagaaggtgtgcaggagagaagaggccccggcatggggatctgggttctagagggcatgtgatgactgtaaatgttcactgggtgggtagggagtggtatccagtgttcaagtgcagaaatctttggctttgctaccagttccatatgatgagaaataaacgttcgctgaggttttgtttcat

SEQ ID NO: 359598 - DNA, 816 bp, Homo Sapiens
  misc_feature (190)..(190): n is a, c, g, or t
cctctgccccggctgcatgaggagaacaccccagagacccgaagtccactgggtggctggtggtcttggcctcgctggaattgcagccatgtctgaggactgcagctctagcccacccaagggctcagcccagggacaatgctgtgtgaacccccaagccctagtgtggacccccccaagcaggtgaaanccctgcggtgtggccccagcgcacctcagagacagtggagattcagaggccagggcgtcaggcgtggctgaagctcggctccagggcggccattctgaaaatccaccaattaatttcacctgcaaagggacttgccttgagggaattcaaaagcccccacttgaggaaaattagagatttcctgttttatagtctgaataaagtgctcaaaaattcatctctagtacgtctctcctgcaaaagtgcaggttgtcatcaaaaggcctggcttatgtgttttcagctctctaaagcaatcgaagccttttcagccgaccacagctgaaggagtcccacaccgcagcccccagggcagggataaaggactggaggaaggctctgggcacctggattggaacctcacccccttcccagcttccagccacacagaagctccccagcacactggccacagtggcattagggaattgggggagctcaaggacaagccccacaaagccgagggaacagcagcgtgagccccctgccctggcacccaggagtggaagacaccctctggtccccctgtgcccccatgccaggctcatgggctctctggggagaccttggcctctaggctgttcctc

SEQ ID NO: 359599 - DNA, 524 bp, Homo Sapiens
gaaatgggatgtcattctgagactcagaaacccctgagcttgttagatggacagacatcctttccatcttatgtggatgagtgtttcttcagtgtctttagtatcaatttacccagatactgattttgaaagcctcattcacaccataaactttgttctaaacctctgtcttttacattgtccttctccaatgccttacctcttagttacgattctgaaaccaagagtacatctcaagtatgtagctgcaatgggagctctgcttcacgactgtagctagtgtttaatgctgagtaaaaaatgtgccttaaagggtagcctgagtcctgtcatcaaaataatcacatgctggctgaggaccctcaagctgatgacagtgtttcccaagttaaacaggcccaactaaaaatttttttctcccttatttgggtctttgaggaaacctttacaaaatccctggcctacattgtgttgacaagattcctgtttgttactaaaagtttgattttggtactaaatcttct

SEQ ID NO: 359600 - DNA, 116 bp, Homo Sapiens
atataagttactctgggatggggagggtggttattgtgggggctgcccctccccctgcacagtagtttgtcctgtggtttattttgtattacctgtaaataaagtggctttatttt

SEQ ID NO: 359601 - DNA, 528 bp, Homo Sapiens
tgagctatgcctgttgaggcatctggagactgagaaagaatcaaaggcagagaagaccagccgtgctcctgcattccgtcactccatgacttcatctcagtgtcacagacaagctgccatcagaggggctggcagtagggagttccaggagcggggacttctcgggaaaatcctataacttgctttactttactttgtcccaggttggagtccctaccctcccacctcccacctgatatgcagtgcttttgactatcttatgcatggtttattcctctggcttggatgacaacaatacccatagtcaattttcctatgtaactatagatcaaatgatgcaacaacaggccttgggaggcctcaggtgtgcgagtgcctctgggaggcgcagatgcccacacagccagcactgacttgtgttcgagcacagaacggatataatcagtctggcctctacaacaagttttgcattgtagaattgtatttagctttgccttggatgaaataaaaattatgtttaataattaa

SEQ ID NO: 359602 - DNA, 540 bp, Homo Sapiens
agggtctgaatgaaagcatctttaatcaacactcaacactcgcaatattctagaaaaccatatactgtgctggttgaggccaaaggttaacattgctccactgttcaccaaggaagggggcagtggccatccgccgcggcctcacgtgcgttgtaacaagccctcatcacatgtgtgagtcttacgtgcacaaaaagagaaggctttggtactgaaactggacaccttgtgtactcgataccttcacagcttctattggacatattttctttttaggaatgaaggaaaattctcccatttttgagccattcttttgtcaattctacaaaattgcatgtaactttataaatatttttaaaagatatagttttgtaaatatttaatattccgctaatttgattttgaattgtaaatgtcaagtattctgtttttggggtttttatgttttattatactttgttaaaaaggacaaattgtacatttttagaatgtttttatgagtaaatttaatgtactgaaaataaaaattttaaaaaaggc

SEQ ID NO: 359603 - DNA, 433 bp, Homo Sapiens
  misc_feature (14)..(14): n is a, c, g, or t
  misc_feature (42)..(42): n is a, c, g, or t
  misc_feature (73)..(73): n is a, c, g, or t
  misc_feature (130)..(130): n is a, c, g, or t
  misc_feature (182)..(182): n is a, c, g, or t
cccacggtcccccnaggaagggggccagtggcccaccggccncggccctcacgtgccgttgtaacaagccccncatcacatgtgtgaagccctacgtgcacaaaaagagaaggcctttggtactgaaacnggacaccttgtgtaccccgatacccttcacagcttcctattggacatatttnctttttaggaatgaaggaaaattccccccatttttgagcccatccttttgtcaatcctacaaaattgcatgtaactttataaatatttttaaaagatatagttttgtaaatatttaatattccgctaatttgattttgaattgtaaatgtcaagtattctgtttttggggtttttatgttttattatactttgttaaaaaggacaaattgtacatttttagaatgtttttatgagtaaatttaatgtactg

SEQ ID NO: 359604 - DNA, 601 bp, Homo Sapiens
  misc_feature (31)..(31): n is a, c, g, or t
  misc_feature (75)..(75): n is a, c, g, or t
  misc_feature (537)..(558): n is a, c, g, or t
  misc_feature (564)..(564): n is a, c, g, or t
  misc_feature (578)..(578): n is a, c, g, or t
aaaacgctccttaaacgcgccgacctggtgnctttggaaaaatgcatccgaagctcgcctgctgggcaaaccctnaaagcccaaatgtgcggcctccctccggaaaaaaggcctcacggaagggtggttcccattttcctctgcgctgtgtagctccctacttaacagctgacgaattcccgacttcggacggcctcccctggagatgtcacacgccgccccatgcacgttcaagacgactggccagtccgcagaggccttcgctgctgggaacacagccgtgacagtgtcggaactcatctacctcaacgctgaatggcaggctccaagttgaaaagtttctgttttaatgttttgctggatttaaggttaacctctaatacttatcaaaatagttacgtgggtaacaacagacgctttcattcccctatactgaccactaaaacaaaaattccaatgttttttccttttgttatgagacggttttcaacaatttcagtgttgaaataggatttatttaaaatatttctttgcttnnnnnnnnnnnnnnnnnnnnnngtttgntttcagcacatatnccagccactgtaaatgccttcag

SEQ ID NO: 359605 - DNA, 1765 bp, Homo Sapiens
atttgaatgttaagcaaccagttaaaccaacgtcatgattaattttttcaagctgtcgaggggagcccttagaggggacaacttcttggagtggcggccaagctgggccttaccaggtgtgatcatagtcttaggtatcatggagttcccatctccgcagaggcaggctcttcccagctccacgagaggcggagaattgcaacttcttcctctctgggaacggcctatctagctcctgggaggaatctcaaagatctttcttcttaagacatcgaagaaaaactgagaggctgtagctcgacctagtttctgtgaagaattttgtcaagtgatccctctcggaccctgagcctcttttatttggattttgtgcctttgagcacaagagaatatgcactctgggttgcctggacagctggggtggtgattcacaggaagggtccaagccatcactacacctgactcaagccggaaagagctcccagaggacttcctggagctgccagcctcagcctgagatgcgggatattcgtccccaaggagcgaggagggacagctcgccttctttgcaggaaaaaatgctggcaggtggtgcaagcaaggacatctatgcatagaattctgacagcagctggaccctcaacttcttcagaagatgagaaacctgcctggcaccgctggcaggcatctggactgacaccgctctggaggcctcccacaagcagcaaccaagcccagaaaaagttgagaccagacccgctgtccctaaagatggggcccagaatgtcggggtgaagctgtaggaacagggtgaaagctggtggtgtgagcaaagagaccagctatggggtggtcaggggattccgggaggtgcatgggtatgttgcagacccccccaggacaagggtggctgtggaagaatggcaaataaacacaaggcaaagtctcagaggctgtgcattatgccatgagaaaacgtcgacggccaagttaggcagacaagccaagcggtctccacaagagtaggcagggatccaaaattcagagcacctgcagcttgctgggcatcctcactacacaggaggatgtgatggccacacatagatcaccaggaagaggacttgatcaccctctgccatgagccggcccacagataggggacattctgcaagaaagtaagatgcgtaacccatgatctaagagttatctgcctctgatagacacacgagtgggcaaatatcaagggcagagttatttttttgcatggacttcccagaggccagatgatgctgtgtgcggggtctcccaggtaacagtaaggatgttctttctagtcacccgcattgttcttgcaactgacagctgttctctcttggcctgtcctcagtggaagggggtaatgctacttcttaacaatcaaacaagcccttgcactcttctaggatctctggtgggggacattcccactgctagtcactcattcacgtatcttttccacttcctgacaaaatgaaggactaggatgattttcttgtgtggaattttgtttcctaatgaggtgttgctgaggctccaggttgctttaatgcccacaccctcccagattgtcctgagtgctggggcttcatgacgttgctgcagaagtctggacagcagggaccgtagccttcgccatgtgtctagcagagcacctgatacagaattgtcactcatacaatgtgtggtgaatgaatgagtgaggaaataaatgaaggaagtgctggaa

SEQ ID NO: 359606 - DNA, 1029 bp, Homo Sapiens
gcctcctccttgtggttattgctcagccctggcatccccagggaatggcagcagtgaggtagatgggaggacatttctggtcagggaactggcatcccattcagcatctcaggactcacaggccaacatgtgttccatggctgggaattgcctaccacccacatcagcttctgtttaccttttggcatcaaataatgaacagtgtttggaaatctttctacaggcaattacctccccaagagaagccttccttattttggagtaaggtcctaagatagctggatgaatcaggaaaaccatgtcccctctaggtattattaatataagcaggaagggatctactataggaatgaagtatttataaaccactgaaagggatagagaagtgaacattggagaaagccagtagcaactgtgagaaatcagcaacttgcaggaggcacagaaaactcctgctgatggtctcagcttccagcagcacaaaagcagatgatgtactggaaaatgctcagaagatgctacaaaacctcatgcctactgtctgccactgctggagaaggaatcatggtttctagaagtgcctctcattagtggactttaaagcaaatcctggctggcaggaaattctgaggaatatagctcttaggcttccagcctctaccatgcaggagagaacacagaaggactgatgtatgttggtggatccatgtatgtgtccagcacagcggcctgctggactctgagaactgggaaagatcagagcaagccttgcctcttatcttcgggaaaccagaatatgtttggggtggtaggagccacacagactcttctgagccccctcactcacttccttccccctgtgcctttcctttgagagtgaaggtgggtggagttgaccagagaaaggggagagaatttgggaaagacccaaagtgtttgtaattcttctttgtccttttacctacagaaatggtcacatggttctatttaaatagcctaataaacacatctggagcctgtcaaaaaaaa

SEQ ID NO: 359607 - DNA, 504 bp, Homo Sapiens
  misc_feature (15)..(15): n is a, c, g, or t
  misc_feature (38)..(38): n is a, c, g, or t
  misc_feature (46)..(46): n is a, c, g, or t
gcccaattttccaanaaaagcccctaaaaaccaccaanaaaaaatnccctatacggtagttgcctttagggggtggggggatgctatctgttagtgcttaaaagggggtaaatgcttgccgctttagaggtggatggtgcctcataaaaggccccagtcgggggtatttaaaaaggactgaacagaaatccttagctagtagaatggcagcacgctgtaaaattattactgtattgtgtactggctataagatgtagacacctttcagtaagccaatcatttgtaaccattctagcagtgtcatattaggttaataaggctgctgtgttttaaagggcatttttatttgggttttggtgaaattctttaatttgttgattatattcacataaaatcagcattcattgacacatagctctaatgacatatgtatgaaaaaccatacactggatgacctagtcgattatttaagcataaaataaattgtgttatacttcttcacct

SEQ ID NO: 359608 - DNA, 302 bp, Homo Sapiens
cttcttctttttcgggggactgggggactcctcccaagatcacattttagcatctttctctcctactccatttagaaaaataagtaacaggtgaaatgtggtctcagtgttaacgggataattctgctaccggctcctccctgatgattctgaaatacactactgaacgagctctggctggtcctttctatcctggatgtggttcttctgtgtagcaattccttgatgtccagtttggaaagatgtactcttctcaacaagaaaaacttaaatccgtcgtgcccaaatatagttgtgctttt

SEQ ID NO: 359609 - DNA, 713 bp, Homo Sapiens
gggagatttgaggtatggagaacattctcacctgatggaagcatcctgttcctgtacaggaggaggagctggtgcaagccctaggccacatatgtcacagttgttttggaccctccgtagcttttatactcataaaatattaaagttgcccctttcatatttgggtcattgaaagagcccaccgtactctaggttcctgctcactatgcacaacatctcagaagatggcgtacaaaactatttttctaactatagcacgggtaatgtgggggtggggagcctggggatataccctaaatgtggcaaatgatttaacctcccaccttgagggatgaaaaggaaacctatgcacttgaattttaattaaaattttaatttaattcattggatagcttgtgccagaaagaacagtcaatattcaagaagcaaaactgacgattagctcagtttcgggcctccctgtcgggggagttttcttgtctggaacacaaacacctacaagtagagtgtgagctggttcttgacaatcagatctcatcaaccctttgaaatgttctgggcagcacagctccttggtctgcatggttggtgtaagtataatcaagtagtgaaattgtatggtatatacctatatgccaacagtgtacacccgtatgtgcagaatttgctaatataaccatttcaataaaaacctattgaaaaagctaaaaaaa

SEQ ID NO: 359610 - DNA, 383 bp, Homo Sapiens
ggcttcaactccagttctactcaccccgggcggggcccctgaacgccaaggtgagggccttcgagtcaagaatgctgtctactgtgcagtcattttccctgaatttctcaaggagttggctgccatctcccaggctcatgccgtcacctcgcctttcttgttggagacttcagaggaaggatctggccctctcatctcaggctgtgggcccctcaatccttaactttcttccatggacaatcagggccatgggtggcccgggctggggctagggcacaggctcctttttatgtttggaggcagtggcaaaaggactttttaatttatttcagatgaatgttttatggagaacttgttgcaatatgtataaaagggaaatctct

SEQ ID NO: 359611 - DNA, 2053 bp, Homo Sapiens
  misc_feature (39)..(39): n is a, c, g, or t
  misc_feature (59)..(59): n is a, c, g, or t
  misc_feature (1261)..(1261): n is a, c, g, or t
ggcacgaggcagcctgcagctaggagagtatctagaggnagtggtgcgggcacgcaggnctggggtgctgctgctgcactcacgcggctgggctttctggcgggaagcagttacgggggccccttgcctggactcagcgacctgtcttccagcctggaaggggtttggagtcccagctctggctttagatttcttcatcataaggagtttttctagttaacatttttgttttgttacgagcaatgctggaaaaggtcgctcctgttctgttagtaccaaagttacattgtttcaataagcatagaaatctaaacaacatctgtacattagcatggtgagagcaaggaataaagcaggaaataggagaaaagtaaacaactttagggagcccaggcagtgtcatttaaactcactgagtcactaagacataattctcctaggccagagttaaagaaagtgccttaactcttcttgtgagggcagccactgccctccatggccaaggcaggacctccaagactcagtggttgagttgtctcctaccaccatgcccgccctccccaggtactgggtccatgccccctgtgcccaccctccccaggtgctgggtccatgctgtttgaaccaaagccttatttaaaggtggtcactggagatgctctcaggccagaactcaacagctatttttggggaatagggatctcccgtgtgcctaacgcagtagctattggtttgaacaatgtccagacaagacctgtacctttgagaatataactgtgtttggcacctgcatagcaccatgaggaagaccagccaccagtggaagcggggtcactgccccacagactggatgcaatgaggggctcacaggaggcccagccagcccgattgtgggctgaggggtctgcattcaagcacgatgttctagaataggagtttaacgtgtctacgtaacctagaatgtggttattaggaaaggggctgtgcatgtgggtgcagctggcggcacacctggtcaccagatggccagaagctgcccatcagccctgcccagatgtcagcctgggagctcaggctgctgccgcatggctggatgccctttagtgaaatgcctgttttcagctaagaaaggagaggccaggcaagcaaagtcatgccacaaagcatatcagagacccccgcagactcctggccccgtcccgccccccgtctgagttgtgtttttgttgctgttcctctgttgatggccagctctgctgtntggcatgagccactgatgttcatgtgagaattactgtttttaagtgtctctccacttaggtgtcctcagttcccacttttgctctcatttgccttcacagaggccactccacctgtccggatccagctgtctggtcatggtttggtttatttattttgtccttcaggggctgttttgccctaagaatgagggggcttcccctggtctgcagttcccaactttatcccttgctggccatgcgagcccagccctggtgcctcatgggatgggggggtaggggtccccaggatccttctggaggaaggtgcccatggatggatgggctgtatctgtgttttccctctgggagtctcatgggtccagcatcaggcctgaggtcagcaacagggaaagagggtgggccacggggagggcttggccccgcctatctagaggcttgcctcgggcccctccttggggaaggtttgcgtgcagagctgcaagggagagggttccagaagcattgccttttgcctcgtctaataggatccttaggacactgtgggctttaggaatgactatagatgctcacacgtgtttaaagtgacatttggagatgctctcagtcctgtggcatctggcacgaagtctccaagaagccactttgcctcttctcccttcaagcacaagctttactgcaaaagggccagtcgcgtttctatttctctcgatcccaggcttctgcggaccgacgatacgtttaaatgttgttctagtaaatattcttgaatgtattaaaatggctgaaacaac

SEQ ID NO: 359612 - DNA, 850 bp, Homo Sapiens
  misc_feature (431)..(431): n is a, c, g, or t
  misc_feature (704)..(712): n is a, c, g, or t
cacaatggatcctagatttcagactgtgttaaggttttttctttgttgatgttgttgttttaaatctaatgtgcacggtgtgactggcagagtgagtttaaaagctttacgagtgattaattgcttggcaggcacccacgctatctgcatttccagaactttactgatgcatccatgtacatttccactgaggaattttggtgggtggggggaggttgtgctgcctcacaatgtcacgtgtattaaagtctaagcagtcacttctgattcacttgcactgtttgggaaatgtcaggtttacaaaaacatacatgtttggaataaaaaatggctgcaaacaattcagaagttcaatctgtaatttacttgctaataagaactttttaaagtgttgaagctagggtttcaatgtaatacaacatgagcattanagagaactcaaggtccatctaattcacatgaacaacccacctgatgtggctgaactgtctgcagtccttggcctccacacaagaggtaccaccctcctctctgcatcaccctgactcccctggccccggggctacaccctagggttcttgattcttgagaataaattgtgccccaaaattaaaatgggaatgggaatttccctttatttattcaggtaagaaactttcctttttccccatggtggcccttggcccagtttaacctaaagccannnnnnnnncccagaaagccattttttgaataaacaattttctttaaccccattttttaacaaaaaaatatgggaatttcccccccttaaagggtttttttcaactcctccccttttcaattctgggggccaaattaaaaaaagatt

SEQ ID NO: 359613 - DNA, 639 bp, Homo Sapiens
  misc_feature (46)..(88): n is a, c, g, or t
tgtctggaccccaggaccctccctggaagagagctcagcccaaccnnnnnnnnnnnnnnnnnnnnnnnnnnnnnnnnnnnnnnnnnnncctgtgctcatgtgcacctgggtgtaaaatgactgttatctggttgtgttactcagggtgggctggggactcaccagaagaatcccccccagcctgcccaagacaggtttttcccttgtaccatcttcagagaggtcaggggaagagggtccaggtgggttaaggggggtcgctatggataaccactaagaccagactgctgccaggaggagtgggggataatgaggtggccccagggtcctggcacctggctttggttttccgtcttctttcctcaggacgcccctgaggcctgggacctgtgcctggcttcgaggagcatctgtggctgggtgatccagctgctggtgtgatcatgggcttccctcctctcagcagggcaggcgctcctgccccagagactgggcaactggctgtttctatgacgtatttatttttacttgtgtttcatgtcacttttttaaaaaaaagcaaacagaacaattgtaagtcagtataactgcctatcagttttctttatttctctttttgtaaaataaaatttaaactca

SEQ ID NO: 359614 - DNA, 530 bp, Homo Sapiens
ggataatgaccttggtttgaggtgcatgagtgaattttagaaatgaatgtacaatgtatgtctgattcacaccaggggaagtggcacagtgccctttctgggatccctacaaagtcaaattccttagatcctgagaagtggagtgcatgggatgccctgaaaaggtgggggtgtccctgtgtagcagccagtaactgatctgaagggagaggacttggctctggtgatgtaacatttcaagcctctgtgtaattacctagtcttagtcttttcttcctcattcttagtagagacgtggggaactttcatgaaaaatgctaattctgactcctctcagcgtgcaacagatttgttacacttcatccactcagctgcaagatctagagtgctttcagaggtgactggaagagttctctaataccctacaaagaccatggatctttgccacttcaggtgctgtggctcaaacctcttaaagtcatcccaggaaaaagtgttgattgtagtattctctcaatgtatgtaaatag

SEQ ID NO: 359615 - DNA, 694 bp, Homo Sapiens
  misc_feature (568)..(568): n is a, c, g, or t
  misc_feature (578)..(578): n is a, c, g, or t
  misc_feature (611)..(612): n is a, c, g, or t
  misc_feature (624)..(624): n is a, c, g, or t
  misc_feature (643)..(643): n is a, c, g, or t
ctttagaaagatctcatctaaatagtaagttaaggttgcgtctatgaaaccggtgcaccttgtcttgtttctacgagctttaaaaagtccaaatactgatgaggctgtggatcagaaggaaccaacagtgactgtgtttgctgtcaggttgccctcctttgcctcagagaacggtcatgggtcgttgggtgacgcgtggtgtgtacgggtcatgttcctgcagaatcctagtcagtctaggagtagttggatgtgcttatgaaatatgtcagatacagaaataaaggcatgaggatgattcttagtttctgaaattgaacagtagaagtgttttagcttcaatcttaatttctagataacagaaagtagttacatcacataaaggaaaatatgacatcgcatgctgccatgatagcaagcgtaagaaacaaaatcttggtaaatatacatatatatgcatattatgcaaatatattttctattaacatacaatgttataagaatgataacataactgcaagggggaaaatcatcctagatggttttaccttagagtaacgaataaccngagacgtctntgctttctgttgggtatcaggcctagaaatccnnacgagatgtggngcacattttcagtgattgnaatgtcactgggcaaacgtgtcactgtgttcgcacatgacagagaagctgg

SEQ ID NO: 359616 - DNA, 478 bp, Homo Sapiens
  misc_feature (15)..(15): n is a, c, g, or t
  misc_feature (23)..(23): n is a, c, g, or t
  misc_feature (83)..(83): n is a, c, g, or t
  misc_feature (113)..(113): n is a, c, g, or t
  misc_feature (119)..(119): n is a, c, g, or t
  misc_feature (158)..(158): n is a, c, g, or t
gtaaaattacccaanaatttgtnacctaacgcttgcctaatcatggccagcaagccgatgtccatattttccctttaatgtgnatgtaaacctactttcctgttaatcctagnaaattnaagattgaaagcctaaaacacttcctactgttcaatttncagaaactaagaatcatccctcatgccctttatttctgtatctgacatatttcataagcacatcccaactactccctagactgactaggattctgcaggaacatgacccgtacacaccacgcgtcacccaacgacccatgaccgttctctgaggcaaaggagggcaacctgacagcaaacacagtcactgttggttccttctgatccacagcctcatcagtatttggactttttaaagctcgtagaaacaagacaaggtgcaccggtttcatagacgcaaccttaacttactatttagatgagatctttctaaagaaaaa

SEQ ID NO: 359617 - DNA, 460 bp, Homo Sapiens
  misc_feature (20)..(20): n is a, c, g, or t
aacggtggtgagtgaaccanagcgtgtgcggaagtgtgcacgtctgcccgggcccacaccggaggggatgcagggctatacagcatcgaaagacccccgaaatcaggatgaggccagactacagggctgtgaatggcagagggaggcctttgaacgttattccccagggaaaaggaggctgtaggcaggtcagtgatgtgatcacatttaagttttaagaagagaggtgagtggggtgggccaggcagatgatccggaagaaagacagcaggcaggagccgcaggtgggccaaaggactggaagagggaggtggggcatggcgctgggtgcactctgtcacctgtactctgatgacacatttttattctcttcccaacaggcatgccaagaaagctctagaagttttgctcaacagtgaccactaattctcataatatacaaagtgtagtttttctgaac

SEQ ID NO: 359618 - DNA, 321 bp, Homo Sapiens
  misc_feature (251)..(251): n is a, c, g, or t
tttggctccacaggctcgagaagatgaaacatgacctgatggccactctgtccagcatcccagtccatcctagctgcccaggatgatgaaaaagctatggaaattgcacttgagagctataatcacgggaagcattgccgagcccctccctgctacataaatcatgctaagaagcacacaatggcctctttcctgatgggctaattgtcttggtttggtgtctcaggcccaggagctgggaagatgggagnacaaccatttattgttggaaagaccatctgtgcaacttgaatacaaagtgattcttttagttccccacac

SEQ ID NO: 359619 - DNA, 412 bp, Homo Sapiens
atttaaaagagtcagaaatcagtttggcaaagtgtactttcttaatttctatttatgatgaagtatagtcataatttatttgtaatactactttatggtataccagtgaaagaactgtagtataaaaaagaggtattaatgttttatgaaatctcatgcatcagttcatagcataaaatctagctggacaactaagaagctatggtagcaaacagtgatgttgatggaatgagaatcatgaactttcatattacctcaaaggattttttaatcagtttttttcacacatcagaaaaaactgactgtataaacacttatcactgacctttttctatgtgtagttttgccttttatcttttcccaaatttttataaagagaaattaataaatattttattacaacattgaaaaa

SEQ ID NO: 359620 - DNA, 466 bp, Homo Sapiens
  misc_feature (11)..(11): n is a, c, g, or t
  misc_feature (68)..(68): n is a, c, g, or t
aataacccttntgctgcaccaccccttattgcccttgttgtccacaaggggactactgctggttcaangtcatcacttcccacattcccagaaggaagaaaaggagaggtagagggcccagaagtatccccctccttttatcaggagccattaactttccccagaaacttcccatgtccacccagcagacctccacttacatctcactaggcagaactcctatcacttggccaccccagcagtcagggaagctggaagggtgagcattcagctatagagagtggaagcacaagcagcaagggaagaacaggtcagtaattgctgtagagtttcctgcccagcagcatctgccaaaactaggtaaattattttttaacataatagtatttttgtggattttcttacaaaagcaatgcatatatattgttactttgaaaaataaagattttaaatcttcaacaagccc

SEQ ID NO: 359621 - DNA, 595 bp, Homo Sapiens
ctccaacaaacttcccagcttccccagagctcaaaatccccacgtgaaaaccacctgggaaaagcccaaccacaggaatggtgccaaacacaggctgacaaggccaaagtgggggctgtttgcttccccagccttggcagagatgggtccccacatttgttcagaggcagaggcctctgcagggaacagagtatgcaaaggccttaagagtaggcctgtgtgagcagcagcaggaaggccagtggggctggggcagagtggggcacagagacggatcccatgtggcagtgagcagtggaggtcaaagccctaggatccagcttgtgtttcaaaaggatttcaggtcagcccttgcccattctgtttgctctcagagtaaaaaattgaggtcaatgttggagagatctggtaatccacgcagcaaactgcattgatggatgtggtctcagaccttgcatgtaccaaggtaacctaagcatgaagcatttatttttactttgtatttattttgaagtatttttaaatgtgtatgacttttataatcataaaaaattgaaattgtaaaaaaatggcagtggttatccctagggataag

SEQ ID NO: 359622 - DNA, 498 bp, Homo Sapiens
  misc_feature (218)..(246): n is a, c, g, or t
gcctatgacggggagatactcaatgtgcccctaaaagcactggggtcctagccccctcagaggaggggtggtccacagaaacctccctaggagagatgactccccgggacctatcccacaggaaggacatttctgggcaacaggaaccagaggagaaggggacagagcagtgtgcattagaaaaatcacactgtttagcacaactctaaagaaaggcnnnnnnnnnnnnnnnnnnnnnnnnnnnnnaaatcactatgtgaaaatatatgtacttattaattctactctttcacagaactaaacagggatgtgtttatgaatgttcattgagatgacaagctcatttcaatgcagtttgagttttactctcttagcatttaaggcattatttgctctcttacattgatgctgacagatgcttggtttatatttaacctaaaggtggcatttacaactgcaaagacttttaattatgatagaattgaaaacatactgaat

SEQ ID NO: 359623 - DNA, 299 bp, Homo Sapiens
  misc_feature (159)..(159): n is a, c, g, or t
  misc_feature (266)..(266): n is a, c, g, or t
  misc_feature (277)..(277): n is a, c, g, or t
  misc_feature (279)..(279): n is a, c, g, or t
gttcttggtacttatactttgaactatgatgtacatatttatggcttttggcttttaatataatggacttgcaagggctgccagaggttctgatatgtaagaaaactgcaaaaacaaatatagacaaatattttgattctagagaacgtctcagatgtncttataaagcttccaaatacaactccagtaagacatccctttccctgcaggggtgtggtctatattctttagatagttggttagtcaaaagaccagacaagttacanactaagagaancngtatttcacaacacagtaaa

SEQ ID NO: 359624 - DNA, 665 bp, Homo Sapiens
gttcactgccaggccatgggccccacacatctcaggccctgtgtgagggagcacactgagatggtgcaggagtgaatgggcatggcttggcctcgctacctcggggacctgttggagttctggcagcagggtgtctgcaggtgggacggcgttctgggcagagtcagaatggtcagaatgaaacagaacagccaactcacccacaggacagcttattttgaggcaaggttttggattttggaggaagcagccagatgaggcggtgagcctccagaaggtcagcctttggagcacgtaagatactgttacagggtccagaaatcgtgttcacatgggggctttgactcttcaaacagcttttgcagatcgtaaattgcatttgcctagtcgtgtgacctcaaaagaagtcagacatatttaatccagaaatagtttcgtttgagggagggcttgcaggtctgtaaatagcatttgctttcctggttagagattgggatgcagaaggagttttcagtatttctttttaaaacactaatgatcattgaagagtatttatgtaaacatacaacgtataatgggtgggggatccgatcatggtgatgtacggggtgaattctcttgccgtgttgcaaatgtgtaaaataaagattatctggcagaaaaaa

SEQ ID NO: 359625 - DNA, 2083 bp, Homo Sapiens
  misc_feature (107)..(107): n is a, c, g, or t
gaactagcttttttaaaaaaataagaattttggcattttggaactttgtcccatgtgagacattgtgcttttaaactgcccctttctaaaaatgacccctaaactcnaaacagatctcagtgtctgcatttcaactaactgggataccatacatagcaaaagcacaggttgttaaaaccagcagattttttcttccaaaggaacatcagtaggacttcccaaacatgttactagttcataaccagctatatgacaaagcaattggttccccacagtgacagctcacataaacacattttgactctgacacactgaaaacaaggatttccaagctaagcaagtcatcagaccagctccctaaaaggagtaacttttaaaaacacaaaaaagccaaagaaatatgaacttctcacttcacttacaaacaattttcacctttgtaagacaaaacaaagcaacctcaaagggaaaaatcccatacacataagtaagaattgtactagacgttcgcttgttatgtactttatgtacttgaactcaacaactactgtggatctgttttggctgaaaggtgtacgggaaacacagcccatgcacatatacatatatacatttatcaaaggcccatgaagttatccagatgttggcaaacacatgctttttgcccttttccacatggttaatgatcctcctcgtgtgtgtaatgtgaggtccccaatggctccccacttctacgccccaatccacagcctcactggcagcttagcttctggctttatcttttaggatgctacactgggtgggaaaaactgacgcatggataaaaatcatatatcaggagtgcctctgctgtatctattcatattcagccgttcagacaatattgttaggactgtctgatgaaatccaaagtggccggctagcaaagtatctaaaacgacaaatgcggtgggcaagctacactgtaatcaaaaaggcattgggcagaataggtctggtgtaactcaagtcatatggaatgatgaatcctactttgctgttcaatgaaaagatctattgcacttatgtttgtgagatgcaaaaataaggcaaatgcctaaataccgtatcatcttgcaaagaatgttgaagcacaaagattcacaaaactgtagcttttaatgaaaatattcaatctcagatcttatattttagaaataaaaatttgtatgtaatagcatacatgtgctaccaaaaaaatacccacaaacctagtttaaaaactgttaactaattaactgttagacttgtgtatgatctagaaggatatcacaataactttaaagcagagacgcagactaaaaccagggaaatcgtcagttgtctggcgatgagagggaaatggtcagatcagtagagtcaagtttgagggctaacagtcttgctataagactgacttttgcttaagtatgagtagtttcatgtaaagaggacaaataatacattccacagatttttcactcagctgcaagactgattctttcaaaaggaacaacattaaaaaacaaagtaacagaaaaccctcaccctagtacttaaacagaaatatagctgtgggtaaatctaatatggagaaagagtaatttgaaattgcaagatttcatttagtctattagggtagtgaccatattatggttgctaattagtctttatgcctcccaacacatgtacagttcctactgaacataccagcttttgcatatctaaatcaggaagagagacctctcactcctgccctaaatgggaaacatgatgctaacgtttccttctcccccccgtagtgaagcacatacaatgattagaatgaatgagaaggactgccagcttggattcctgcaatgaccatgactttagcgagctccacacagtccagagcagtgacagtatgactgtgtctatttgctttatgttctaaaccaaatggggaggtaggagggtaacccacataccgcccgaagtatttttcaggtcggcggtgttggtggtcggtggggtgggtgtgtggctggtcatgatggatagtgtgatgtgagcagagagggtg

SEQ ID NO: 359626 - DNA, 361 bp, Homo Sapiens
  misc_feature (39)..(39): n is a, c, g, or t
ggcctacactggggtggggaaaaaactgaacgccatggnataaaaaatccataaaatccaggagtgccctcctgactgtatcctattccatattccagcccgttccagacaatattgttaggactgtcctgatgaaatcccaaagtggccggctagcaaagtatcctaaaacgacaaatgcggtgggcaagctacactgtaatcaaaaaggcattgggcagaataggtctggtgtaactcaagtcatatggaatgatgaatcctactttgctgttcaatgaaaagatctattgcacttatgtttgtgagatgcaaaaataagcaaatgcctaaataccgtatcatcttgcaaagaatgttg

SEQ ID NO: 359627 - DNA, 488 bp, Homo Sapiens
  misc_feature (68)..(68): n is a, c, g, or t
  misc_feature (127)..(136): n is a, c, g, or t
tgagggtggggaggaatgcttggaagctgggggaggtcgaaggctgccagtgaagcccgtgaatgcanccactgcactcccagcccgggcgaacagagtaagaccctgtctcaagaaaaagagattnnnnnnnnnnttcccaacccacttggaggggcccaatacttgtataaattaaaattgtatggcaatatcttcatgcctgttcctgtgctcatcatgtcacaggccattaacaatgttcagattggcactggtctgtgcacccatctgatcattgctcctactccggttctctcttttaaaaaatacgtggatttgaactaaagatctctgcccacaataccaccagttatattcaagagcttgacttacaccttcttcccttctgctctcttccctcccttctccttccaactttcaaaataagtctttgaatccgtaataaagaaaacttcaaataatttctagtccctattttaaattga

SEQ ID NO: 359628 - DNA, 544 bp, Homo Sapiens
cctcaagaagtgcaactgttaccttgaaaatggaaaccagtctaacaaagtctgtgcccaaatttttaatccctccccaaacctccttccccccatacgactttttatttatgtaaggatgtgtgctgtcctaaatgatgggatgacccacacttttcccatgttctaaaagtgctcctctcccgcagggtccccagggctggtggttgctttgggtctacagctacgtcttacccacctcctgcctcaacagcctgtgtggtggcaaagccggtgtggggctggggaacgcagcgttctccaggagggggacctggctctccttctgcaatgcaggcgaaggcctagatgccagtgtgacctcccacaaggcgtggcttccagactccccggccggaagtgatgcttttttgccttgggccctgggtttgaagcagcctggctttctcttggtaagtggctggtgtcttagcagctgcaatctgagctcagccacctacacaccaccgtggccgacactttcattaaaaagtttcctgagacg

SEQ ID NO: 359629 - DNA, 535 bp, Homo Sapiens
ctggacccaataaagtggagagaagggcgtctctacacagcccggccagcgtggagggccccaggacagggacccaaaagcttgacgtcactgaacagggctgggtactggcagaacaggaagatttggccagaggtgacctcagtgttccctccaggggcatccaggcccctctgacctggggagaagaaggcccatgctcaggcccacctccctcttcccatcagagcccatgcgtcctgggcaccaccacttccactctgcttttcgaggctccggagggctcttcctgctgtgaaaggaaaggagaagaaagcctgtgggcaatggcaacctctgagtctggcattcttgccaatggctggccagcgaggagaatctcccgagccctgacacacaaaggcattttgtggctgcagaggaaatgggttggctctgaacaaagatgcagtttctagggccgtggccccaaatcgcttccccgagagtgaattttaacactgtaacaataaatactactgcacagcaaaaaaaa

SEQ ID NO: 359630 - DNA, 472 bp, Homo Sapiens
acagaccaccaactgaataagggaaatctggttcttgaacttccaatgtatgaattggtgatggtaagcttagtctttatgatgtaagattggatttattggaacttctttatgtccagaagttgcagcacctttctttgtctctggaatgcccaagatctctactgcatcctgtagacatggagggtttccccccttattctgggtctgattatttttaaagaaacaccctttccttacccatcatggagacactactaaccttgtatatacttttattagagtgctgataacaccatattacagtagcatacttacatatctgttttcttaactgtgagctccttgagagcagggactgtgtgtttttgcttttatttcaccagtactcagaactatccacagtatagaaaagcactcaataaatggaataaatgaaaatgaatagataaataaatgatttcacttgtat

SEQ ID NO: 359631 - DNA, 382 bp, Homo Sapiens
  misc_feature (335)..(335): n is a, c, g, or t
  misc_feature (362)..(362): n is a, c, g, or t
ttctttatgtccagaagttgcagcacctttctttgtctctggaatgcccaagatctctactgcatcctgtagacatggagggtttccccccttattctgggtctgattatttttaaagaaacaccctttccttacccatcatggagacactactaaccttgtatatacttttattagagtgctgataacaccatattacagtagcatacttacatatctgttttcttaactgtgagctccttgagagcagggactgtgtgtttttgcttttatttcaccagtacttcaggaactatccacagtataggaaaaggcacttcaatgaaatgggaatnaaatggaaaatggaataggatgaaatnaaatggattttcacttgtta

SEQ ID NO: 359632 - DNA, 614 bp, Homo Sapiens
  misc_feature (129)..(129): n is a, c, g, or t
atttaatgaatgaaaaaattcacgtctctctttgatcctagactgcaagttacttaaaagaaatggaccgtattttacttatctctcatggcctgcaaattgagtttgcttactgaattaatgaatgantgaccaattgtacacatatgtctgtaaaacgtttacatatccacattcccattagactgagattcttgagggcagaaaccatgtcttcagctctcagcatggtgcctgactcatggtaggttgtcaaaagcatttgcagaactgaataaaacttacgtttaagtagtactggagcagtctcacataaccgggcacagtgtcttctaaatagacactaaaattatttcataattaaagacagatctcactaagcattttctgagttagtgccagttgaataatatgacaataagctataggagttcagaggagagtgagttctgtggactgaaatagtcaaagtggattttcagagcagatgagacgcgatgaaggctggggctactttggtgttttaagaacattaattaggcagcaggaaaatctgaggacagggagactagtaaggaaggctggaaagagccctgggtttggagttcagagat

SEQ ID NO: 359633 - DNA, 701 bp, Homo Sapiens
ggagaaggagcctccctgtagcgctgttggctccctccttcctgtggagtctccacagcagtccctccccaccatgaggccagagaggctaacagctttgctgtcacccaacagaaatgctttaagtactgaccactgctggagggaaaggctaccgctaacacttgggatgttttctgacagcctctgaaacttctacgaactgctgaggcataggatcctctcctaaaatttctcccagatcttaacgtcagggctgtctggccctttcatgagtatgtgggttatagtctctggcaggcacttgtgaagagtgtgactgattgacacttttttgccttggttgctgggaagctcagatctcccctctgcatgtcccttgcttaggacctcccatggtgtacttggagttgggacctcacctggctctcccttatctttccggctgccattttttcccctttctaactttctttcccatacacttatttgaaatattatctcacggtaacgaaataaagtgtctgtcacctcctgctgtgttgtcatcttgcatgagctatctaagttctctgttcttcagtttctgcatctgtaaaacgatgacaatgacagagccaacctcgctttgaggatcacatgagttaataaaggcctggcacacagttagcactcaataaatgttagttatgatttttatt

SEQ ID NO: 359634 - DNA, 456 bp, Homo Sapiens
  misc_feature (422)..(422): n is a, c, g, or t
  misc_feature (428)..(428): n is a, c, g, or t
  misc_feature (437)..(437): n is a, c, g, or t
tagggcttctcttggccatggtccccttccttctggaactgtgatgtagtcacatcctacagcctttagtgctggttcactagtgtcagataatccttggaatcgagactgccgtggcgaaggggtggcctcggaggcaggctctggagctgcttggatgtctttaggtggggtggtggctggctctcttcagcatgtaattggggaaaccctcgcgtctactaggggtgatacagatggtgattttaaagagcaaaactagacttctatgtgagaagtgctggaaaatgatttaggacatgtgtaaagttagatggaaagactgtaaatgtttaatatgaatatagtgttccttttgaagtaaggccagctgtttgaaccgttaaactgtggcatttccccattttgaatgtgttcatgtnatggtnaatgtatgnaaatgtttaaataaaatgc

SEQ ID NO: 359635 - DNA, 679 bp, Homo Sapiens
atacattgaaatctttaatcagacattctcaagtttcacacagtagtttttgatgttatgtacacacacaccaaatgtgtaacagttcaccacttccagagtgtggtcatgcccaaaacatgtttaagaaaggaaagcagtagctccttgctaacgatgtttcaggaggtttggggcacttggttttaatgagcttctgtcatttagggcttctcttggccatggtccccttccttctggaactgtgatgtagtcacatcctacagcctttagtgctggttcactagtgtcagataatcagttcttggaatcgagactgccgtggcgaaggggtggcctcggaggcaggctctggagctgcttggatgtctttaggtggggtggtggctggctctcttcagcatgtaattggggaaaccctcgcgtctactaggggtgatacagatggtgattttaaagagcaaaactagacttctatgtgagaagtgctggaaaatgatttaggacatgtgtaaagttagatggaaagactgtaaatgtttaatatgaatatagtgttcttttgaagtaaggccagctgttgaacggttaaactgtgcatttctcattttgatgtgtcatgtatgttaatgtatgaaatgattaaataaaatcaaaactggtacctgtttatacataa

SEQ ID NO: 359636 - DNA, 593 bp, Homo Sapiens
ctcggtacccctctctccacactggctctttgtaaactgatattcagccagcaatgcctaagactttgttaagatcatttctactgcttttctttctgcttcaaacacacagttcgtctctgaggaaagtaaaataaatggaataagagtaaattgggtaaggagatatccaaagctacccagtcccttgacccagcacagttggccgacccgtgtcactccctggctgtcgctgcttctctgtgctcactgaagggtgagccaggccagtgcttccccagcccctgggcctggtcactacacagtggaaaacagacaagcggccccttccccaaatcccaagagtgtcttgctgcttggtgggtgctcatcgcaatgttctgaaggctccagggccactttgtttgtaagtatgatctgggcctcaaaataccatagtagctgcttgataaaattctaaaaatatctggttctctattatgtaaacactattacagtcaccagtgtgtgaagactcttgagtctggttctcatatcagagtcatcatttttcttcctgtggaataaaatgccttgtggacttccaaaaaaaa

SEQ ID NO: 359637 - DNA, 377 bp, Homo Sapiens
  misc_feature (332)..(332): n is a, c, g, or t
gaaagaggccagaacccacaggaaaaacttcaaaacttgacatttgccagaatgtttaaaatttgttcagaaaaggttaaagcaacaagtttagcctttgtgcatgaagacgcctggcctgctagacgcgttgcccgtccctgcgtggtgctgtcccatgtcacttgaactgatagaggggcctgtgcaatctcctaaggcctgtgtttctgccatatattttattataaattacaatccactcatccacctgccctccaccaggagtggggcaccccataaagggtttagggccactttggcaggagggatgggagggtcaaaaaccactncccaggataagtttgggtttttcaacatttaggtaactttgtctt

SEQ ID NO: 359638 - DNA, 757 bp, Homo Sapiens
  misc_feature (33)..(33): n is a, c, g, or t
  misc_feature (703)..(703): n is a, c, g, or t
acttgacatttgccagaatgtttaaaatttgtncagaaaaggttaaagcaacaagtttagcctttgtgcatgaagacgcctggcctgctagacgcgttgcccgtccctgcgtggtgctgtcccatgtcacttgaactgatagaggggcctgtgcaatctcctaaggcctgtgtttctgccatatattttattataaattacaatccactcatccacctgccctccaccaggagtgggcaccccataagggtttaggccactttgcagaggatggaggtcaaaaaccactcccagataagtttggttttcaacatttagtaacttgtctcagggcagagggcaggcagggggaccgaggggcagcagataggagagcactgagcccggatagttctcagcctggcaagtggctctgaagctgccttcagacaaggctagtctaggggcaagagtgcgagctggctgacaataagaacgtggccacctgcccagcttcacacctcccccgacttcagcccttcctaaacccagacctgcggtccaggcaggcactgggctgtgccactcgagctcactgcccacacacagcatgcctttgggtgccatctctttgcccaagcctggaagccttggcaggtggggaaattgccgctgccctgggtgggattgggcacttgagattgcatccatttcagcaggattnacagaggcagaatttcctttttaaagcacatttttccattttagggaaaggaag

SEQ ID NO: 359639 - DNA, 603 bp, Homo Sapiens
gggaggaagtcttatcttctgcagtgagtatggcccgatgctttctgtggctaaacacgcatgtaatggcgaagaaataaaagcctacgtgttggtaaatccaacagcaagggagatttttgaatcataataactcataaggtgctatctgttcagtgatgccctcagagctcttgctgttagctggcagctgacgctgctaggatagttagtttggaaatggtacttcataataaactacacaaggaaagtcagccaccgtgtcttatgaggaattggacctaataaattttagtgtgccttccaaacctgagaatatatgcttttggaagttaaaatttaaatggcttttgccacatacatagatcttcatgatgtgtgagtgtaattccatgtggatatcagttaccaaacattacaaaaaaattttatggcccaaaatgaccaacgaaattgttacaatagaatttatccaattttgatctttttatattcttctaccacacctggaaacagaccaatagacattttggggttttataatgggaatttgtataaagcattactctttttcaataaattgttttttaatttaaaaaaagg

SEQ ID NO: 359640 - DNA, 377 bp, Homo Sapiens
ggaaaaagggctcagagaggtcaaagaaatgtccctgagatcacatggcttctagtggagtcaagatccaaacccaatgtgtctgattccttagcccttgggggtccggaggctgctgaacaagaaaggaggtggagaggagagaaagctgcaggcataccaccgcacacccttctccctcccctgtaaaaacaaccctgggaactccctggacactagcagaatatcatacactaaggataagggatgagaggaggctggttagaaataaagcagtgtcagggggaaggagctactcagtaggctctgtgtgattctagaaagactgtatgaaaattctgaacactgaacagaataaacaataaaggtgcaatgga

SEQ ID NO: 359641 - DNA, 818 bp, Homo Sapiens
  misc_feature (25)..(25): n is a, c, g, or t
  misc_feature (122)..(122): n is a, c, g, or t
  misc_feature (222)..(222): n is a, c, g, or t
  misc_feature (511)..(511): n is a, c, g, or t
  misc_feature (736)..(744): n is a, c, g, or t
ccagacactaaatcagttgtgctanaaaagaattttaaagatatctcctcttgttctcagggtataaagcatgtggatcactttggctttatctgccgggagtctccagagcctagacttanccagtatatttgttatgtattccagtgtgccagcgaatctctggttgatgaggtaatgctgactctgaaacaggccttcagtacggcggctgccctgcanagtgccaagacgcagattaaactgtgtgaggcctgcccgatgcactctttgcataagctctgtgaaaggattgaaggtctctacccaccaagagccaagctggtgatacagaggcatctctcatcactgacagataatgagcaagctgacatctttgaaagagttcagaaaatgaagccagtcagtgaccaggaagaaaatgaacttgtgattttacacctgaggcagctgtgtgaagccaagcagaagacacacgtgcacatcggggaaggcccttctactatttcanatagtacaatcccagaaaatgcaaacagcagtggaaggttcaaacttgacattctgaaaaataaagctaagagatccttaactagctcccctgaaaaatatcttcctcaaggggaagctaacagaaatgaaaaggtccgctttggaaagtgtggaacagttttgaaagggcccaacaattctttgctttcagaaaaaaggcctacctcccccaggggggaatttnnnnnnnnnaggggaaaacccggcccgggggtgcccccacccgggtcccttaaagttttgggggaaaaccgttttttcccccc

SEQ ID NO: 359642 - DNA, 1210 bp, Homo Sapiens
tacagagtgagactctgtctcaaaaaataataataaaataaatgaacacacatgctgctgagtccgcagggggggcagagcagaggacagcgtgcttttgtgtactgttggaagactggctcctcctgtacagcacctctgagcccttgtgcaccgccctgccacgggcaccatccagtcctggccgtgtgaccacccacagctgactgggcagcaggcacaggccctacccgagcaggccggagttggctcgcatgactccagctgaggctgcctgtgtacatttctccagataccctatggctaattttgttataactgcacagtggctgctgccattttgtattaaatatattgtgaaacaaacctatctggggagaagcaatctacttgccgctgcttcctgtctggatccagcttgtgtccttggagagtggctggcccaggtcctattcccgtcctccagcccgttctttcatgagggacaggaaggtaaaatcagcccttaggagagaggtctcagcctccctttcccagatctcccagtgagttttaaaggaagcagggagcccagagtgctaagttcttacagccagaaggaagcttatagatttctgaaaaccgcccctttgtttttaaaaagatcaacacaatttgactttctcaaggtcaaaacgaactagaatccagatctgctcatggcaaaaatgggggtgttctgagaattccagctttgggccgcactgtacagcagtctggatagagtgtgatctgagaagggaatgggtctgggttgttccaccccttccgagttccaaaaagagggaactggttttcttggttctcagcccagcagcacctatcctggctcttggtcctggcctgcagccaagtgctgttcctagcctgaggcttgagacaggtggggttggctcctcaccaaccccagttccgtcccatcctgagggcaagatcctgggctcataggcagtccctttcacttccttgtcttgctccctgctatgctggagatgaatgtgactaaaagggccatcttgctggcttaatgtgtggctggagagaccagcctggagacaatgtggcaaaatggggcgcttcatccagtctgtctaagccctgtcgacttggggaggtgatttctttcctggttctatatgtgaagcaaaataaatgttttaaaattaaaagc

SEQ ID NO: 359643 - DNA, 736 bp, Homo Sapiens
aagttgaggtcactttttacagggaaatagaagaaactgagaacctagtctcgtatattctgagtaaatggaatcagtcctgggaatagagagtgtcctttgtgccagtattacaagaagcccaaactttatttttataaagggagaggatgactttctcaatcaagtgccaccagataaaaacaactgcagaggctggaactgccacagcctgtatgaaaggccactttggaaagggtttggatgagctggtggccttcaacctctgccggcatctgccactttctgctaccctagggaggccaggaggagcttcggaggaccatcgccacactggtctagccatcatgacacctctggaggtgtcaagctcctgaaacaagctcatttcagtttctggcaaccccgtgtatttccgttttccccctaaagaacatatcataatcattgcacaaataaccatgttctttggtaatgaagccagaaaagaaagcgcaaaagaatggtgactcatttggactcttatctgtcttggaatgtcactgcttcattgccttctctgattgccttttgcatgtaaaactatgtgtctggagtcttttgccatctggatcttagtacctctttattatgtgcaatttattcctcaggtgtggaaatttctactgcaattgactacgtttgattattttgagcttgtgaaagatttctgaacagtgattgtcccgttaatagc

SEQ ID NO: 359644 - DNA, 499 bp, Homo Sapiens
tgagcaccagcacttccagcgcttcacttaacggcataaagcaaaacaggaccttggcacaccgtcagctcgaactcaacactggcagccaccgtctcacccctgcggaggagcgctcccgtctcccacaggtgccttaccgcgttccctcccgctgctttcatttttctgacctaataattacgggaaatggaaagtctgggccagcatcaataaaatgacaccaaaaataagtagatgaaatcaaatgaatatgagaacatcttgttcttcaatatcacgggtttttgttaatgtttcataagtaattctccccacttgatttttcttctataaaatcccatagaacaatgtttatgctatagccatttaatatatgtacaaattgtaaagaatatgtataaatgttttacacgaatgtaagagcatgtagaagccaacatataaataaattgtttaaaaaaactgtacagtaaattctcaaagcacttttcaaaac

SEQ ID NO: 359645 - DNA, 498 bp, Homo Sapiens
  misc_feature (16)..(16): n is a, c, g, or t
  misc_feature (27)..(27): n is a, c, g, or t
  misc_feature (60)..(60): n is a, c, g, or t
  misc_feature (67)..(67): n is a, c, g, or t
  misc_feature (74)..(74): n is a, c, g, or t
  misc_feature (93)..(93): n is a, c, g, or t
aatgtttcctgaagcnacccagcactncccagcgccttcaacttaaagggccaaaaagcnaaaaacnggacctnggcaacaccgtcaagcccngaactcaacacctggcagcccaccgtcctcacccccgcggaggagcgcctccccgtcctccccacaggtgcccttacccgcgttcccccccccgctgctttccatttttcctgaccctaataattacgggaaatggaaagtcctgggcccagcatcaataaaatgacacccaaaaataagtagatgaaatcaaatgaatatgagaacatccttgttcttcaatatcacgggtttttgttaatgtttcataagtaattctccccacttgatttttcttctataaaatcccatagaacaatgtttatgctatagccatttaatatatgtacaaattgtaaagaatatgtataaatgttttacacgaatgtaagagcatgtagaagccaacatataaataaattgttt

SEQ ID NO: 359646 - DNA, 1721 bp, Homo Sapiens
  misc_feature (24)..(24): n is a, c, g, or t
  misc_feature (1537)..(1537): n is a, c, g, or t
ccgacggcagctacctacgcgtantaggtagcgaggcctgggtggcgaattcggcacgagggccaacattccctttcctaggacttctggggccaggttctgcggagcaggttacctggtatatttcacaaggcccatgacaatgcatcgggcggtgtctcccacagagcctactccgagatctctctcagccttgtctgcttatcacactggcttgatcgcgcccatgaagatccgcacagaggcccctgggaaccttcgtttatacagtgggagccccactcgcagcgagaaagagcaggtctccatcagctccttctactacaaggagcggaaatcaagacgatggaaaagtaagcgtgagggatcagactctggcaatcgacagatcaaggctgctgggaaagtcatcatccaggatattgcttgcctcctgcctgttcacaaatcgctgggagagctgtacatattgaatgtgaatgatattcaggaaacatgtcagaagaatgccgcctctgccttgctcgttggaagaaaggatcttgtccaggtttggtcgctggctacggtagctacagatctttgccttggtccgaaatctgacccagatttggaaacaccctgggctcgacatccatttgggcggcagctgctggagtccctgttggctcactattgccggctccgggatgttcagacactggcgatgctctgtagcgtgtttgaagcccagtctcggcctcaggggctaccaaacccctttgggccttttcctaaccgttcttctaatcttgtggtgtcccatagtcgatatcctagctttacctcttctggttcctgctccagtatgtcagacccagggctcaacactggcggctggaacatagcgggaagagaggcagagcacttgtcctccccttggggagaatcctcaccagaagagctccgctttgggagtctgacctacagtgatccccgtgagcgagaacgcgaccagcatgataaaaataaaaggctcctggaccccgccaatacccagcaatttgatgactttaagaaatgctatggggaaatcctctaccgttggggtctgagagagaagcgagctgaagtgttgaagtttgtctcctgtcctcctgaccctcacaaagggatcgagttcggcgtgtactgcagccactgccggagtgaggtccgtggcacgcagttgccatctgcaaaggcttcacgttccagtgtgccatctgtcacgtggctgtgcggggatcgtccaatttctgcctgacctgtgggcacggtggccacaccagccacatgatggagtggtttcggacccaggaggtgtgtcccaccgggtgtgggtgccactgcctgcttgaaagcactttctgaacctacagaagttgggtattgtctgaaatcccagaggacccataagtgccggtgacaagctgtctgtcaggggagaggctccagaacctgggttcgtccccagtggagaccggaggatgatcccccaaagactgcgcagcatcangctcttggtgggcctctgcccttctcttctgtttggccaccctggtggtgggatggcactgggtggaaaaataaggacagaagtgcagaagctgcgcctttgggtgggtggcccatggccggctgagctacccaaagggggaaggttttcatggaagaaaaagcccttgtgttcccggggccaa

SEQ ID NO: 359647 - DNA, 556 bp, Homo Sapiens
acaagctgtctgtcaggggagaggctccagaacctgggttcgtccccagtgagaccggagatgatcccccaaggactgcgcaatcaagctcttggtgggcctctgccttctcttctgtttggccacctggtgtggatgtcactgtgtgaagataaggacagaagtgcaagagctgcgctttgtgtgttgtctatgtcggctgagctaccaaggtggaagttttcatggagaaaagcacctggctccagggccagtgttacagtgttaccctgtaaggtgttagccttaaaccaccgagcagcgttctcttgatgccagtgcagagaccagagtcagatgcccgaggacagtgggtaggaatttcatcaacaaatggacctatggcatcatggctttagaagctggtacatttactgagctgatggacagtggccttctaaaatatgacacttaaattgtaaatatgcactgtacttaaggattcttaagatgtatttttttgttatttctcctccagctgctatcccttggctaataaaattctagtaatttgaaa

SEQ ID NO: 359648 - DNA, 912 bp, Homo Sapiens
caaccatcacatccaccatgaaagctaagctgctgaagatcctgaaggacacagccctgcagaaagtgaagcgtggccagagctgcctggagccctgcctgcgccagctcgtctcctgccttgagtccttgtgaaccaggaagacagcgcttccagcaacccgttgcactccccaactctgtcactccccccttaccgacgtttgcgcgggcgaccacggcttacgggtcgtaccaggacgccaacattccctttcctaggacttctggggccaggttctgcggagcaagttacctggtatatttcacaaggcccatgacaatgcatcgggcggtgtctcccacagagcctactccgagatctctctcagccttgtctgcttatcacactggcttgatcgcgcccatgaagatccgcacagaggcccctgggaaccttcgtttatacagtgggagccccactcgcagcgagaaagagcaggtctccatcagctccttctactacaaggagcggatgtctcctcgctctgcccggcggcgttggtccatacaagcaattaacgacttcccgaaatcaagacgatggaaaagtaagcgtgagggatcagactctggcaatcgacagatcaaggctgctgggaaagtcatcatccaggatatgcttgcctcctgcctgttcacaaatcgctgggagagctgtacatattgaatgtgaatgatattcaggaaacatgtcagaagaatgcgcctctgcttgtcgttggaagaacggatcttgtgccaggtcggtcgctggataccggagctacagatcttggcctgggccgaaattctggcccagattgggaacaccctgggctcgcgaatcattgggcagagcgcgggaacctgggggccaccaggcggccacgag

SEQ ID NO: 359649 - DNA, 467 bp, Homo Sapiens
ctcttttgaggcaattcctgaggggctggctcagactcgagtgtcacagaaccaagaaaacaggagctgccttgatccttaggtggtctctccctggctggggaaaggccgtggtgctgggctgggcaggccacccactctttattcctgcagggatgcatataagtgcaccttcatttcctgccggtgctgtggggaagcagcctgaataaagcatgaagtacttaagccaagtacaccaacctcccaggtaggtactggggccagactggatggcagggggtggtagaaacaccaagtggccacccccactgggcctctacacatacctggggcccctggagcagggctgcttgctctcagatattcctttcttgcatcttactgggtatgagatgtgaagggatcccgtttgggtgggtaaagatggatgaagtgcttctagggatagccaggccctctgtccc

SEQ ID NO: 359650 - DNA, 481 bp, Homo Sapiens
  misc_feature (455)..(455): n is a, c, g, or t
cctttcgctcctgccctctgcccggccctactgagattcccaaggagaaggccgagagggggcgctccaggtctggagcaggtataattggagcatttgcactgagacccctgccagagaggagaaaaccctttcaagggaaattttaatctaaaaggaaaaaaccaaaatattgatgagaaggagtcctccagttagtgaaaggggagtttcgttttcagctttctttggttcctactccaattccacatccttcatcctggccatgcccccaccttcaagagcatgaagcactcttgggagttgtgggtcctgcccagagtccagagagcagcctcagctgagcacaggtccgagggggcgggggcagggccaaggagtttcaaaagaagccaatgggagggagagggagcctcagaagcccggaggagcttggtggttgggagaattacggncaggggacgcagccacatttcagacc

SEQ ID NO: 359651 - DNA, 395 bp, Homo Sapiens
  misc_feature (70)..(70): n is a, c, g, or t
ggagttcaaggtcaccctcggcaatataatggagactctgtctcctaaaatcaaaaattagagaaatatnaaaattataaaattaaaaaagaaaatgtcatgatagctcaggtttcagagaggatgctgcactactctgggaaaaaagtgaagtgacagctcagccctgacagcaggacctagaagggctgagatgaagaggctgacctgtagagctcagcctggacccacaggaggggtagttgagttcacagagggatactgccatttaagctggttgtgaatggggtggtatgaagaccgactgcactagtattctctccaggttacaaataccatgaccaaactgtgtaatgtgatactaatatgcagaataaagcatattaaaaaacaaa

SEQ ID NO: 359652 - DNA, 2678 bp, Homo Sapiens
ccaactttccaagttctgtctcttcatgaaagtgtcttgcccaaggaggaatgtacatgcccccactggtgatcaaggtcatcgaccacaggcagttgggcggaagcctgtcgtcggccagtgcaccatcgagcgcctggaccgctttcgctgtgacccttatgcagggaaagaggacatcgtcccacagctcaaagcctcccttctgtctgccccaccatgccgggacatcgttatcgaaatggaagacaccaaaccattactggcttctaagctgacagaaaaggaggaagaaatcgtggactggtggagtaaattttatgcttcctcaggggaacatgaaaaatgcggacagtatattcagaaaggctattccaagctcaagatatataattgtgaactagaaaatgtagcagaatttgagggcctgacagacttctcagatacgttcaagttgtaccgaggcaagtcggatgaaaatgaagatccttctgtggttggagagttctaagggctcctttcggatctaccctctgccggatgaccccagcgtgccagcccctcccagacagtttcgggaattacctgacagcgtcccacaggaatgcacggttaggatttacatcgttcgaggcttaagagctccagccccaggacaacaatggcctgtgtgaccccttacataaaaataacactgggcaacacaaagtccatcgaagaccgagatcactaacattcccataaactctcaacccagtctttggcaggatgtacgaactgagctgctacttacctcaagaaaaagacctgaaaatttctgtctatgattatgacacctttacccgggatgaaaaagtaggagaaacaattattgatctggaaaaccgattcctttcccgctttgggtcccactgcggcataccagaggagtactgtgtttctggagtcaatacctggcgagatcaactgagaccaacacagctgcttcaaaatgtcgccagattcaaaggcttcccacaacccatcctttccgaagatgggagtagaatcagatatggaggacgagactacagcttggatgaatttgaagccaacaaaatcctgcaccagcacctcggggcccctgaagagcggcttgctcttcacatcctcaggactcaggggctggtccctgagcacgtggaaacaaggactttgcacagcaccttccagcccaacatttcccagggaaaacttcagatgtgggtggatgttttccccaagagtttggggccaccaggccctcctttcaacatcacaccccggaaagccaagaaatactacctgcgtgtgatcatctggaacaccaaggacgttatcttggacgagaaaagcatcacaggagaggaaatgagtgacatctacgtcaaaggctggattcctggcaatgaagaaaacaaacagaaaacagatgtccattacagatctttggatggtgaagggaattttaactggcgatttgttttcccgtttgactaccttccagccgaacaactctgtatcgttgcgaaaaaagagcatttctggagtattgaccaaacggaatttcgaatcccacccaggctgatcattcagatatgggacaatgacaagttttctctggatgactacttgggtttcctagaacttgacttgcgtcacacgatcattcctgcaaaatcaccagagaaatgcaggttgggacatgattccggacctcaaagccatgaacccccttaaagccaagacagcctccctctttgagcagaagtccatgaaaggatggtggccatgctacgcagagaaagatggcgcccgcgtaatggctgggaaacgtggagatgacattggaaatcctcaacgagaaggaaggccgacgagaggccagccgggaaagggcgggacgaacccaacatgaaccccaagctggacttaccaaatcgaccagaaacctccttcctctggttcaccaacccatgcaagaccatgaagttcatcgtgtggcgccgctttaagtgggtcatcatcggcttgctgttcctgcttatcctgctgctcttcgtggccgtgctcctctactctttgccgaactatttgtcaatgaagattgtaaagccaaatgtgtaacaaaggcaaaggcttcatttcaagagtcatccagcaatgagagaatcctgcctctgtagaccaacatccagtgtgattttgtgtctgagaccacaccccagtagcaggttacgccatgtcaccgagccccattgattcccagagggtcttagtcctggaaagtcaggccaacaagcaacgtttgcatcatgttatctcttaagtattaaaagttttattttctaaagtttaaatcatgtttttcaaaatatttttcaaggtggctggttccatttaaaaatcatctttttatatgtgtcttcggttctagacttcagcttttggaaattgctaaatagaattcaaaaatctctgcatcctgaggtgatatacttcatatttgtaatcaactgaaagagctgtgcattataaaatcagttagaatagttagaacaattcttatttatgcccacaaccattgctatattttgtatggatgtcataaaagtctatttaacctctgtaatgaaactaaataaaaatgtttcacccgc

SEQ ID NO: 359653 - DNA, 1093 bp, Homo Sapiens
  misc_feature (876)..(876): n is a, c, g, or t
  misc_feature (1040)..(1040): n is a, c, g, or t
ggtcagccccgacctcgggccgacgatgtcagaagctccgggggtgggtccagaagatctgttttattcaatcctctaggtgattctgtatgctcgctagaggttgataactactgctattagaatgaagtcgtataataaagtctctgaaaaggccttattcagaataagcaagaaaggttctgtgattcacttttgcttctggggctggcaaaaaccttctctgaacccacacaccaagttcgtagttggtaggtgcccagccaagtcctgacatcttcatgccccctctgcagagggcggctgtacgatgttcacatgtctgcgtttggtcagacatcatctccttggctgccctttgaaaccaaatcacttgccttggggataaagtgctcaattggcattagtgagaagcccatcctatcccttgacatacttaatcatatatctctccagagaactcacctgacaaatgtctctgagcacaggctgacaccaaagtggcacaactgcacagttctcagatttctttgcacagattgatttttattgcgggttttgttggggtgtcttaatgttcatctcttttccactgcccatcctctgtgaacccatacctctctagatggagcaggtggccactggtgcctcatactcagtattgaaaaccactacatcccagctacctataatgctgtcagctcaaaatcatagccaggtagttcttgaactcagaacttaaatcctgcacgtgggcactccaccactgactgggaccgagctgggcatatgttgtttctttgtgtttctacatcaaaatgttcgtctaaggtttgaactgttctgctgataaccttccccgttgttcatagctantttcatggccaaccaactccatcacagggttgttgatatcgtcatataaagccattgcaaggactctggaaactgccgccaatgaccaatttctgactaaccagccaccttttctctctcttagctccacgtcagcactgagaccagactcgagcacccctgtnctgtaaggcgagacaaaatgggcgtgtgttattttgggggtttttgtgttttt

SEQ ID NO: 359654 - DNA, 847 bp, Homo Sapiens
ttttgaaatactcgttactaaagctgtttataaaccacaggtgccataagatccccaaacggactaaagttatctctgctcttccatggtcttgttcctctcgttttggctttaggaagcatgtctttaacagcaccgctcgttcacaagttcccccatcaagttgtttggaggccttcagctttaaatgtacaggcttaaagtgcgcttgcaaacgtttgctctcctttttttctgaatgttgattgccttagctggccacctggtgttctgcatgtagccttctgtggtcatgtgaaaggagacaggctcttctaagttgagttgggatttttgcactcagtgaaaagctgaagtgcaaaagagctatcaaagacaagaggataaagagactgggatagtcttttcccaaggaccctctttagagggcccttaaagacctcctttgggaattctggggaaaaagaaaaagtaatcttctacttgcttcaagatttgatttttttaaaaaagcctgcgacctattcaatacattatgcttaaattagcagtttctctggaattcctgtctctcctttaaaagaaaggagagaacattttagaacaatagttctcaaagtgtgttccccgggacaagcagcatctgcaacacttaggaaggtcttcgaaatactaattcgtaagccccacctcaggcctactgaatcagaagctctgggggttgggtccagaagtctgttttagtcaaccctctaggtgattctgatgctcgctaaaggttgagaacttactgcttttagaatgaagtcggtataataaagtctcttgaaaaggccttattcagaat

SEQ ID NO: 359655 - DNA, 474 bp, Homo Sapiens
taggcagcatcagcaaaagtaaagaccagttaagaggttggtgaccagataaggacaacctgattcctgccgcccagcttaaaaacacaaaccagaagaaggagctggaagtggactgtggcctggacaagtccaactgtggcaaacagcaaaaccacacattggactataatctggccccagggcccctggggcgggggaccatgccaggaaagtttccccacagtgacaagagcttaggagagaaggcgccactgcggttacacagtgaaaagccagagtgtcggatatcagcgatatgctcccccagggactccatgtaccagtctgtgtgtttgatatcagaggagaggaatgaatgtgtcattgccacggaggtataaggcaggagcctacctgggacatccctgctcagccccgcggctggaccttccttctgcattgtttacattgcatcccggttgggacgttttt

SEQ ID NO: 359656 - DNA, 2902 bp, Homo Sapiens
  misc_feature (2507)..(2507): n is a, c, g, or t
  misc_feature (2546)..(2548): n is a, c, g, or t
cgctgcgcgcaggccgggaacacgaggccaagagccgcagccccagccgccttggtgcagcgtacaccggcactagcccgcttgcagccccaggattagacagaagacgcgtcctcggcgcggtcgccgcccagccgtagtcacctgtgagttacctacagcggcagcgtgcagcgtgagccatgcgagaacggccaaaggggagcagcgtcccgagaggagcgcctcttttcagggacccctgcctggctggcggacgcgcgggaaagcggcgtcgcgaacagatgccagattgagggccctgcgggtggagagagcgacgcccgaggggatggcggcacgcgtcccggagcgcctctgtgctggagcgctacttgctgctaggtgcgcacctttggccacgcatgcgcgctggcctggctccgcgcgtcttccagccttgcagctgcatggagttccactccacctgcagcgcggcgtactgtgccagtgggcgcgccttgcgagcgccgtgctgccggactttcttccgccgtctgccttaagcacttccaggcggtcgtctcgcccggaccctgcaccttcgggaccgtctccacgccggtactcgggcaccaactcctttcgctgtccgggacgacacgacgcggcggcggtgcgcaaccctctccagactgcccttcaatttcacctggccgggtaccttctcgctcatcatcgaagcttggcacgcgccaggagacgacctgcggccagaggccttgccaccagatgcactcatcagcaagatcgccatccagggctccctagctgtgggtcagaactggttattggatgagcaaaccagcaccctcacaaggctgcgctactcttaccgggtcatctgcagtgacaactactatggagacaactgctcccgcctgtgcaagaagcgcaatgaccacttcggccactatgtgtgccagccagatggcaacttgtcctgccttgcccggttggacgtggggaatattgccaacagcctatctgtctttcgggctgtcatgaacagaatggctactgcagcaagccagcagagtgcctctgccgcccaggctggcagggccggctgtgtaacgaatgcatcccccacaatggctgtcgccacggcacctgcagcactccctggcaatgtacttgtgatgagggctggggaggcctgttttgtgaccaagatctcaactactgcacccaccactccccatgcaagaatggggcaacgtgctccaacagtgggcagcgaagctacacctgcacctgtcgcccaggctacactggtgtggactgtgagctggagctcagcgagtgtgacagcaacccctgtcgcaatggaggcagctgtaaggaccaggaggatggctaccactgcctgtgtcctccgggctactatggcctgcattgtgaacacagcaccttgagctgcgccgactccccctgcttcaatgggggctcctgccgggagcgcaaccagggggccaactatgcttgtgaatgtccccccaacttcaccggctccaactgcgagaagaaagtggacaggtgcaccagcaacccctgtgccaacgggggacagtgcctgaaccgaggtccaagccgcatgtgccgctgccgtcctggattcacgggcacctactgtgaactccacgtcagcgactgtgcccgtaacccttgcgcccacggtggcacttgccatgacctggagaatgggctcatgtgcacctgccctgccggcttctctggccgacgctgtgaggtgcggacatccatcgatgcctgtgcctcgagtccctgcttcaacagggccacctgctacaccgacctctccacagacacctttgtgtgcaactgcccttatggctttgtgggcagccgctgcgagttccccgtgggcttgccgcccagcttcccctgggtggccgtctcgctgggtgtggggctggcagtgctgctggtactgctgggcatggtggcagtggctgtgcggcagctgcggcttcgacggccggacgacggcagcagggaagccatgaacaacttgtcggacttccagaaggacaacctgattcctgccgcccagcttaaaaacacaaaccagaagaaggagctggaagtggactgtggcctgggacaagtccaactgtggcaaacagcaaaaccacacattggactataatctggccccaggccccctggggcggggggaccatgccaggaaaagtttccccacagtgacaagagctttaggaagagaaggcgccactgcgggttacacagtgaaaaagcccagagtggcgggatatcagcgatatgctcccccagtggactccatgtaccagtctgtgtgcttgatatcagaggagaggaatgaatgtgtcattgccacggaggtataaggcaggagcctacctggacatccctgctcagccccgcggctggaccttccttctgcattgtttacattgcatccntggatgggacgtttttcatatgcaacgtgctgctctcannngaggaggagggaatggcaggaaccggacagactgtgaacttgccaagagatgcaatacccttcacaaacttttggggtgtctgtctgggcatcagattgggcagctgcaccaacccagaggaacagaagagaagagagatgccactgggcactgcccctgccagtagtgggcccttcaggggggctcctttccgggggctccggcctggttttccaaaaaaagagtgggcagtaagccccatgggggcccgggagcctgcttgtggcctccacctggggcatccggtggttttccaaaaagtggcctttgggccccaggcttcccaccggggaacggtttgggccccacattcc

SEQ ID NO: 359657 - DNA, 634 bp, Homo Sapiens
tggattcatcccctgatcttaaatcaaaacgtcagatcaatgaactatgaactaaagtatttttcttaagcctattgagtgatttattttttaaaaaatgtttaaatgcatatgcttttctttcagcacaaacaacagcaaaaacttttgtaataactaacttacctttgcatgtatgaagaactgagtcatttatttccctaacttactcctctttcaagtaacaggtggcagatcataaaatgaattctttattgtatctacacactccacattctttactgtgtcctactactgtatcttggctccctgctgtattaaacaccatcttaagcacttgtacctgcaggactccttcttgacattattgtctcccccttcaaagtcactcaaagagtgggacttcatcaaaagaaatgaattagtctctatcacaccgaatactaagatttatttcctctgatggtacatagatttctctctcactaagagggtcactctcatagagcaatgtcttgtcagttttatacttgctgaggctagactgacaataaaaatgagctgggcagttaaattagcatttgttactatataggcctataaaggatcaggttgatgataatacctcttaaaa

SEQ ID NO: 359658 - DNA, 433 bp, Homo Sapiens
ttgctcccagaaaaggaagagggccagcaagtgaagtaggaccctatttttcacctttacccacaagaaaaccctattttatagcttcaaagcagaagataccaattcagcctcagaggtggatcgaggcccatggaagatgcgagtgtgttatagcagttatcaagcatgtggacttgtaacaaattcttaggtcaatatgtgaatgcttttagaagctaagctgtggctcaactcatccggacacacacctggattcagcaatgaggcctgaccttttttgctataaccgccccaccactcccctgcccttgccaacatcttcatgaatggaatccttaagggatatttatggacctctccttttctgtgttttccacccctacccccacccgccacccagtaataaactatttccttacccaaaaaaaaa

SEQ ID NO: 359659 - DNA, 696 bp, Homo Sapiens; identical to SEQ ID NO: 98696

SEQ ID NO: 359660 - DNA, 458 bp, Homo Sapiens
  misc_feature (427)..(427): n is a, c, g, or t
tggcaatagaatagctggatacactaatctctacaaggtgtcaggcaggagattcaccttccccagtcccaggggacagggagagaaatctgtaaagggacagatgcaccatctttatttcaaaagaaaaagctccctcagattgtgttactaggagtctcttttgtgacatttactgacctttctccccaatcttaccttcctattggctactttttaaataaaaataaacattttaggctaatatgacaaaaatgagataaaatcttaaaaacattgtactagtgtacagttactaaaatgtgcttactacaaaacagtaaaatatttcactctgtaaatcatcactaagtagttattctgtccctgttggattatggggcctcccaaaaatgttttaattgcttggaggggttgggtttggggngggcgggggaatcccttttcctttaaaaacc

SEQ ID NO: 359661 - DNA, 1468 bp, Homo Sapiens
  misc_feature (1300)..(1300): n is a, c, g, or t
  misc_feature (1309)..(1309): n is a, c, g, or t
  misc_feature (1315)..(1315): n is a, c, g, or t
  misc_feature (1317)..(1318): n is a, c, g, or t
  misc_feature (1325)..(1325): n is a, c, g, or t
  misc_feature (1391)..(1391): n is a, c, g, or t
  misc_feature (1426)..(1428): n is a, c, g, or t
  misc_feature (1430)..(1430): n is a, c, g, or t
ggaaaccttgtttcctagttcagttctgaagaaagcctcccaagaagtgttcctattttcaagtgatttattcaattctacagtttcccaggacagatggccatccggtcattctgttttcattttgaagagctcactaccgtacaattccagctgtgctgaaccttcaaacgcacttgttgcgatatcctctagaactacccagaatgatgtctataccctttgcaagcaggtgacaagccgaggcttactaactctgggacagggctgtacaaagtaaagcatgggttttctgtctggaagctgaagatgtcaagttgacactaagcagtgatgaactcctggtgaccttctggcccaaatgggcaaaggaaatccacgctgcagagagcgggcagcagccaaggccaggtgtggacttgtggtggcaagatgtgtcctgtttccagacagacatttctaacccagcactgccctagaaataatctacgcaatcgtgaccccacggtcacccaaccgtgcctgagcggatctgctagagcaccagccctggagctgcagggccccccagtgtggagtgcccccacctcccgaagtggactgcctaggcctaggcttaaacaacttcttgagtcaccttccccactggatgagtcaggcacggtgcaggcaagtggggacaaaaaggacaagcaaagacgtgaaacccagccctcaagaaactctggggacatctggcatctttggtcttctctggtccctgcaatcattcctcacttggccgaccataatgtcccacaactcatcagtgttccttggcgggtggtgctgagcactggtctcaccctagacatgtctggctgatggccagtcacatgttgcatctctttttagtttctaggtttctgaagagcctgcgcttgactgataccttctgtaccaccatgccagctcctctttgccttttatgtcactgcaaatatgaactgtagaggtcagtcctctaagcaggctgaatttccactccccacctggtagctgaggtgctgtcagcagaggctgggaaccacgcaaggaacctggattcgctcctgcgcctctagctgcctaccccgccccaatggtgctcctcctcctgaccagagagttggagaatttcagaaagggattcttgaaatgtgaatagaaggtcctgggcagaggccctcgtgacttctgtgtgaaactgaccagaattaacacagcagaaggtttgcaaactgagcttcagtgtggaatactgcccaggtttgcagatcanctctgggcngcacgngnngggtggnagagcattacaaagattcagaaaacgaaactgtcacagcaaccacagcccacaagagcaggccagntctgcacaccaaacctaagccttagccacagaaannncnatcgagccctaataaatattattttgttggttttggct

SEQ ID NO: 359662 - DNA, 1172 bp, Homo Sapiens
  misc_feature (50)..(50): n is a, c, g, or t
gggggcagctgctggagaggaaggtcctaagtacagacagggtacatctnctagaaccgccagcccccggcatggaggatgaggaagagctggagacccgagggaatcttcgtctgctttcagccttgggtctgttttgtgtgggctgggaagccccacagggtgttgagttgccttcagccaaggatctggtgtttgaggaggcctgcgggtactaccagcggcggagcctgcggggtgcccagctcactccagaagaactgagacacagcagcacattccgggcacctcaggctctggcctccatcctccagggccacctgcccccatctgcactgctgaccatgttgaggaccgagcttcgggattaccgaggcttagaacagctgaaggcccagctggtggctggggatgatgaggaggctggttggactgagctggcggacaggaagtggcacgcctgctgaggactgagttgataggagaccagctagcccagctcaacaccgttttccaagcccttcctacagcagcctggggtgccaccctcagggccctgcagctccagctagatgggaatggcaagctgaggtcccaagcaccccctgatgtgtggaagaaagtgttagggggaataaccgctggaaaggaaccccccaatggaatactgccccccctttgaactcccgtgccagtgcctgtgccagctggacccctccatggctgccaccctttgtgggaattggtacagcagcatggtgcgccccgctgggggggcaaggggccccggactgcccctgcattgccgacctcgggcatgctcagaggaggaggggaccccgccggaggccttcggagctacagctgcctcttggagcagggggcggctttaaagccgcccccccaagtcggcgggggagcttggcggccaaaaggaacaaaccggaatccgcgcccccgtgacgctgggcctgggcccctcaggctcccttccaattcccttggcccccaaagcggaaacccctcacaaccgtgttgccgggcgccaatttttgccctattcccccccctggccttgattactccgcacttaccctattctctctccccccgcggggttcaccccaaaattggccccccatctcgtaatttcccgccccccccactgagaa

SEQ ID NO: 359663 - DNA, 1614 bp, Homo Sapiens
  misc_feature (1225)..(1225): n is a, c, g, or t
ggaaggtcctaagtaagagtctgaatcctggacgaggggacacatgggacttccggaccctgctccgaggccttcctgggttgctgtcccccagggagccactggctgtacacacctggcctggcgtggcccacgttctactcatctggagcccaggcaagggcaaagtgatggtggctgccccacggcttggtctttcctacagcagcctggggtgccaccctcagggccctgcagctccagctagatgggaatggcaagctgaggtcccaagcaccccctgatgtgtggaacgaaagtgttagggggaataaccgctggaaaggaaccccccaatggaatactgcccccctttgaactcctgtgccagtgtctgtgccagctggagcctcgatggctgccaccctttgtggagctggcacagcagcagggcgggccgggctggggggcagggggcccaggactgcccctgtatcgccgagctctggcagtgctaggtgaggaggggaccaggcctgaggctctggagctagagctgctcttgagcagtgggcggcctaaagctgtgctccaagctgtcgggcagctggtgcaaaaggaacaatgggatcgggctctggatgctggcctggccctcggcccctccagtcccctgcttcgaagtgaaatcttcaaactgctgctggccgagtttgcccagcaccgccggcttgatgctcacctccccctcctttgccgcctgtgcccaccagaactggctccagctgagctcctgcttctactgaggacatacctcccagatgaggtggggcccccaaccccattccctgagcctggagcagaaccccctctcaatgtgggcttgctcaaagccctgcttggagcagacttggggctcaaggatggctgtcgggcccagttctaagcccatatgaggacatcctatgggaccccagcactccacccccgactccacctcgggacctatgactacccttcaggcatcagaacactcagggcctggaggcttgcttgggactggaggcttgcttggacagttcctctgtgtcactgacacaggaaatcatttctaggacacagtgatcagggaagggtgcctgggacttggagggtcccatgtatggacctgtgtatgcaatactgttctgtcatctggagctatttttaagatgtgtgtgttaaatatatacatagtttaatatcncccccactcgaaacgaacacctccgagaggccgggcctacccacgccatccctcaaggagacaagccctcccgcaaaccgcgtttacttgtcactctgggggctcctaacgcgcccaaggtcaggggactcaccgatatcccccgtcacgttaagaaccactctggcctcgagaaacaaaacatacggcggaccctcgtccactgtgggaatgacctactataaggagagagcaatattttttgaagctgacacgacctatgaaatgatgccacggatataaccccgtgcaaaatagggacgaacatgcgaaccacaccacacagcagccaactcagagtccatgtagatcacgtaacgaaattagcacgcgggcttgcaaataattaa

SEQ ID NO: 359664 - DNA, 476 bp, Homo Sapiens
  misc_feature (431)..(431): n is a, c, g, or t
  misc_feature (443)..(443): n is a, c, g, or t
acgagggtgaatattattcaattgaaaccaaagaaatctcatgtagtttacatctcaagactcaattctctaaactaaatatcttgaatttaaaatttacttcacaaatgaaaggggcttagcttttccagcacagtgtttggcaaagtcaggcttttcatggagttctggttgaggagtccaaatttggctctgtggctgactgcagaatgacttgtcatcccaggtccttaaacatgccattttgcctctaggtcattgattttccaatcataaaataaggagactaacatttccttgtgtgtgtgtgagatcgtagcacctgtaatgacgtctatgccttccataaccgacacaccatccaccccaaacattaggaaaatgcatggcggtagggaaaaaaatagtggaggcttacatccaactaaacntggaggtgggantctggaaaggttatttttatttcagctttcggg

SEQ ID NO: 359665 - DNA, 583 bp, Homo Sapiens
ctattttcctcaagtagctcataatactgccaaatctcaaaagttaagctgaatttcacaccagatcctacccctttccctgagccacgtgtttcacacaagtgtagaaaatgccagggatccaccacaagatggagatggtcagcacaaaccgattctgttcctctttaaagtgtatattagcccacttagcaatctctatattctttccaagtaaccaagctgttgactttccttaactacttgcagtagcctgtccccaacttttccatccagtgcttaacctaaaaaactccttaactctgccttgacctgaggaagaccatgctaactggtgttattttgtatgtaccctgtgcttaattctataacagtaaaccccatacgcaggtgggagggaggaacaccggtgcctcggtcactctgggggcagtttagatgctgtgaaattaaacctgttctaagtgtacttgtttgaattaattgtattgtaatattatttgttgaatgtagtaattaggtatttatgaatatattgctgtaatttctgacaacatccaaaaaataaaatcttcctaaatta

SEQ ID NO: 359666 - DNA, 500 bp, Homo Sapiens
  misc_feature (21)..(21): n is a, c, g, or t
  misc_feature (27)..(27): n is a, c, g, or t
accgcccaacaaacgccaaanccccgngttaaaaacccctcaacggccggaaggtgtgggcccccctttgaagcctcccccgaaaaacccttaagggtggcaaccctatcagaaggttagtccccaaatcaagtgcctttaatccctttaaagattagaatgtaagactaaaatgtggaaagtccccgtccttggtcacttatctgagacaacagattaggaacatgatattttatcatgtcagtctgactctgactatatgaagcaaaaataacttgtttcagtgaggaaccagataatttactattggaaggtatccctctgcagagggacagatggcagctcccttccaggtaatgtaggaagatgctaacgaccgaaccgagggctttcaggtgcatcctgacacacaggtggcataatcgactccagagcagatttgaggtactcagtgtgaagtagctgaacaaaaaacttaagagattgcatgtcaattttta

SEQ ID NO: 359667 - DNA, 466 bp, Homo Sapiens
  misc_feature (33)..(33): n is a, c, g, or t
  misc_feature (40)..(40): n is a, c, g, or t
  misc_feature (54)..(54): n is a, c, g, or t
aacaaaccggaatccggttccctcctttaaaangggtaanaattaggcccactnagccaaacctcctaataattcctttccaagtaaacccaagctgttgaactttccttaactaccttgcagtagccctgtccccccaacttttcccatcccagtgccttaaccctaaaaaactcccttaactcctgcccttgaccctgaggaagacccatgcctaactggtgttattttgtatgtaccctgtgccttaattcctataacagtaaaccccatacgcaggtgggagggaggaacaccggtgcctcggtcactctgggggcagtttagatgctgtgaaattaaacctgttcctaagtgtacttgtttgaattaattgtattgtaatattatttgttgaatgtagtaattaggtatttatgaatatattgctgtaatttctgacaacatccaaaaaataaaatcttcc

SEQ ID NO: 359668 - DNA, 415 bp, Homo Sapiens
  misc_feature (391)..(391): n is a, c, g, or t
tcatatagtcagagtcagactgacatgataaaatatcatgttcctaatctgttgtctcagataagtgaccaagacgggactttccacattttagtctacattctaatcttaaaggaataaagcactgaattgggactaacattctgataggttgcacccttaagagtattcagagagcatcaaaaggagcccacaccttcagcagtgaaggattctaacacagggaatctgcagtttgtagcagaatgggtattttcctcaagtagctcataatacttgccaaatcttcaaaagttaagctggaatttcacaccagatccctacccctttccctgaggccacatgttttcacacaagtgtaggaaaatgccagggggtcccaccacaggtngggggttgggtcaggcacaaaccg

SEQ ID NO: 359669 - DNA, 410 bp, Homo Sapiens
  misc_feature (125)..(125): n is a, c, g, or t
  misc_feature (149)..(250): n is a, c, g, or t
  misc_feature (315)..(315): n is a, c, g, or t
  misc_feature (335)..(344): n is a, c, g, or t
  misc_feature (366)..(366): n is a, c, g, or t
  misc_feature (373)..(373): n is a, c, g, or t
acatattcactaactgcttcccggggcaggggtaggttctcttgtatccatgttgctcccaggtaagctgttgccctgccctgccctgtcctgctcttctccattctctgtgggttgagttgttnccctgatcagtcccaatgcaagtnnnnnnnnnnnnnnnnnnnnnnnnnnnnnnnnnnnnnnnnnnnnnnnnnnnnnnnnnnnnnnnnnnnnnnnnnnnnnnnnnnnnnnnnnnnnnnnnnnnnnnccactggaagtactttttgaagtgcttaaataaaagaactgtgaacccacatcctatatccagtnaaaatactcttcagacatgnnnnnnnnnnttacgacattctttgatgaagnaaaactnagaaaactttttaccagcataccaaccctaatataat

SEQ ID NO: 359670 - DNA, 692 bp, Homo Sapiens
  misc_feature (49)..(49): n is a, c, g, or t
  misc_feature (550)..(550): n is a, c, g, or t
agggaaaactgatgatgctgactgttgccccagctgtgttggcaaatcnaagatgaccttgttactaactgaaagttgctgtcaaccttagcaaacaaaccagctaacaccattacagcactggttaaagtagatttttactggcactggctggcgttcagctgaggaaggctaggatacagactttaatgaccaagagccagactagctcgagctagaaatcagcaacaaatacctccttgtgctatttgaatgctaaggtattagttgcaataggcttacgccttcgctcctctagtgaggggaatgagcctgatgacactattactgtttacctgtcaaaccagggtggaaatttagagggatgcaagtacagtatgtctcattaagcagtctctgttgctgattatatgaagataaaattgttgtatatgctgatctgtatgttatgtacattttcacagtgattgaatcattgtaaaaaggagaaaagacaaaaaagaatcaccactgtctattttatgaagatgataaagcagctttattaaantattacagttatgtttcaaatggtgttatctgccacattgtttccttttatctggtggttctctgtttccccctttaaatgtgttttctctgcttcaaaaatttaatgcattttagtattaaaggctattatggaaaaagac

SEQ ID NO: 359671 - DNA, 673 bp, Homo Sapiens
  misc_feature (105)..(105): n is a, c, g, or t
  misc_feature (248)..(248): n is a, c, g, or t
  misc_feature (250)..(250): n is a, c, g, or t
  misc_feature (462)..(483): n is a, c, g, or t
cctggtaacctaaacgaaaagttgcctgtccaaaccccttagccaaaacaaacccagcctaacacccattaccagccactggttaaagtaagatttttacctggncactggctggccgttccagctgaggaaggcctaggataccagactttaatgacccaagagcccagacctagccccgagcctagaaatcagccaacaaataccctccttgtgcctatttgaatgcctaaggtattagttgccanantacgttacgccttcgctccccctagtgaggggaatgagcccgatgacactattactgtttaccctgtcaaaccccgggtggaaatttagagggatgccaagtacagtatgtcctcattaagcagtctctgttgcctgattatatgaagataaaattgttgtatatgctgatctgtatgttatgtacattttcacagtgattgaatcattgtnnnnnnnnnnnnnnnnnnnnnnaatcaccactgtctattttatgaagatgataaagcagctttattaaattattacagttatgtttcaaatggtgttatctgccacattgtttccttttatctggtggttctctgtttccccctttaaatgtgttttctctgcttcaaaaatttaatgcattttagtattaaaggctattatggaaaaagac

SEQ ID NO: 359672 - DNA, 1041 bp, Homo Sapiens
ttggggtcggcttaccctgtagcacagacagggactcctgctgccctgggagctgtctcaagcaaaatctcttgtcccagaggtgcccatgtgggtccgctgtgtcccctgtcatcatccttgttttttctcattttggccaagggcaggctccctgggacaggcagggaacaactgcggagatattagtgattcataggtttgtacagtgttttatactttgcaaagcactttattagctcacacctgtccactcacatgaaactcgtgttaggccctgggaggccgacggtaactctcaccgtgccctcagatgaagcacagagaggttgttacttgcccgggccatccagtgggctggctgggtcttgtgtccccatctgtggacccctctagggtctgagatgagatgagaagtgtctcctgtatccacctcttcctggcctcccttcccccacttcctggtccctgtccactcctcaggttggtgctctcacttcttgaaagctctaggcacccccgcctcccgccaggctccccattggctcctggcaggccagctgagaatgaacaggagatggaggcaggcagcccaggctgcagaggtgagggatgtggggccaggcccagagggctcagcctagaggcttccaatctcagattctcctgcctgtggtcatctgtttgtccatcaccccaggacagggcagacagaggggcaaagcactgggggccccagagcctagcttcccctcagcctgggggacatcacagcatttcagtgtcagtcacattttaaactgatcagcctttgtataatgttttttaaatcatttctaaataaaacagaaatacagagtgtgtcatttccctgggatgagggaacaaagatcaggttccaagagtaaccttaggacgctctgggaagagaaccgggtcctttggggtgtctgggagctgcccacccatctcctctgccagaccggcggtcagatagcctccctctacaacaggctggccctgggggggctcaccaatata

SEQ ID NO: 359673 - DNA, 505 bp, Homo Sapiens
tgctgtgtttttcttgagtccttgcactcacttcccctgccccagtcacgatgacccctaaagcttcctttgcccttgctttctagggcatccctagtgaaggggcaaacctgagatttctccgtggacctgacagccaaggcagggcactgtctcctgaggccagtgccagcacgtgcatggttcacagaaaaggatcctgggctcagaatctcgagaaccgcctgctcctaacaattcagcaagtcaggggcttcctctctgttagtccccaaatccttacttattttaaaaagactagaccctctctaaagactgttccattttaacatgtcctgattctgcatccgtgggttttgtgaaagagagctagctggcggttagagcctggaagaaggagggaagtggcacctcactagcatttatcacttttttccttctctttttaaaaataaaaccagactctgttctgaaaataaaaaacttgagactccacgggggatct

SEQ ID NO: 359674 - DNA, 478 bp, Homo Sapiens
  misc_feature (11)..(11): n is a, c, g, or t
aagtcaacganggaaccccctaaaaacttccctttgccccttgcctttcctaagggccaaccccctagtgaaaggggcaaaacctgaagaatttcctccgtggaccctgaacagccaaggcagggcactgtctccctgaaggcccagtgcccagcacgtgcatggttcacagaaaaggatccctgggctcagaatctcgagaaccgcctgctcctaacaattcagcaagtcaggggcttcctctctgttagtccccaaatccttacttattttaaaaagactagaccctctctaaagactgttccattttaacatgtcctgattctgcatccgtgggttttgtgaaagagagctagctggcggttagagcctggaagaaggagggaagtggcacctcactagcatttatcacttttttccttctctttttaaaaataaaaccagactctgttctgaaaataaaaaacttgagacttgt

SEQ ID NO: 359675 - DNA, 511 bp, Homo Sapiens
agtttctttacattgccgtggcatcttaaaagctatcttcatgtaaattgactgtactagggcctactgggggatcagagttcccaagaaaggaaaccttttcttgtatctggattcaaatttatttccaatgtttcaagcgggaaacatgactctttattgtctgtaaatcctaacattattacttttcccccttagaagaatattgtattgttagatgtttgttgagctggtaacatcgttgcaaccactgcaatatcttcgttagtaatctgtataatactttgtatacaagtactggtaagattgttattaaatgtagcttcagtcattaaattactatagcaaagtagtacttcttctgtaatatttacaatgtattaagcccacagtatattttatttcaatgtaattaaactgttaacttattcaaagagaaaacatctcatcatgtctattgtccaaagttacctggaatcaaataaaaattctagattaccatgaagaacat

SEQ ID NO: 359676 - DNA, 533 bp, Homo Sapiens
gccacacctcccctgccccccgtcgcacctgaggtgctgagagtggccgagcacaggcacaagaaggggctgatgtacccctacatcttccatgtcctgacgaagggtgaaatcaaaattgctgtttctattgaagatgaagccaacaaggacctgcctccggccgctctgctctataggccagttcgtcagtatgtttacggagtcctgtttagtttggcagaaagcagaaagaaaactgagagacttgcttttagaaagaacagacttccaccagaatgtatgtactgtaacaatccattgtttgttttcctcggtacctcgtaatctcttgtgcattttctaaagccttagaagaatcatgactgagttgaccccgagtgcctctgtgtaaaggaggtgggcccatcatcggggcagtaggccagggtaaaggctcttagaaaaggaggagaagccacagactttcttcctcagtaacattccaataatgatgtttattcagtaaaataataaaacaggtttacacttta

SEQ ID NO: 359677 - DNA, 884 bp, Homo Sapiens
gagcgaggcctgggtggcgaattcggcacgaggctgaggtgctgagagtggccgagcacaggcacaagaaggggctgatgtacccctacatcttccatgtcctgacgaagggtgaaatcaaaattgctgtttctattgaagatgaagccaacaaggacctgcctccggccgctctgctctataggccagttcgtcagtatgtttacggagtcctgtttagtttggcagaaagcagaaagaaaactgagagacttgcttttagaaagaacagacttccaccagaattttcaccagtgatcattaaagaatgggcagcttacaaaggaaagtctcctcaaaccccggaactggttgaagctcttgccttcagggagtggacctgccccaacctgaagaggctgtggttgggtaaggcggtagaggacaagaaccgcaggatgagggccttcctggcctgcatgaggtcggacaccccagccatgctcaaccctgccaacgtgcccactcacctcatggtgctctgctgcgtcttacggtacatggtgcagtggccgggagcacgcatccttcggcgtcaggagctagatgccttcctggctcaggcgctgtcccccaaactctacgagcctgatcagctccaggagctcaagattgagaacctagatccccgaggaattcagctatcagctctcttcatgagtggagtagacatggccttgtttgcaaatgatgcatgcggacagccaatcccctgggaacactgttgtccttggatgtattttgatgggaagctcttccaatccaaactcctcaaagccagccgggaaaagaccccactcattgacctctgtgatggtcaggctgatcaggctgccaaggtagag

SEQ ID NO: 359678 - DNA, 502 bp, Homo Sapiens
  misc_feature (429)..(429): n is a, c, g, or t
  misc_feature (454)..(454): n is a, c, g, or t
  misc_feature (488)..(488): n is a, c, g, or t
accatctcgtgggccacatgaaaattcacacaggcataaagccgtatgagtgtaatatctgtgcaaagaggtttatgtggagggacagtttccaccggcatgtgacttcttgtactaagtcctacgaagctgcaaaggctgagcagaatacaactgaggctaactaaaaataggatctggcccttgagtggcatgcacaaaaataaactatggtaattaatgcaaatctgggcacagatgatgcgtgctacttgctattatgagagaagcttaaaaaaaaaaaggaagatatttctgaaagaccagctctaagtaggccaattaaaaaaatctaattcctcaaatttgtgtgttccagtcctgggcctgggaatgggtaatggggtgagtttaacccaccgcccagctgggcaaggggaaaccttctgnactgggttgtggttcgaaacaggtnggacaggagacacctgcatttggaactgggattncacccaccatttcc

SEQ ID NO: 359679 - DNA, 585 bp, Homo Sapiens
  misc_feature (133)..(143): n is a, c, g, or t
  misc_feature (454)..(454): n is a, c, g, or t
tacagcatctccccagatccaatcccttccacatatatttccatacaaaataaatccagaggttccccctggaggcagcccctacttgtgccaaatgaaacattcctaggactgattcatcatgactctgatnnnnnnnnnnntgagccaggttgggaatttggccctttctgaacatgtgtgatggtaaaatgcatggtcagggcaagtacatcatcctcagaggaaagtaagatacctctgatgtcagaccttataaaacttacttaaatttaaatcatttaaattaatggatctaattatggggttaattaatgagtgatattaacaaatggtaattctaatgagtatattcattggggacaatgttttcgtcacttgggttaagaaatgatatgaaaagtgtcaaagtgaatctaactagttttaaacctttttaaatgaaggttgtatnacatacgtgatgatatttcacagatatttcttagaatatcaataagcaccaagtttagtgctgtcagccccattgtcccttaatttattatatatgatttagatcttgaaagcacaacacactataaaatc

SEQ ID NO: 359680 - DNA, 659 bp, Homo Sapiens
  misc_feature (466)..(510): n is a, c, g, or t
gaaaagcccagaccttgtgcccttgttttgaacaccgactgggaagatggggcttaggtaacagccaaacctggctgtcagctgtgtgggagccaccaccctctctgggaagagttcctgcttctgtatggcaagcataaatcaagctcagtctgggttatggagaagttgaaaattgttttgttcctcattagtttataattgtatgaaatacgattttaatgaaaacttttcagaattcacgtttgtgtagatatttcagagaaccatttttactttacatcctaaaactgccttttcctatggttttgtcaataaaacactatgatgttggtctgttaaacaacaatagactaaccacaccactctacataattaaatctcacctacttgtttatactcatattgattagctcccgattcacatgcaacccagaaagagtcgactcctgcctaattcgattgnnnnnnnnnnnnnnnnnnnnnnnnnnnnnnnnnnnnnnnnnnnnnacatgattttcgcgtttaccctcatctatcttttttgttaaaaagaggcggctcccccttagcgagggagatcgttttttatatcaaaaacgcgcgggtcgtgggtgggtagcttttctttttacaacctctctgctcgggaggggggg

SEQ ID NO: 359681 - DNA, 986 bp, Homo Sapiens
  misc_feature (823)..(824): n is a, c, g, or t
  misc_feature (826)..(827): n is a, c, g, or t
atcaggccaaatcggccgagctcgaattcgtcgagagcggaagagaagaaaacacaaagggccggaaggaagccggggagacaggtggggtactcgggaagctggagcgggccggcggtgcagtcacgggggagcgaggcctgctgggcttggcaacgagggactcggcctcggaggcgacccagaccacacagacactgggtcaaggagtaagcagaggataaacaactggaaggagagcaagcacaaagtcatcatggcttcagcgtctgctcgtggaaaccaagataaagatgcccattttccaccaccaagcaagcagagcctgttgttttgtccaaaatcaaaactgcacatccacagagcagagatctcaaagattatgcgagaatgtcaggaagaaagtttctggaagagagctctgcctttttctcttgtaagcatgcttgtcacccagggactagtctaccaaggttatttggcagctaattctagatttggatcattgcccaaagttgcacttgctggtctcttgggatttggccttggaaaggtatcatacataggagtatgccagagtaaattccatttttttgaagatcagctccgtggggctggttttggtccacagcataacaggcactgcctccttacctgtgaggaatgcaaaataaagcatggattaagtgagaagggagactctcagccttcagcttcctaaattctgtgtctgtgactttcgaagttttttaaacctctgaatttgtacacatttaaaatttcaagtgtactttaaaataaaatacttcctaatgggggcctnncnnccacggagcgggcacccgagaagaagaaaattgggggggccgccttcgggcccttcaaaaaaacttttcctaaaaccatttctttttgtggggccgcgggggcccccggtaagggagaaaggggaaaccagggggtcaaaaacccgggtttttcctaaa

SEQ ID NO: 359682 - DNA, 840 bp, Homo Sapiens
ggactttgtcctggccttcccttcatggcgtctatgacacttttgtggtgatggaaagcatgggacctgtcgtctcagcctgttggtttctcctcattgcctcaaaccctggggtaggtgggacggggggtctcgtgcccagatgaaaccatttggaaactcggcagcagagtttgtccaaatgacccttttcaggatgtctcaaagcttgtgccaaaggtcacttttctttcctgccttctgctgtgagccctgagatcctcctcccagctcaagggacaggtcctgggtgagggtgggagatttagacacctgaaactgggcgtggagagaagagccgttgctgtttgttttttgggaagagcttttaaagaatgcatgtttttttcctggttggaattgagtaggaactgaggctgtgcttcaggtatggtacaatcaagtgggggattttcatgctgaaccattcaagccctccccgcccgttgcacccactttggctggcgtctgctggagaggatgtctctgtccgcattcccgtgcagctccaggctcgcgcagttttctctctccccctggatgttgagtctcatcagaatatgtgggtagggggtggacgtgcacgggtgcatgattgtgcttaacttggttgtatttttcgatttgacatggaaggcctgttgctttgctcttgagaatagtttctcgtgtccccctcgcaggcctcattctttgaacatcgactctgaagtttgatacagataggggcttgataactgtggtccccctcttccccctctgactacctaaaaatccaatacccaaaatacagaagccttg

SEQ ID NO: 359683 - DNA, 655 bp, Homo Sapiens
  misc_feature (106)..(136): n is a, c, g, or t
ccgagattaatgtcataggtacgatgccgggtgttagaatcaggcacgagggttggcagaagaagcagaggcactctgcttgctttcctagccagatcctcccctnnnnnnnnnnnnnnnnnnnnnnnnnnnnnnnatctcagctgcgccattcgtgtgcaatcccagtgaccaaatcccttccttgcccacctctatgtcagcaggactgaccactatcactcccccgagttcccaccaccagcatttcctccaacctttttccatcacaaacagtgtagaacccatacaggcaacaaggccttctagaaatccgcttaacccttggcgtgataacaggcaaatctcagtctgctacactgttgttaggtccagaaggagctgcccatactactttcttatgagcatgctcagtatggcatatggacatgtaatgtcacatctttgtggagtgtgattttcttttttcacatatttgtatgcagtagagagcctgttgtagaaaacgctccctgtatcttgctgtactgttaaagaaagctgaattccacattgccaacaaaagcgtgaaaatgttcatgaaccttcctccaggaaaagccattcaagcctgattatttttctaagtaacttcaattaaattgaagcaagaagg

SEQ ID NO: 359684 - DNA, 426 bp, Homo Sapiens
  misc_feature (359)..(359): n is a, c, g, or t
  misc_feature (386)..(386): n is a, c, g, or t
  misc_feature (393)..(393): n is a, c, g, or t
cttggggcctgtgggaggaaacttccttccatcttctctgcataaaaacttgtggcacacaatgcttattcactagtgtgtcccacccgccagccccacagatgactggaggaaggaggggaaatgtgtagaaagaggcttcgccaccacttgttcccacgagaatatatcacttgcccagataaaactgggcggcagcaggagttccctgaagtgggaagtcagagctacatgcacacagtgtcttcagaaggtgaaaataaatatttccctgtgctccttttactcaaccccgggggtattctaatctttgccaggtcttgggccagttgagattctgttccacctgcctgcctggnccttttctccattaccatccagactgntcggctnctgggggttttcaggggttccattatgggttga

SEQ ID NO: 359685 - DNA, 486 bp, Homo Sapiens
tacagaacatcacctggaattgccactcacactgggttggagtcattgggcagctgtgcctgtgcgagaggtgctgtggtctgggcagcccctggaaaagcacctttgctgcctgtcattgttgcctgaagaaggctggagttgctctgagagcagtttgggtttggagtattatatttggcttctatttttattattttggatcaccattctccctatcccttcttgcctccctcccttctaaacatgtgtaataactatacagagactgctacaaaattgtatatagtttttggatcaaatagcatgaggggagaggaaaccattaaaaattggggctcctactctcctttgctttgtaaattcaaaagttgggggtgggtaagagggatagttaaaatgtttacaaaactttaggctccctcggaacttttgccagtgtggaggaaaataaaaaagaacttaaataaaatctgattgtattct

SEQ ID NO: 359686 - DNA, 670 bp, Homo Sapiens
ggtagcctaggagggcgactggcggcagcagaaccgaggaaggcaaggttgtttcccccacgctgtgtcctgtgttcaggtgcgacacacaatcctcatgggaacaggatcacccatgcgctgcccttgatggatcaaggttggggcttaagtggataagggaggcaagttctgggttccttgccttttcagagcatgaggtcaggctctgtatccctccttttcctagctgatattctaactagaagcatttgtcaattcctttgcctcccaactgacaacacacgttcattttccaaccttcctaacatcttaaacctttcttctgggagaactagaagacagaatttgctttgattctctcaggcgctgtgcacaagccaggtcttctgttttctctttcttactctacccacattcttgccttctctatccaactgtgaaagtgaggggaggctcctgtccccctctcttaaggtccccaaacctgggagtgcataggtactaaatcaagcagtgcaacttgtaattaagcagctgcagtgtttacatgtttcttaatgtgtcatcttttcaatggctgtattaaaagaagaacgtttgttttaatggtctttctgattaaagaaagcccctgtggctttggaggcattgtgcccacggtccacca

SEQ ID NO: 359687 - DNA, 602 bp, Homo Sapiens
  misc_feature (207)..(207): n is a, c, g, or t
acacccaggggtggtgggccctaactggctggcaactcccagcgctgccctctgccgtccagatgctgcagtgtggccagatttaccttccagtaacatacttctagtcacccctcctcctgcgaaagtgatctgcagtggctgtttgaccagaccacaaagttcaaatctcctgagcttaatgtccgtggctgtccacctcccagnccatacttgactgtcccccaaactctccctgcagcccacatgtttcccatgacctgtgggctctgcagatggacctctctccgctagagatgcccttctcccaaatggcttccctcctggaaggcccagcctgagtcctcgtctcctttccagtgcttctgccagaagcatccccatgatgttgtgaccgcacagcactttgtgtcttgctttgagcacttgccactctggctggtgctgctgccactgattgtgtactgtcttgctgccctttctagactgtgagctcctcgtgggcagggaccgcctgtgttctctgtatttcccacggcgcctagcaacagtgccttgcacttgataggtgcttaataaatgtctgctcaactgaaaaaaaa

SEQ ID NO: 359688 - DNA, 341 bp, Homo Sapiens
agattgcgccagcattacagtaactaactctttctaaccaacctgatgccacgtaacttaccctatggacaaaagcaggaatgactaacacatcctaggagggaaagtccagtgtacctgtcatcacggacgcactgtggtcacagactggaatacgaaatactacagccctgctcccaggtgtgcatcttactggatgaggttgctgtgattgagatagttaaatacatgctaatttaaaaatgcagatgttttacatttgatttctaccaagagttgaaatgttgagagatgattaaaaataataataataaagtgtcttccattgttaaacggcacga

SEQ ID NO: 359689 - DNA, 595 bp, Homo Sapiens
gggggatgtcctaaaatgaaagctgctcaaagtcacagaacaaccgagggacaaaggagattggatgactgggaagcgctggcccggaacagcccctgcaactgtggggcctgcacacagcccttccacagttggcactgcaggtgcaggccaaccctttaaagaataaacaaggaagtcagctctttcactttttacaagttggcaaaaacagacttccggggaatttcgatgttttcccgtgttgtagagcttccagggtttaataaaactggttaaaaattgagtctttccctgaagtaagtgctctttccagatgaaaactactcttttggttttgtttgaaagtaagaaagggaggggaaactttgctcttttaataattatgttcagcctatgatgaagtatttgattattagacagcaatgtcactaataagttttaagttgtccaaagttaattgtaaacatcatcagtacagtactcttagttacagtaaagcaattgttgcaagatgaatggctaatattttggtgcagtgtttgatgttcaaaacaaaatgttacaacaataaacgaacataacataaaaaaaa

SEQ ID NO: 359690 - DNA, 1357 bp, Homo Sapiens
  misc_feature (796)..(796): n is a, c, g, or t
ggcgagtggcttatagcctccattcatggtgcactttatttatggtactaagataaagactgtcaatccattgatttatctcctcctgtcccccatctaaaatacccatgctgcttttctgagtgttgatgggggttaccagcttgatccactgttgctcttagaaggcccagaaagtctttgggcattgccaagaaatcccggattatgtggaaaaccctcactttctcttcacggctgtaccagaaaatccctaagacagatcttgccgtggactagcaatacctgcaagtgctgccaatgggaactcaatttattcctgggaacctaacgaggagagcccaggcctaggcaggaggcctggaaccctcttggctaaggtgctgttcctgttcctgcaaggtctccagaacccctttggaaatggtgaaggaaccagcccaatagaagtacagagccagctgacaagtccttgtaaagctcactcctcagtccttggcacagccatgttttgtcttctctcttggtatttcttctctcccaactttagccattttgccttggaatcatgattacaattttttcctttgcagatgccttcctgggggatactcctccccaccctaaagggtcgcctgcaacttaggcggattgggtctctctgctgtggcgttctctcttgagagaccctctgaattttagcacaaagtgccttctgtttcacagctgccaccaccttttagaggaatttcgtcagaaaaatgtggaggctccatattaatgcattattttttanaaagttttgataactcttaaagcatcatttgcacctatgtgggaactttgcctgttgcaaagtattgtggccgagctgcagctgggagcctgctttctgccagtcttgaggttctgaagatcagctttgaaaggaaagtatgtcctagcttagccattcagaagagaaaaatggaatatcagagttacagttgtcagtgaaactatttttggattttaacctcttagaggaagaaaaaaggttagggaagtgtcaactctggatgaaggtgatgtgtttgcctctcagtctttcattcatagcctgctagtgaaaaggaagtaaatgagattcttttgtgtgactttgtagtctctttgtattaccaaatagttggggtgttgactcctgtgtgttttgcaagaatgtgtggtaagcctgggtaaagagaaggaactgcggtgttgggagagtctttgtgttggggagtggcaggggatgatttgtttcaggggaaaatgcccacattttaacttttaaacttctgaataaactgtgtaaaacggcccaaaaaaaagcccc

SEQ ID NO: 359691 - DNA, 485 bp, Homo Sapiens
  misc_feature (16)..(16): n is a, c, g, or t
  misc_feature (50)..(50): n is a, c, g, or t
atgaacctttaacaangacttgttcaagctggcctcctgtaacttcctantgggcctggttcccttcacccatttccaaaaggggttcctggaaaaccttgccaggaaacaggaaacagcaaccttaagcccaaagaagggttccccagccctccctgccctaaggccctgggctctccctcgtttaggttccccaggaataaattgagttccccattggcagcacttgcaggtattgctagtccacggcaagatctgtcttagggattttctggtacagccgtgaagagaaagtgagggttttccacataatccgggatttcttgcaatgcccaaagactttctgggccttctaagagcaacagtggatcaagctggtaacccccatcaacactcagaaaagcagcatgggtattttagatgggggacaggaggagataaatcaatggattgacagtctttatcttagtaccataaataaagtg

SEQ ID NO: 359692 - DNA, 431 bp, Homo Sapiens
  misc_feature (35)..(35): n is a, c, g, or t
cctagccccatccagaagagaaaaaagggaaatanccagagttaacagttggccagtgaaaacctaccttggattttaaaccccccctagaggaaagaaaaaaaggttaagggaaagtgtccaacccctggaatgaaaggtgaatgtgtttgccctcctcagtcctttccattccatagccctgcctagtgaaaaaggaagtaaatgagattccttttgtgtgacctttgtagtcccctttgtattacccaaatagttggggtgttgactcctgtgtgttttgccaagaatgtgtggtaaccctgggtaaagagaaggaactgcggtgttgggagagtctttgtgttggggagtggcaggggatgatttgtttcaggggaaaatgcccacattttaacttttaaacttctgaataaactgtgtaaaaacaa

SEQ ID NO: 359693 - DNA, 901 bp, Homo Sapiens
  misc_feature (307)..(307): n is a, c, g, or t
  misc_feature (862)..(862): n is a, c, g, or t
gtatttttctgcagcccagttctgtgggtgcagctcttccagaaagtattaggagcctcacacctactctgccaagcgccccagcaggcactgtgctgggcttaggggctaccactggatgatggcattgcgtgactcacacacctctacttctgttcttccctcactccatccccgctaccgtcctggccagctaccgtcagagagaaccagagctccaagtctttaatttgccaagatgaagaaaatgagttctcaaggagggaatgctttgcttgaggccacacagcaggttggtagcaaagantcttgtcctagccagggcagcccttatcagcttgttgacaaccttccccaggacagaagtcatacaaggcctctggggttaatacaaataggttgtgccctgctttaaggaacctgctatcaggaaatctacatgtgtgcacagagagagaaaagtagaacagttctttgcatttggctctacttactaacaacccctctagaatacattggtgatttcatttaaagagattgtatgcatttgtggctttcctgatttctgagtctgtgtttggaggtgttactgagatgtgccagtgtgcagaatccttgctggggtttctacagtccccaacgtgaacagtattaagcaagaggtggactcgagcaatccaggagcccagactgagcaaataagtactttccagcctgtgtttcaggagaggactgtgctggatcatgcttgccctccacagggaattacagcatcctttacagcttgcatgcaattcaacctcttttgtaaatggaaaataaagtctgttacccaaaggccatgctgatcccctgctccctnctttcatttatgtttgctgacctgtggagaccagtcttt

SEQ ID NO: 359694 - DNA, 513 bp, Homo Sapiens
ggggtgggtgagtgccctggtcttgttcataggggagcctttccctagcagtggaacgctgtggtcattttctctagcatattcccttgggaagtctagatttgctattaatctggctgagaatctaagttctgtgccttagagacagtttgcactttcccatattgtgcctgggacagccatatgattttttttccccaccaaacaagtatgcaaacagaaaccagttcaaagggggatggagtaaaagatgaggcagtagaaatgcctttgaatggttttctgtagctaattctctttaaattttgtcctgctttttttctttatgcagtgctaggtgttttaagttttctagtagtattgcttttgagttacagtataacctgagttactcctctgctctaacattgttgcagaagaactagtttattgttagccaggttgcttgaaaggttgagagtggagtggtttggcatttctgttttaaataaacatttaaagctccttaaaaaa

SEQ ID NO: 359695 - DNA, 817 bp, Homo Sapiens
  misc_feature (229)..(255): n is a, c, g, or t
gacctttaagtttttcttccttttgctttaatatactgaacacttggaagtcacctttacttgcctttgcagaaaacagaacttagccaaacctaagtaagagtcatgcctggatattgggataagccagtgtctagaggcctgaaggaaccgctgaagaaccagaggagatctcctcttccaagacacgtttccttccttcccttctttcctctttcctttccagttnnnnnnnnnnnnnnnnnnnnnnnnnnncctttgctgtatcactgtgtggaaaatacctccaaagctgaaagagccaggtatttacctgatgagcagaggggaccactgattggcagaaaacttccctacgttcagttgttagatatgcaaattgataaggatctaacactaggaaaataaaggcgagttttggtttggttggtttcagacatttgattggggagatataaaaggctcaggagagcaggcttttgctttgccttttgtttgtttcttcccccacccagtgcagaaatcaggatcagggaaagattttattaaatgccaatagatacagtatttaagcatttataaactgaaaccttctcatgtgaagataatgcatattttaccgtttatccagctgttaacattttgtaatcagtcaattcaatagaattattctggataattctatatctagaatataaaatctggccttatagctagacatgatgatggtccccaaaccattgatgttatgttatgtactgtaatgggaagcgattctgattttgttttatatgggttctctggttctcaaaaaaaa

SEQ ID NO: 359696 - DNA, 677 bp, Homo Sapiens
  misc_feature (21)..(21): n is a, c, g, or t
  misc_feature (48)..(92): n is a, c, g, or t
ggcaagtctgtttctgaaagnaattaaggtactccaatgtcagatatnnnnnnnnnnnnnnnnnnnnnnnnnnnnnnnnnnnnnnnnnnnnntaatctcagggacttatcttaagagaagaaacccccgtgtagcatccctctttctggtgttatccggtccctgctcagggcacaaagacctcctcggtccacgctctggagcagggcgggggacgggtggtgtcctaaaagactttctttaggaaaagcaaaacttactttagtggtttcccagggaaaagttgtattccttggcatggggcccatccaccttggcctggaagacctcacaactttttggcactgtcgtggcaggccgttgctctgatggtggtcccagccaagccccggttgctgactctgcggaccagcactttggaaaccgggatttttgttctgggcatctcactcctggagggttgctggtgcaccacgggatggctagatggaaggttggtcaggtgcttgatgctaatagggatcttagagtccttcagcaagctgcctggtgttcgcagtggacaggtgatggtgcctggagatacgggctttaaccgggacagggaggacgtctcctcgttgtccttccctcccaggaagggttgctggacttccgtccgggtcagcatagagatc

SEQ ID NO: 359697 - DNA, 454 bp, Homo Sapiens
  misc_feature (14)..(14): n is a, c, g, or t
  misc_feature (29)..(29): n is a, c, g, or t
gccaaaatgaatanggaccctaacaccgnggaaaaataaaagccgagttttggtttgggtggtttccagtccatttgtttggggagatataaaaggctcaggagagcaggctttggcttttgccttttgtttgttttcttcccccacccagtgcagaaatcaggatcagggaaagattttattaaatgcccaatagatacagtatttaagcatttataaactgaaaccttttcatgtgaagataatgcatattttaccgtttatccagctgttaacattttgtaatcagtcaattcaatagaattattctggataattctatatctagaatataaaatctggtcttatagctagacatgatgatggtccccaaaccattgatgttctgttatgtactgtaatgggaagcgattctgattttgttttatatgggttctctggttctcaaaaaaaa

SEQ ID NO: 359698 - DNA, 549 bp, Homo Sapiens
cggctgtggggacgtctcacccacttgggttacagtaggccttccccacccagagagaagtgtttccaccccagagacattgcctgtcagcccctgaagtgctcgcctcccccagtgcccgtcaccagcccttcctatctgtggggtccaagtcaggcttcccctgcggccaccagccatagggagcagccatcagcccccgagtcagaactgcttctgtctgtccatacctccaggctctcccggagagggggacggatatttatttcctaaagtttgcacttaattgtgaggattctcaggattgttgggggctactgaaaagaggaatgtgttgaatgtcgcgtttgctgtccactcgtcctagaagtttagtgtttttgtcactgtcatgtgtttctgtgggcagagctggttctggagggtgggtcagtgcacccgaggctcagagcatccatccaccccactggccctccttccagataccctctctctaattgggttcttgcatgtaaaatactccacaataaataaataattgaacaaatt

SEQ ID NO: 359699 - DNA, 235 bp, Homo Sapiens
ctttcttagggcatctgtaggcctcaaaggacctttcctttaggtcatattcctcagaaagtcttcaatcttcccttgtttttgtttgtttgtttttcttaaagaatattttcaaagcttaaatttgtatattaatttaggactatttagaagtataggctgtcgttggcggcagcagtatattctgaaatgtctcatagatatatatttttgaataaagatggtgttgttgaac

SEQ ID NO: 359700 - DNA, 1352 bp, Homo Sapiens
  misc_feature (32)..(32): n is a, c, g, or t
  misc_feature (409)..(409): n is a, c, g, or t
gacactctcccagacagccctgacccgccagnaggaccccgtcccctgctcacacagctcttcaaacttaccaaggacaggcaggaccccgtcccctgctcacacagctcttcaagcttaccaaggacaggcagaaccccgtcccctgctcacacagctcttcaagcttaccaaggacaggcaggaccccgtcccctgctcacacagctcttcaaacttaccaagtgccctctcccctgttgagggcacagcaaccccaggccctccctcccacctcagctgaagccccaatcttccaaatcggaaccagcaagtcttagggctggcacgcatctgggcctctagctgagaacccggactctcaggcacctcagtgccctgccccagggcagaggcccaccccgtggtntggtgcagtggctgccctgggctccacgggcagcacagggagtctgtccaggaagcagcccagccggggtcagtattccgtggagccagtcctgagctgggaggggcatttaacacccctgagggcctggggcaggacacagctggccctcctcattgtcaggggaagcaagtgcccaacatctgtaacctcccttccctgctcagtccccaggccaaggttgggacccctctccatccctgtccccagagcctagacctcagggacctaggaaaagcctcctgctccctccccacggcagcagacagggcagggcctccagccccccagagggccggcggggggtgctctcgggccttcctgctctcctaaggttgcggggacagtagagtgctgagccccagacccagtcaccccaagatggccccactctatccactctctagacctttgggaaatctgggtccctctcctgatttgatccattcggccccaactccagagtcgggaatgggagatgaaactagttttccacccacttttggacaagtcccacccctagatctgaagcaagctctaccagcagcgtgtcctggaagcctgcctgcctgcccgtctgcacaggtgtcttgatccagccctgcgtcttcgagcccctgtgccaccggtccccacggcccgccaggagtctctttgtacccactaggcttccctgatgaccatctgtctgtccgtccctgtttttgctgtacataactcctgctgcaccctctccccgcacacccgtcacccatgagagagagaaacctctctagggaaaggcagggtggctgcacccagcaactaatccaaatggcaaatattttgtaacaaaatagcccagaggtattttatctgttcaattcatagagttttagagattatattgaaagatgtcacttga

SEQ ID NO: 359701 - DNA, 1632 bp, Homo Sapiens
  misc_feature (85)..(85): n is a, c, g, or t
tggttactgactgcatccaggtggatccccccgagcggcgccctccgccccccagcgacgatctcaccctcttggaaagcagctncagttacaagaacctcacgctcaaattccacaagctggtcaatgtcaccatccacttccggctgaagaccattaacctccagagcctcatcaataatgagatcccggactgctataccttcagcgtcctgatcacgtttgacaacaaagcacacagtgggcggatccccatcagcctggagacccaggcccacatccaggagtgtaagcaccccagtgtcttccagcacggagacaacagcttccggctcctgtttgacgtggtggtcatcctcacctgctccctgtccttcctcctctgcgcccgctcactccttcgaggcttcctgctgcagaacgagtttgtggggttcatgtggcggcagcggggacgggtcatcagcctgtgggagcggctggaatttgtcaatggctggtacatcctgctcgtcaccagcgatgtgctcaccatctcgggcaccatcatgaagatcggcatcgaggccaagaacttggcgagctacgacgtctgcagcatcctcctgggcacctcgacgctgctggtgtgggtgggcgtgatccgctacctgaccttcttccacaactacaatatcctcatcgccacactgcgggtggccctgcccagcgtcatgcgcttctgctgctgcgtggctgtcatctacctgggctactgcttctgtggctggatcgtgctggggccctatcatgtgaagttccgctcactctccatggtgtctgagtgcctgttctcgctcatcaatggggacgacatgtttgtgacgttcgccgccatgcaggcgcagcagggccgcagcagcctggtgtggctcttctcccagctctacctttactccttcatcagcctcttcatctacatggtgctcagcctcttcatcgcgctcatcaccggcgcctacgacaccatcaagcatcccggcggcgcaggcgcagaggagagcgagctgcaggcctacatcgcacagtgccaggacagccccacctccggcaagttccgccgcgggagcggctcggcctgcagccttctctgctgctgcggaagggacccctcggaggagcattcgctgctggtgaattgattcgacctgactgccgttggaccgtaggccctggactgcagagacccccgcccccgaccccgcttatttatttgtagggtttgcttttaaggatcggctccctgtcgcgcccgaggagggcctggacctttcgtgtcggacccttgggggcggggagactgggtggggagggtgttgaataaaagggaaaataaatgtgtcgtttcatttttaacacaaatctgacaatgcaacaggggggggccggtcaagaaggtatcctctcgagggggcccaagcttaacgattaccgggtttctggtacaaaggggcccctatagggggtccgattatacggcaaggacgggcacgtgtttacacaggcggatcgggaaccctggtactgagatcttgggaaggacttacttcgtgggggcatcttgcaacttccacggagttaagctaggaagtg

SEQ ID NO: 359702 - DNA, 1213 bp, Homo Sapiens
  misc_feature (70)..(70): n is a, c, g, or t
tgcttcggatggggagcacggagtataagctgcggcttcccgtggcctgcacgcagaggctccccacggncgccgaccttcttcagattcgatcgtatgtgtacgcagaagagccaaatattgacattcacaacttcgtgggaacttttacccgagaagacagcgaccccccgatcagcgagagcctgagcatagagaacacgctgtgggctggcactgtggtcgcatcaggtactgttgtgggtgttgttctttacactggcagagaactccggagtgtcatgaatacctcaaatccccgaagtaagatcggcctgttcgacttggaagtgaactgcctcaccaagatcctctttggtgccctggtggtggtctcgctggtcatggttgcccttcagcactttgcaggccgttggtacctgcagatcatccgcttcctcctcttgttttccaacatcatccccattagtttgcgcgtgaacctggacatgggcaagatcgtgtacagctgggtgattcgaagggactcaaaaatccccgggaccgtggttcgctccagcacgattcctgagcagctgggcaggatttcgtacttactcacagacaagacaggcactcttacccagaacgagatgattttcaagcggctccatctcggaacagtagcctacggcctcgactcaatggacgaagtacaaagccacattttcagcatttacgcccagcaatcccaggacccaccggctcagaagggcccaacgctcaccactaaggtccggcggaccatgagcagccgcgtgcacgaagccgtgaaggccatcgcgctctgccacaacgtgactcccgtgtatgagtccaacggtgtgactgatcaggctgaggccgagaagcagtacgaagactcctgccgcgtataccaggcatccagccccgatgaggaccttcttcagattcgatcgtatgtgtacgcagaagagccaaatattgacattcacaacttcgtgggaacttttacccgagaagacagcgaccccccgatcagcgagagcctgagcatagagaacacgctgtgggctggcactgtggtcgcatcaggtactgttgtgggtgttgttctttacactggcagagaactccggagtgtcatgaatacctcaaatccccgaagtaagatcggcctgttcgacttggaagtgaactgcctcaccaagat

SEQ ID NO: 359703 - DNA, 270 bp, Homo Sapiens
ccgacctacatacttcagtactgtattatacatgtgtatagtatatgtataaacttgcatacacacacacacatatgcataaaaagataaaatgtctgtataaatatcactcttaggtgttcctattttaatatctcgtcactcacccaccagaaccaaccagcccacagccggtcaatgtaccccatgacctcgtacacaccttacttcggggatttgaggtattcatgacactccggagttctctgccagtgtaaagaacaacaccca

SEQ ID NO: 359704 - DNA, 989 bp, Homo Sapiens
  misc_feature (580)..(580): n is a, c, g, or t
  misc_feature (611)..(611): n is a, c, g, or t
  misc_feature (835)..(843): n is a, c, g, or t
cctgggtggcgaattcggcacgagggggctgcagatcccccacgagcccgagctgatgaggaaggagatctcccggctcaacaagacagttggaagagaaaataaatgactgtcccgaagtgaagcaggagctggcggcctccaggacggcccgggatgctgcgttggagcgggtgcagatgctggaacagcaggtgtctgtccctcgggctccggacggcactgaccagatgtctgctggccggtggtggccgaaatcatgggacaggctgggctgaaggcttggtggcactgagtgggcagtggtcacggtgggggtgggagaagcctgggggggcgcttcctccttccttgagcagaaatgtgtgtctcgcctctcttcagattctcgcttacaaggatgacttcatgtcagaaagggccgatcgggaacgggctcaaagtaggattcaagaactggaggaaaaggtcgcctctttgctgcaccaggtgtcctggagacaggattctcgagagccagacgccggccggattcacgctgggagcaaaactgccaagtatttggccgccgacgcattanagcttatggtgcctggtggctggaggcctgngactgggtcccagcagccagaacccccctgcagagggcggggcatccctggcgcggcccaaagagggcagggggaccttcagtgccctcactgcctgcagtgcttccgtgaccagcaagggggaagagctcctcaggcatgggggttgattgctgccagggaccggaaactcccccgtgccctttggggcctcctggcccggggcacctgcccttcaggacaannnnnnnnnctctcaaatggcctggggttgagctccaactggagagccaaggccccctagaaaaaagttggggggggcacctccggattcggttccccttttgggtcccctctttggcttaatgggaaaaacggggtgtgtggggtcacaagggc

SEQ ID NO: 359705 - DNA, 661 bp, Homo Sapiens
  misc_feature (28)..(28): n is a, c, g, or t
ccacacttgctgcatgggttgctctcgnccccactcttggtgcacagcgagtcactgtgggttcattagcatctggttatgagacagtaacttgctcctttggaggggctcgtggagaccatgcaggagggcacggtcttgaggtcatgccgtccagagcacacctgaggataggccaggacgggctgcacgctgtaggtaaaattcctccagcaagctcttcactggcattgaggagttccctgagtgcggtcatctggaaggcagctgtaacaggcactgcagtctctccctgggtgggtaccagagaggagcataggggagcataaccgatttaaagagagggctttcctgtggtgaggtaagagattagctggtcattatcatagagccccctctgcctttgtgcagatgggctgtgggaatcctggggttccgttgggtcctttgtcacctcactgaaggcatgtaagctgagctggccagaccgtgagctgatcctgccacttgaacagcatcaagcctgcctctggattcttctgtgcatggcacttgtctgagcacctcacgcacagagaactggacttcagagtttacagaaataagctgtatggttcattttcatgcctgcttgccaataaacatatctgagctgaacctc

SEQ ID NO: 359706 - DNA, 1090 bp, Homo Sapiens
  misc_feature (346)..(346): n is a, c, g, or t
cccccgccggaaagacagactgcagcacaagctgaggacgactaaaggagcgacgtcccgctttcattatgtgacgagaagtctgccctgtcaccctaagggcatgtactagtagtactgaaattaagtctaaatttgggtctacaacacctggtctcccccaaaacagccagtagaaaatcgtgcataactcccacagcacgttgtgtgacgtcaacatccaaaagaacaaagccgtttaggctggaagttaattaaaaggaaagagatggcctgtaaggcaaggagtgggggcaaaaactccacccagcatcaggagtggccatctgtgaaggagcacagcggncctgaggacacagcctgggggcgccttccttgcacttacccgggcacccgctctgtccattcgtaaacggcctacaaagttaccagcaactgacaggttaggcaccacaagctgtttagtgtttaaaaatcaagccacacatcagggccaggggagtcagctgagtggttaggagcagcacaggaggcccaggccccaaactctcagtgctttacctttgggaagctggaagcacccccaccctgccagctgccccaggctgattccaggccacgcttcatgagaaccgggaaagggctatgggcacacaggcgccgctccccctgaggagatggggcccgctctgctgggcatggtgtggctgatgctaggacggaggctgccccagggcactcgctctggagagctgccatcatctgagtgaacatcacactgctttacgagggtccaatatccgctcctctgcccacctcctttggaccagcttcagcaaaggtccaaggcaatctgaccccacacggcaggtggcagaaccccaccctgtctgaaccgaggctgcacttacatctgatccagtgtggcaaaaccctcccaccaagcaatccaaagagacccccaaaggctggaggtaggaactcctgaggcccagagtgctccatggcacctaggtgcgtggaggtacccgctgccgctgaaggcagcacagcactcaggtgactgaaccacttccaggaaggcctccaa

SEQ ID NO: 359707 - DNA, 708 bp, Homo Sapiens
  misc_feature (40)..(40): n is a, c, g, or t
  misc_feature (540)..(540): n is a, c, g, or t
  misc_feature (657)..(657): n is a, c, g, or t
tgtgatggactcgaatggtatgccctggcctgtcccccgntgtcctgtgcgagtagggacccctccctccctgccttctccctgctgagcaggtggctgagggtcctgaacccactcaccaccttaagggacatcacatgagcattattttggttttaattctgtggtagggcattttatcccaataatttaaacttggcaactgtaatatgtatttttactttttaaagtgaaaaatgctaataagaaccagaggaaaaaatgcaggaactaggatcctggatatagaaaaggattccaagtctacttctcatttcggggaaaatatggaccagcactattctaactccttccatctctgtctttatttcagaagtttaagattaatagcttaggatcagcaggtccgtattttgaaccagcagctatcatcatccttctgagctcccagggcctctgctcccaccctaacagctggctcgcctccccaagtaccacgttggcagctaccttccagaagccaggtgtccataaaaaagnccgccataccacctagctgagtgagcatacagcctcaaccgggaaaaggtgctgacctctggcagccagcctgcattttacctgtgggacattctcccctcagcccatgccaagggncagatcagacctcctgtgggttctcctgctgacagctctgtgatcacagag

SEQ ID NO: 359708 - DNA, 637 bp, Homo Sapiens
  misc_feature (416)..(416): n is a, c, g, or t
  misc_feature (540)..(540): n is a, c, g, or t
ctgcttgcagtacgcttggtctagccacagccacagcaggtaaccagcgcctgtgcctgggagctgcctgccctgccacagctggcatgcctggctgtgcccaatggccagaccccacactcatttgctcatgcaacccttgctgctctgcacctggcttgcccttggcaggcatgggatctggaccagtagtgaaagacaagcacagcctgccaggccaagtgggtggaaggagcccagtgggcccaagcaaaactcaggtaaagccgccactggccacagaagtctccagctggtgaagtgacaccctaaggatcctgtgacagtggcacagcagctcacccccagtgggtttgtgttcacgggtatgtggcactgacggtggggtagggtgccaacaagaggtaggctggatncattacccaggactagcctgtcaggcaagaggtgagctgttctgctcctcacagatgggcccaaggaagacaaggcttccagtgagtccctgtgcctcatctaggtgctgttctggggtatttncacattgagatctcagcatctagtaggcttgttgtggagattaaataggataacttgtatagaaaggtaccaggcccatgagtggggttcagtgttc

SEQ ID NO: 359709 - DNA, 350 bp, Homo Sapiens
  misc_feature (217)..(293): n is a, c, g, or t
ataaattacttttatactaattgtttccagggttttagagtagttgaatgtttatttcacaagggcaccctaaattctatagaaataaaacctcagatgagtctccttcttagagtgttacaatgaatgggagtttacaacttttatgtgtcatgtttccaacagctgtgtttggggtggtcactggcaggaggggaccgtatctcagaatggcacnnnnnnnnnnnnnnnnnnnnnnnnnnnnnnnnnnnnnnnnnnnnnnnnnnnnnnnnnnnnnnnnnnnnnnnnnnnnntgatgaagctgggatttgaatcttcacatgtgtgtacttataaatacaaatgtaagg

SEQ ID NO: 359710 - DNA, 771 bp, Homo Sapiens
  misc_feature (58)..(134): n is a, c, g, or t
  misc_feature (421)..(710): n is a, c, g, or t
ccttacatttgtatttataagtacacacatgtgaagattcaaatcccagcttcatcannnnnnnnnnnnnnnnnnnnnnnnnnnnnnnnnnnnnnnnnnnnnnnnnnnnnnnnnnnnnnnnnnnnnnnnnnnnngtgccattctgagatacggtcccctcctgccagtgaccaccccaaacacagctgttggaaacatgacacataaaagttgtaaactcccattcattgtaacactctaagaaggagactcatctgaggttttatttctatagaatttagggtgccttgtgaaataaacattcaactactctaaaaccctggaaacaattagtataaaagtaatttatgatgaggtaattagctgtcatatctgaatttaaggaatcttttagaaacagcttttcaaaaagtttgtttannnnnnnnnnnnnnnnnnnnnnnnnnnnnnnnnnnnnnnnnnnnnnnnnnnnnnnnnnnnnnnnnnnnnnnnnnnnnnnnnnnnnnnnnnnnnnnnnnnnnnnnnnnnnnnnnnnnnnnnnnnnnnnnnnnnnnnnnnnnnnnnnnnnnnnnnnnnnnnnnnnnnnnnnnnnnnnnnnnnnnnnnnnnnnnnnnnnnnnnnnnnnnnnnnnnnnnnnnnnnnnnnnnnnnnnnnnnnnnnnnnnnnnnnnnnnnnnnnnnnnnnnnnnnnnnnnnnnnnnnnnnnnnnnnaagcagaatgccacgagagagatgaacatggaaagaggagatgaaccacacacaaggcatg

SEQ ID NO: 359711 - DNA, 623 bp, Homo Sapiens
ggggacgcagtgatatctgtgcctcagcctctgggtctagctttctcccctcttgctgtatgtgacagagtgtcttctctctgtcccttcctcatgcagtcggaacacacagatgggcacacctctgtccagagtgttattgagaagttgcaggaagaaaatcgactgttaaaacagaaggtgactcacgtgagtgtctttcacatttcgtttgagaagaacacatggcttacaaactgtaagtgagggttctttccttggctgatgcccagagtcgccccccgccctctggccactaggacttgatacacacagtccctagagactggacttttttgcttaaaacgacgtacgggacatgtcctgtccatctccatccccctaaaattaatccacaagtcagtaaaggagatgcaagagttagcagcaggaggtccattttctaagacagcaaagctgcaccgagtccacctccgttcatgctgcttgcgtacgggtgtcatcgtgctgcctcaggattctctagcgggcctagtgtctgctctctacagaacagggaggggcagcttccatttaagaggaaactctctctcagcgaatcgctgctaatacataattgactc

SEQ ID NO: 359712 - DNA, 1030 bp, Homo Sapiens
cgcggcctcccgggcgggcctacagccatgtcccgggacccggggtcgggcggctgggaggaggccccgcgcgcagctgccgcgctctgcaccctgtaccacgaggccggacagcggctgcgccgcctgcaggaccagctcgctgcccgcgacgccctcatcgctcgcctccgcgcccgcctggccgcgctggagggggacgccgcgccgtccctagtggacgcgctgctggagcaggttgcgcgcttccgggagcagctgcgaaggcaggagggcggcgccgccgaggcccagatgcgccaggaaattgagaggctgactgagcgactagaagaaaaagagagggagatgcagcagctgctgagccagccccaacacgagcgagagaaggaagtcgtcctgctacggaggagcatggcagaaggggagcgcgcccgggccgccagtgacgtcctgtgccgctccttggccaacgagacccatcagctgcggaggacgctgaccgccaccgcccacatgtgtcagcatctggccaagtgtctggatgaacgacagcatgcacaaaggaatgtgggggagagaagtcctgaccagtcggaacacacagatgggcacacctctgtccagagtgttattgagaagttgcaggaagaaaatcgactattaaaaccagaaagtgactcacgttgaagacctcaatgccaagtggcagcgctacaacgccagcagggacgaatacctgaggggggctccatgcgcagcctcagggggctgcagatcccccaccgagccccaagctgattgaggaaagaaaatctccccggcctcaacagaacagttgggaaagagaaaaataaaatggccggtggcccgaaatggaaaccccgaacctgggcggccctcccaaggaccgggccccgggattgcttgccctttggaagcgggggggcaaatggctgtgaaaccactagggggttttgttcccccccggggcttccggaacggggaccgtgacccccaatggttctgg

SEQ ID NO: 359713 - DNA, 744 bp, Homo Sapiens
  misc_feature (672)..(672): n is a, c, g, or t
aggttacatgttatgctgcccaaaacaaagtcaacacagccttcggctgggctgcgaactcctgtttgaactgtgattactgttccttcttctatcagaaggcaacacttgcactgtgggaatggccatcaccagtgagggagaaatggaagccaaaggaaagtcctttccagaaaagccccagctccctaagtcccaaatacccattcttcaggttctcagatgggaagcaggcatccacgcactcgcctcactggggaggggagtgtgtgggacacagtcgtccttgcttggtcaaggaaaaactcaacttctcaacatgcagctccatgttccaaaaggagcaagactgtctgtgctttgaggttcacatgaaaggaagtggaacaattgcccagtaaaggactcccatggagccaaagcacattctcaccaaaaagagggatattttagccagagtgggataaagatcaagggtgcaaaagtaaacttcagatataaggaggtagagaaaacacaaaggtggaacaaggatttctgtccaggtggtcaagctctcttcctctggggtcagcgtacagtggtattctctgctaatgacacctggatgcagcactcgcagtgagcatggtgttcagaaggtacggaccctacctctatcgttcaggaagnccccaggtgacagtgacacacacccacatctgaatatcactgggacagagcacacaaagctgtaactggtgg

SEQ ID NO: 359714 - DNA, 958 bp, Homo Sapiens
  misc_feature (796)..(796): n is a, c, g, or t
ctccagccactcctcggcgactctgcgcagctcctcctcggaacgctggtacctctgcagcaaggtactgtatgtgtcctcactgcaggtgtcgtgtgtggtggttcctagcctgatctgtgacaccagtgcgggcaagttgctctgaagaagtggctccgaaaagaccagattttcaaacaggtgtttattatgcagttcccacgtcacttggaactttttcaagtgttcattttccagagtgccaaggaaggtgctgatggagcgtgcggcctggcagagggcgccgtactcctcaagcaggagggagatgaactggtgcgcttgcggcgggccctgcaggccagatggtgccttcaccttggccgcagccgacagctgccggagcaggcggaccttcatctccagcacatactctcgagcttgctgttccagacgctggtacagctggtaggggtccctctcgcagagcctatccacgagctccttcactccctccttgtcaggcaccacagactggtcctgggcatctgccaccggggttcctgcctggcgagggatgcagcgcaccgcgtagcgcacatctgaccagtagttatggagctgctgaggttcccggtccgcctctgccgaaatttctctgcgctcactgcaggcctcgcacggagcatgcggtgtctgaaggcagcgtctgtgcacccagagcgagcctcccaccactgccggcctctggctgggagccaccaagcgaggagtgaagaagaaaatcttggctcactggctggtcaaggccgcnatgcctctcctccttctccacggtcctgcggcagtccgggcacacccacagtggcaggtgcagcacgctgttgcccttgggagccatggaaagggccaatttgctcgcagtcttaattccactctctaagaatgatgagtctttccgttcacttctgcacag

SEQ ID NO: 359715 - DNA, 1142 bp, Homo Sapiens
ccttggaccagatcacagatgagatggtgcttcaggaagcagggtggcttcaggaggcaggaagtttaactttcctgaaggtttggaataaaaagtattcataggtctgattcaggctatgttaaatgttcttactgaaattctttgcacttgggatgaatattgtccgctagaaaggaggaactgagggttttctgcctgggcgcgatagtcagtcagtggagtagactcaatcagtgacacagggacgaacagagaaggcagagtctagcgtaactttttgagttcatataatcagtgaggttgattgcattaattgactgtctactgttgagtcatgaacaggacacagttcttgccctcaggagtttatgacctaataagagagatggacaaacgattcccaaatgagccctgcccctgtgatctgtgcagtcataggcatgatgagagcttgcaggcagaggtgggtgccgattggtcaaggaggtaggaagaggagcaaaagctcatgaagaaggctgaagaagcagttagagttgggtggccagccagggtagtgaagctgcagggactcatagatggagaaagcttgagagtggggcagccatggcccaggtgtgcgtcaggagccaggtcatccagcatggctgtgcaaggtaaggagggctgaggttggcccagtcacacagcccctgcctcctggtaaatacggcgacattttgctgctcttctacttacagtcagtgtgagggaggagagaggggggtcagaatgcacagcagccaccaaagactgtgctgaaagcacatcctagaaggcggagagggggaagtcaaaatcaggtagaaactctgatttggtagggaaggaagataaggatgaatgattaataagtaaaacattcattacaaaaagcatgatgaatgtttactcagtgtccttaatgtgtacagattgttttaatattagaaggccatatagtttataagaaataaactagacagcaatcactaatcatagtccatgttttaatttagcatcggggttggcatatatgttgtttgctaataactgagtagagaatagttgccaatttccacactataatatatgttgcagccgagcacagtggctcactc

SEQ ID NO: 359716 - DNA, 447 bp, Homo Sapiens
  misc_feature (46)..(46): n is a, c, g, or t
gctggaccggtccggaattctccggatcttatgttgagctataatnactctggttacatatagcacacaaactcaaatatgaaatcagcctaattataataaagactaccttgataacatatgaagtttattataatgtaagaatacccgcttattaacatagctaaaatcttagacttaaaaacaataatacttttcctaacgaaagtaatgacaaaaagtctcccctcccccacttttttacatacctcctatagaagtgccagtggtactattgcttgtaagagtagctgaagtctctgacactgtggaaggttggctactggtgacagctgaagcagtatcagaggcctgctcagaggtagatggatttgaattgttaatggaagcgctagtagcttgtgattccattcttgcagaagtggttggtactacagtaggttctac

SEQ ID NO: 359717 - DNA, 514 bp, Homo Sapiens
cagcaggggtcaaatgcagatgctccatgaaaactgccacttccatgacttctgataccactgttgctcaagtctactggcaatgcctgctgttcatgatagctggtaccagaactactatttgctccacaaggtgcttgtacttgtggaggtctttccacagggcaagcaggatcactaaaggaaggagaaactgggacagctgggtggggagtatggtggtggtggtgatggtgttgaaaatggtgaccatgctgctgaaagcaacttgtatgaggatgtcctaatgcatggtggttctgtgacgaccctccacatggtgagtgctggggacagcaggaaggtaaccttggcattgcaggagggccagtttccgttacagcactagatgtagttctccttgagtcatctcctatagaagtgccagtggtactattgcttgtaagagtagctgaagtctctgacactgtggaaggttggctactggtgacagctgaagcagtatcagaaggga

SEQ ID NO: 359718 - DNA, 969 bp, Homo Sapiens
taaaagacaaaattaatggaactatagaaacccgccgcgtttgtttatttatatgcagggactggagtaaccggtccggatgtacgggatatcgtcgacccacgcgtccggtacaagcaaaacatcaggaaattagatatgactagcccagttaattaaaagacgggctcaacctgtatatctttttcatcttggatgaagattgaagggaaaataactcaagtgcataatatttattttcaatttttaatgagactatatcctcatcacaacattaatactgtacatagtatgccaaaatatccattaatttgtctagaatagtacaagactttttaaagcaattgtcctcacagagaccacatgtaatatactgaaatatgttcatttttaatggctttgttaacatcaaagaaatgctgcctaaatttgatttcagatgaggaaggagaaagtaaagtgtgcatagtaaggctgtaggtgaagagttgtgagataaatagttcactcagttgtacaaagcacaactagaactttttgttgggaggcttacatacatcttgaatattcttaatgtaataatgttgactattaagttggctacacagtcactgtatgtactaggaactggtttccttgacattctagaatcaatggctaggagaggcattaatctttgaggggctgaacatatcatgaagctgagtcagtatggaaaactttcaaataaacagggtggctgaagttccatctgtctcatctgcttatgataagttctaatcgtaaggtgaagtaagcttacagccttgtatgtgtctcagagaggcagacagatttagagggacaagattacgttgaaggagggcaaaatcacagggttacagctgaaaatcattttactaacaagacacataacatttttacataatgaacaagcggagtaagtggtatataaagggcggagcatac

SEQ ID NO: 359719 - DNA, 945 bp, Homo Sapiens
  misc_feature (913)..(913): n is a, c, g, or t
gaaaaagtgaccttactcgtgctttccaacttcaagaccacagaaaatcaggctcattctactctagttgaaactctgtacagatacagatctgacctggaaatcatatttaatgccattgacactgatcactcaggcctgatctccgtggaagaatttcgtgccatgtggaaactttttagttctcactacaatgttcacattgatgattcccaagtcaataagcttgccaacataatggacttgaacaaagatggaagcattgactttaatgagtttttaaaggctttctatgtagtgcatagatatgaagacttgatgaaacctgatgtcaccaaccttggctaaacacaaatgagagcttccctcaggctccctgaaacagctaggcccaaatcacaagtacagtcctttccaacacccctgaaattcatagtcagtagcagagaaaagcagatcccaattcatcccacaaacagatgcatagtatgggttttggaagtccctagcaagctgttattggtaagattaggttaaatgtcagtaataggatttggtttcagcattagtacctacatattgccagtgagaaactgggttggacctagtggtgttgtcgtgagtgccacctaaccaggaggccagagcggtttgaaaacatcctgaaaggaactcatacagcacaagagaaaactactaagcttgacatctgtgagtgactgagggagacaggaggaataccaggttattcatggaataaagtctttccatcttttaaactgtgatcttctttgggagattttattaagccagtggatcctcaatttaagggatccacccttcagggatggaggaaccatattgggttcttgggggggaattctgtggggagtgtatttgtttggaaaaaagncgtattttttgttgtgtgtgtatgtttgggag

SEQ ID NO: 359720 - DNA, 543 bp, Homo Sapiens
  misc_feature (18)..(18): n is a, c, g, or t
  misc_feature (402)..(402): n is a, c, g, or t
  misc_feature (435)..(435): n is a, c, g, or t
  misc_feature (449)..(449): n is a, c, g, or t
  misc_feature (473)..(473): n is a, c, g, or t
  misc_feature (480)..(480): n is a, c, g, or t
  misc_feature (487)..(487): n is a, c, g, or t
  misc_feature (525)..(525): n is a, c, g, or t
agaagtgtgtaccacctntttttccacctccccaccatcccagctctcaagctctcgcctttcctatcagcctgctgccctgggcgttggatcagctgacctggcttatccagtagtgtttgctgctggcttaaatgctacacaccctcaccagctgatggttcctgggaaggaaggtggggtaccccttgctcccaaccagcctgtccatggtacccaggctgaccaggagagactggcaacctgcaccccttctgacagaacccactgtgctgccacaccctccagtagtgaggatactgaaaccgtatcaaacagcagtgagggacgggcctcccctcacgatgtcttggagaccatctttgtccgaaaagtgggggcttttgttcaacaaacccattnaccaggtgaccctgacgagtttggatattaccntttgccatgttttnttcccaagaattttggagctggangataacnattccantggtgaattcttccagatttccccagagattgaatctnctttccaggggagctttt

SEQ ID NO: 359721 - DNA, 467 bp, Homo Sapiens
caatacgaccccagtttactgacccaactcaggtgcctgttcctccaggctggaaccacctgccgttctggagcccttcaatctcctccagtccacgtttctcgtgggcagaatgacatagcaaaccaagggtggaagaaggctcccttgcccggcccaatgcaacagcaactccaggcaagaccatccttagccacggtacagacgccttcccaccctccccctccatatccctttggcagccagcaagcctcacaagcccacacaaactttcctcagatgagcaacccaggccagttcacagctcctcagatgaagagtttgcagggagggccctctagggtcccaactcccttgcagcagccccacctcaccaacaagtctcctgcctcctcaccctcctccttccagcagggatcccctgcatcccccccaacggttaaccaaactcagcagcagatgggacc

SEQ ID NO: 359722 - DNA, 835 bp, Homo Sapiens
  misc_feature (499)..(499): n is a, c, g, or t
aagttaaactgtagtcttctctcttcagagtctacttttatgccagttgcatcaggactgtctccactatcacctacagttgagctgaggctgcagggcattaacttgggcctagaagatgatggtgttgcagatgaatctgtgaaagggctggaaagccaggtgttggataaggaagaggaacagcctttatgggctgcaaatgagaattctgttcaaatgatgagaagtgaaatcaatacagaggtaaatgagaaagctggactattaccttgtcctgagccaacaataatcagtgctatcttgaaggatgataaccacagtcttacattttttcctgagtcaactgagcagaaacaatcagacataaagaaaccagaaaatacacaaccagaaaataaagaaaccatatctcaagcaacttcagagaaacttcccatgattttaacccagagatctgttgctttgggacaagacaaagttgcccttcagaaattanatgatgcagccaccaagcttcaggcctgttggcggggattttatgccaggaactaccaccctcaagccaaagatgtgcgttacgaaatccggctacgcagaatgcaagagcacattgtctgcttaactgatgaaataaggagattacgaaaagaaagagatggagaacgtattaaaaaatttggtacaggaagaagctttcaaattccttttggaaaccagggaaaggtcttctacagggtttgggcaaacagaccagtggaacccagcgtcctaaagtttccctgggcatacctgaatggttccctccctattattcaaggaaactccttggtga

SEQ ID NO: 359723 - DNA, 1086 bp, Homo Sapiens
ggcctgggtggcgtttctcggcacgaggcccctgagccctcggcctgctcagagcctggagaatgccctgcgaaaaagaggccgcgcctggatggcagccaaaggccgcctgccgtgcagctggagcccatggcagcaggggccgcaccatcccccgggccggggccagggcccagagagtctgtgaccccgcgcagcaccgccaggctgggcccgcctccctcccacgcctctgcggatgcaaccagatgtcttccttgcccggattcccagaagctggagaaagagtgccagtcttccgaagagtccatggggtctaattccatgcgttctatcctggaggaagacgaggaagacgaggagccaccaagagtccttttataccacgaaccacgttcgtttgaagtaggaatgctagtctggcataaacataaaaaataccccttctggccagcagtggtcaaaagcgtcaggcagagagataagaaagcaagtgtgctatacatcgaaggacacatgaacccgaaaatgaaaggtttcacagtgtctcttaaaagtttaaagcactttgattgtaaagagaaacagacgcttctgaatcaagccagggaggacttcaaccaggacatcggctggtgtgtctccctcatcaccgactacagggtccggttaggctgcgggtcttttgctggctctttcctggaatattacgcggctgatataagctatcctgtccgaaaatccatccagcaggacgtcttggggaccaagcatttcctcaactgagcaaggggagcccccgaggagcccgtggtggggtgcccccctggggcagaagcagcccctgccggaaaatgctccccgaccgctcgcggggccgcccggggacggggcccaaccagaaagctggttggagttacattgtgaaaggccaaaggccgccggaaaagccaccctgcgggcccatctctaaaagagcaggaaagcccattctcccctgggctggcagaaactttcccctgaagctctcccacccagtaaacgctggacccctggtggtggggaaaaaccctaaccctggggaac

SEQ ID NO: 359724 - DNA, 643 bp, Homo Sapiens
  misc_feature (149)..(153): n is a, c, g, or t
  misc_feature (157)..(160): n is a, c, g, or t
cagttaccccagaattccaggtccctatggctatgggcaaatgggctgagcacccccaggctaatgcctccaaaatctcccctctcgctatcttgaccaagttatgtaacacatgtgctaatatctttctttaaactaactcactcttnnnnncttnnnngaactttgtcataagcatcagtattagagaaatactgagttttaagggctagctttattcaccacataaaacatacccagtgctaaaattaggaaagatgggagtaaacccaaatgaactggttgtcctacctggggaagccaaatggaaatgagaggactcggcagggtggtggagtcctggtcatccactctcacctaccccagaagaagcttcttatgaagtccagaccccagccacgggcaaaatgatctgtgcaaatggtttgggagccccagtggatgcagaatcttctatcccactccattcttgttcatcagttcagcttgacccatcaccctagctgtggaaacttctccacgatgagcctttatatctacatttgcttaaagtcactccgtctaccattacggctgaggaaaacagtgaagatgctttctgtggactgacaaggaataatcaccaagatgatgtacaattcag

SEQ ID NO: 359725 - DNA, 1822 bp, Homo Sapiens
agcgggccgctggccctcctgggggcaccaccagctcctcaagcaccctggcccgaaaggaggctggggggcggcggaagcgagtagagtttgtgacatttgcgccagcccctccagcccagtcacctgaggagcctgtaggggcccctgctgtgcagtccatccttgtggcaggcgaggaggacatccgctgggtgtgtgaggacatggggctgaaggaccctgaggagcttcgcaactacatggagaggatccggggcagctcctgaccctccacagccacctggtcagccaccagctggggcaacgagggtggaggtcccactgagcctctcgcctgcccccgccactcgtctggtgcttgttgatgcaagtcccctgcctggtccaccacaaggactcccatccaggccccctctgccctgccccttgtcatggaccatggtcgtgaggaagggctcatgccccttatttatgggaaccatttcattctaacagaataaaccgagaaggaaaccagagctgggactgctgccgtctgtccggtagagtgaagcaagggggctggaatagggcctgttcagcccctgtccctgctgaaacggctgtgggaggctgggccctgggacgccctctcatagcgtccagcgatccagacaaataggagagccgtgacggcctgaatgccagccagcaggaagaagtagaggtccatccggcaattgttgatgttcccaaagtccttggggcagtgcagccagcccccgggcaaggacagcagtgccactaggctggagcccaacagtgagcccacccccgacaggcagaagaagatgcccatgatggcgccctgcatggagcgcggggcctctgagtaggcaaactccaggcctgggatgctggcaaagatctcactgatcccaatgagcaggtactgagggatctgccaccagatggacagtggtgccgcgttgtacaggacctccccaatctgctgggacacggtctcgttgtggtggatgtagtgtaagcgctccatctcccaggactcctgccacaatgacggaggtaaaaccaaagaacatccccagcgccatcttctgcagagcagagggaagcagcttgcaccgcagcagtaaagggtcgatcaagcggtccttcagagggaccagaatcagcaccaccacaacattggccaggaggagccaggcttccgggatcatgtagctgctgccctgggctctcagggccacagagatgttggccgggttggctgggaaaatgtttgggatgtggaggtgaagaccctgcaggacataggtggactgcatctggaagtagaccatccagtagggcaccagggtcaccatgacgggcaagatcttcaccagcacctggaagttggcgatgtcctcttgcggggaagcccctggctggggagacctctcgtcggccagcacgcgggcacattgacggtctctggccgagtgtcgttgccacagctgggggcagcagttttggagagcgagcttaagcatagaggacacttggctgcccatcgggggcttggtgatgaagacgggggtggcaaagaggaagatgaaaaatgccaggcccacacagcccacagggatgctgtagcccagcaggaagctgatgttctgctgaataaacgccaccaccagcagcgacagcacagcacccaggttgatgctccagtaaaaccagttgaagaagcggcgggtggcgtcgcggccgagatccatcacccagaattggatcaatcagcaacagccaggccccaggccccttcatcccggga

SEQ ID NO: 359726 - DNA, 674 bp, Homo Sapiens
  misc_feature (75)..(75): n is a, c, g, or t
  misc_feature (117)..(396): n is a, c, g, or t
actctaactgaaagcagagtattaaagaccactagccatgcctttttaacatccttgaaatattccttccagacnaaagcccgtttgtgttttgtgatggaatatgttaatggggcnnnnnnnnnnnnnnnnnnnnnnnnnnnnnnnnnnnnnnnnnnnnnnnnnnnnnnnnnnnnnnnnnnnnnnnnnnnnnnnnnnnnnnnnnnnnnnnnnnnnnnnnnnnnnnnnnnnnnnnnnnnnnnnnnnnnnnnnnnnnnnnnnnnnnnnnnnnnnnnnnnnnnnnnnnnnnnnnnnnnnnnnnnnnnnnnnnnnnnnnnnnnnnnnnnnnnnnnnnnnnnnnnnnnnnnnnnnnnnnnnnnnnnnnnnnnnnnnnnnnnnnnnnnnnnnnnnnnnnnntaccatgactatatttaagagactgacaatattttggagataaatttaatatttttattagcacatttcactcattcctttattccttctcctttctcttccttggttttgatcacagtcaatgtgagggaaaagtaaatttactggaaaagctaactggaaatatttttattgtgggctttctgaaataaatttaattattaaatagggtcttgtttgtgtctcatgaacttaaaatattcttattttccaaaataaataattaaatatcaaaaaaa

SEQ ID NO: 359727 - DNA, 271 bp, Homo Sapiens
gccacagcacaaagaccaacccgggatgcactaccgccactgagaacctcaaaaagacccggacgggtctgacgcctgcacacttggctccaggatagaacaccctcacagcaccgccaccctccaagcttccgttatctggaaggaaaatcaggacgaatgggctctgctaggcctgcctgccatagtaccaggctctctggaaggggggaagacacacaaaatcccccaaaacaccctcacccccgaagaacttcacgttctgttcagc

SEQ ID NO: 359728 - DNA, 377 bp, Homo Sapiens
  misc_feature (42)..(42): n is a, c, g, or t
ttaaaattgtgtggtccctttcccatgtccacagagtctgcnttttggctcagagtctggtatcttagcctgtgtcaggatattgcctgttcttcccaccttgacttccagagcagccatcgctggtgagctttagttctccttagggttccaaggcattagaagtaagagtgtagcttggaaaccaacttctgtgatttaggaaagctgtctctttcctaaggtaatagggggtttatttcatttaggccccagttggtaggttttaaaataatttataaagtgttttaataatttggttgtcttttttaccttgctaaaccaagcctctaaaaactcaaattattcccttgataaatttttataatggaaaaccc

SEQ ID NO: 359729 - DNA, 854 bp, Homo Sapiens
ggtccggaattcccgggattaggagtgagccaccacaccagccaagatgcttttcaaactgatacagatgacaatgggagcctcataaagatggcttttgtttcttcccttcaaggtcatttacttgtacgagacagaaaaagatagcattggggacatgggatgggggagggagggcaatagtggaacgaactttccatgggaaactttcccttttgtaagttgagggccaggggtagggatattttttagtttgtgattttacatttatctgtacatactttttcaagattgatcatttttataaccatggttttcctgaaatcctcaattcatcaatatgaaggaaatgaaccacatagactttatgcaataaataacagtgcaagtgagtataactctaactgatgttccacaaaacatttttgatttcaggtttgtatgatgtagtttttaatcgtacattttcatatgcttcaaactaacacatttttaaagctttcccccacttttctctctatttgtattgttagccatcttgaagtgatgttgtttaacataaattgtactgttgaatttggctttacgggtgtaaacactgatggtatatcagtatctgagaccccaaactctccaaatactgatggtgcattttattcttgaagtgaaatctgtgcaataaaataacagactgtctgcaaaactggccttcaatcttctgttgtatccagaggtatcattattgatttaaaaaaaatctcattaatctctactggtaatttatagggaatctgatcagtgattcaagaacaagtaattctgcattgccttgaataattaaaaagttatatttt

SEQ ID NO: 359730 - DNA, 406 bp, Homo Sapiens
  misc_feature (28)..(28): n is a, c, g, or t
  misc_feature (34)..(34): n is a, c, g, or t
  misc_feature (42)..(42): n is a, c, g, or t
  misc_feature (140)..(140): n is a, c, g, or t
  misc_feature (147)..(147): n is a, c, g, or t
  misc_feature (238)..(238): n is a, c, g, or t
attttttaaaaccccagggtttcccccngaaaanccctcaantccatccaatatgaaggaaaatgaacccaccatagactttatgcaataaataacagtgcaagtgagtataactcctaactgatgttcccacaaaacanttttganttcaggtttgtatgatgtagtttttaatcgtacattttcatatgcttcaaactaacacatttttaaagctttcccccacttttctctctanttgtattgttagccatcttgaagtgatgttgtttaacataaattgtactgttgaatttggctttacgggtgtaaacactgatggtatatcagtatctgagaccccaaactctccaaatactgatggtgcattttattcttgaagtgaaatctgtgcaataaaataaca

SEQ ID NO: 359731 - DNA, 440 bp, Homo Sapiens
  misc_feature (163)..(163): n is a, c, g, or t
cccggaatacccccaccggtgttaaccccccgaaaaccccaattccaaccggtacaatttatgttaaaaccaaccatcacctccaagatgccctaacaatacaaatagagagaaaagtgggggaaaacctttaaaaatgtgttagtttgaagcatatgaaaantgtacgattaaaaactacatcatacaaacctgaaatcaaaaatgttttgtggaacatcagttagagttatactcacttgcactgttatttattgcataaagtctatgtggttcatttccttcatattgatgaattgaggatttcaggaaaaccatggttataaaaatgatcaatcttgaaaaagtatgtacagataaatgtaaaatcacaaactaaaaaatatccctacccctggccctcaacttacaaaagggaaagtttcccatggaaagttcgc

SEQ ID NO: 359732 - DNA, 1120 bp, Homo Sapiens
  misc_feature (57)..(57): n is a, c, g, or t
  misc_feature (82)..(82): n is a, c, g, or t
  misc_feature (99)..(108): n is a, c, g, or t
  misc_feature (210)..(210): n is a, c, g, or t
ccatgccagctggcatcagcaccccaagttccatccattcacactggtgcctttgtnaggtccattttaaaaggctttcaanagccctttttaatgagnnnnnnnnnntagctgttctacaaagaacttaagatacatacattcctatttatcgagatggctagtccagagcaaacattacatcataggccatgggggttgtcacttagntgcatgctaagaatcctcatatgctgctttgaaaacgccataaaaaactaagatgccctcatacacagaaaagaggagttggcccaacagcctgcgagagaagatccttcccaactctgccattcttactgcaggagggtttgtaatgcttccccacttcctcaggtccagcgactgcacctccaccactggagtgggggacacttccattgctgatggaagctgcctactgcttttaaaaacacacacatgagctgagaagttctgctgaaggtggggagagtgctgctcttggctgccagccgggtctagcggccctaacaagggaaactggctgatacaaaatggatcactgcctgagatatatgaactggactgaggatagaagttgcatccgctgggcaaaatgtgccaaagaacagaaagtactttcaatttattcttttaggcaccaagaataaataaatcctaagaaaacttacggtaagcttgacataaccaaactcaggctaaaggagacacaagaggatgaacgccctaagctttcagccaggtttgtcagttttaacacacatctcacccaattctgcaagaagtttacaaacaattcaacttaaaaaacattcagaagtactatcattataccctttccctcaatgccatcttacattttagggataagttttaagccaaactataaggctacctggaatgctgagacaacacacaaattctgctgagtccccgtcacagactacttctgaaggtcacccagtgagggcctaaacaagagtcccacttcttgttagtataataactttttatttgacatctacaagattttggcatcttgcagctttttaccaggtttatacaatctcgatttttcaatagtgcaacctgtggatgc

SEQ ID NO: 359733 - DNA, 704 bp, Homo Sapiens
  misc_feature (20)..(20): n is a, c, g, or t
  misc_feature (53)..(53): n is a, c, g, or t
  misc_feature (58)..(58): n is a, c, g, or t
  misc_feature (68)..(68): n is a, c, g, or t
aaagcaatgtagtggggganggatcaaaaaaattattctaactaagccttcanaagcntttttaagtncaccaatatttaagtttgcctcatctgtaaaggtaaaatttctatattaccaagctccagaggaatatgatattttacaggcacaattttctggcttgtagtccctggggcattcatttgctggcctccatgggatgctgttagaacaattgttagccggcaagagaagaaaggctaccaggacagcatttataattgtagaatgggagccttcttccctctcccctccactttcattttagcatgagataaaaaaatagattggaaatgattgttgcatctcacttcatggaagtaggggcagaagttccctctggatccttttcttgacaagcagtcaagaggaaggtccccatacacatgtacctgtgtgatacttggtagtttctaagaatggtgctacataagcgttgctgttaggctgggatcctattaatgaacgtttgattagttcaggcctcccaatggcaaaggcagacaccgtggagatggacatttactgactccccttctgtgtggcttcggtctccctggctaacaccacacctgtgcgtactgcgctcggcccactttgctgcagaaacgtagcaagcgtttcatgtcagggctacagctgagagcaaaaggtgcaaaaaa

SEQ ID NO: 359734 - DNA, 691 bp, Homo Sapiens
  misc_feature (13)..(13): n is a, c, g, or t
ggaagggaccggnggagtcattgcagggaggagaggggacgcgcgcggggggaggcggcggagggcggaggagactcgcttgcaccccagggccgcgggcacgcagagctgtgttgaaggacatacttttcaggttcctgacagtcactgagctatacgcaataataaagtgcgtgattcgcgtgtggaaaccagtgtcgtgtccttaccagcttccttttctgtccaccttccctctctcttctacctccgtttcgcttttcttcagtgcatgttagcggtttgctggatttcccttctccctcgctgttcaactgctagcatgatttgttacattttccacagctgtttattcttgtttgactttttgtacaaagtcactttaaatctgctgcagaaagaataaagcacctagccctttggatggactcctgcaggcgtgtggctgtccctggcccacttttaattctttggagatggctcttctgtgtaaatcagctgctgggtgcgttcggtcacctcgtaggccagcctagtttgtatcagcagaacagtagtggactcgactcaggtcgtaagccttatatttcacagacaattaaatcttggctgctgttgaacaaaactgtaatatttactttgttctataccgagaagcacttttaaagtaaaagccaaaaaaaagccacac

SEQ ID NO: 359735 - DNA, 1943 bp, Homo Sapiens
  misc_feature (440)..(448): n is a, c, g, or t
  misc_feature (1347)..(1362): n is a, c, g, or t
  misc_feature (1659)..(1659): n is a, c, g, or t
gcctttgggtttttgtttgttattatagaagagatgacttctgctgatttgcttaggaatggttaccttagaagaatttgggtggctcatgttgaatttcacttctgcaatagctttcattttctcataggctttataagagatgggttcagtggtatgagcagaggaagagatcccagatagtagccagttaaccaagactcattcatatagcacgtagtttatgttcctgaggcagcacttttagatccttgtgagcaagttctatttgttcattgcttgccagagatgaacacagaatgttctgtttcattttacaagaactatcctgagtttctgtggatggaaacattacatgtaatgcagatatagtgaacactggaaagatttattaaagaattatatttgtgtatactttataaattagtccctcattagannnnnnnnncttaagcataagactgaacttaaatgtgttaattttagtagaatcaggcactgctcgcagaaggaacacagattgtagagattaacataaattgttcttgttctaatatatatattttttcatttctgtcgtgcttggaaaactagtaaatattatgtctaagataaaatggaatggcccctggatttacttcttataagaagcagtagtatgtaataaagctattagcatgagcaattaagaggctataaagagattatagttacaaaagaaatactgccatatttttaagttaataacttaaaccttctcaaatgggttaaaagttgaatgaattgacaccctgatgttatgatgttggaattttaacttaaactgggaggcattctgtgagccttcactttaccttctttaattattgtccttgctaaactcaacacagacttttctgttatgtgtttttgagggaagttggggtgggaagagtcagggagataagctaaaattgtcttcttttatggggtaattgtactctgtagtctcttggtttcctgtgaagttagtatttatgtgggggtgggggaaggtagcaagaatcatgggtatcacggtactttgtttttgacctcctggctctttcagacagagtgaggcaggaggatcacttgaggccaggatttcaaatccagcctaggtaacactgagacctccatctcgtaaaagacacaaaaactagttagagatgaaattgagctttattttaaaaaaacgttctaaagcctgataattggagagctatacttcagcttttcatcctactttaatgaaacagctagataggaacctctgctccagaattgccagataattattgggtgggtcataactattcctcatannnnnnnnnnnnnnnnctcctttggtttctgtgttatctttcttaacctcacgtatttctttatcctttttagtgggggcctgtaattgaggctaattcaatagcaacaatagacaacatgatatggctgctgtcactttgaaacccaaaaggtctttgggtaggaatagagtaatgaaagaggaccagtcaacttcagtatatatacaaaggaaagacaaagagatgataaaccaaggctgaggaaatttttctgatgctttcttcatttctctaatatacccttttgcattcttttttctgataattgtgnctattaggcagaaagacacaagttaccacgttgtgtaataaaagcagtaggtaggttgtgccaattattttttcaagccagtaagcatatacagttaacttatataattaaaaattggtttaagatagtgattaaaaatacctgaatattatgttaaaagtatacaatcattgtttctgtaatgatgatgggtattctgcttcttgtttttcattgtaattacaggggaagattgtttttgaaaatgtatattgccatgctttttggggtaagccagtaatgtg

SEQ ID NO: 359736 - DNA, 694 bp, Homo Sapiens
  misc_feature (28)..(28): n is a, c, g, or t
  misc_feature (49)..(49): n is a, c, g, or t
  misc_feature (71)..(71): n is a, c, g, or t
  misc_feature (85)..(85): n is a, c, g, or t
  misc_feature (129)..(129): n is a, c, g, or t
  misc_feature (148)..(521): n is a, c, g, or t
tttaaagccacttggatgcagttggaanccattatcctaattgaattanttcagaaacggaaaatcaaatnccacatgttctcanttataagtgggagttaaacagtgggtacatgtggacacaggatnccaaagtgagaaggttggnnnnnnnnnnnnnnnnnnnnnnnnnnnnnnnnnnnnnnnnnnnnnnnnnnnnnnnnnnnnnnnnnnnnnnnnnnnnnnnnnnnnnnnnnnnnnnnnnnnnnnnnnnnnnnnnnnnnnnnnnnnnnnnnnnnnnnnnnnnnnnnnnnnnnnnnnnnnnnnnnnnnnnnnnnnnnnnnnnnnnnnnnnnnnnnnnnnnnnnnnnnnnnnnnnnnnnnnnnnnnnnnnnnnnnnnnnnnnnnnnnnnnnnnnnnnnnnnnnnnnnnnnnnnnnnnnnnnnnnnnnnnnnnnnnnnnnnnnnnnnnnnnnnnnnnnnnnnnnnnnnnnnnnnnnnnnnnnnnnnnnnnnnnnnnnnnnnnnnnnnnnnnnnnnnnnnngatgggaaggacatgagggttgacaaaatatgtattgggtacaatgttcactgtttgagtgatgggtccactaaaagcccaaacttcaccattatgcaatgtaccatatatacgcaaagtaacaaacctgtacatgtaccccttcaatctgaaataaaaattgtttttttttt

SEQ ID NO: 359737 - DNA, 702 bp, Homo Sapiens
  misc_feature (19)..(19): n is a, c, g, or t
  misc_feature (96)..(96): n is a, c, g, or t
  misc_feature (497)..(623): n is a, c, g, or t
taaatgcaaaatcctaaantagagtcatgcttgccttgagttactaagcaagtagatgtggttagagcacagtaaggaggaaaacagtagaagtantaattaggaccaggataatataagatcttgaagccaccataaggacttcagttttgctttaggtccgacagggagccacttagaatgttgatgagaagagcggcatgatttaacttatgtttctaaggatcactttgaatgctgtatagctatagggctgtaggaagtgaaagcaggaagactggttagaaagctagcaaaatcaactacaaagggagataggtcatgccagagatgctgatagctcggatcagggtggtaatagcagcaagggtggtggtaagcagtagtcagatctggagtatatttttacggcacaagctatggggaccagaagaaaatgaaagaatgaattcaacaaagaagcccaataatggggtagggcaggtggtaaactgtcnnnnnnnnnnnnnnnnnnnnnnnnnnnnnnnnnnnnnnnnnnnnnnnnnnnnnnnnnnnnnnnnnnnnnnnnnnnnnnnnnnnnnnnnnnnnnnnnnnnnnnnnnnnnnnnnnnnnnnnnnnnnnnnattagaggcggtaaggaaatagaaaggcctccacaaattgagaaaatacaaaaataccagtagccaacgtgctcgagat

SEQ ID NO: 359738 - DNA, 669 bp, Homo Sapiens
  misc_feature (34)..(34): n is a, c, g, or t
  misc_feature (36)..(36): n is a, c, g, or t
  misc_feature (108)..(140): n is a, c, g, or t
gacagttgggtccttattgagagccaacacatgntnattgccagctcttgtccttgagtaattggaagtttctccttgaagccttgtgagatggctcttgtggttggnnnnnnnnnnnnnnnnnnnnnnnnnnnnnnnnnacacggcttggcttggcttcacacacatagccgactcaggagagggatgcccatgggggaacatgtgactctcagcattggaaggacagagctaggatgatggctttccggtggcactcgttcaggtttttgcccaagtctcagcttggccaaggcctgtcactgactggtttaccaaagtcgatgtgaggaggaggctttatacctgaggggatgatgttaacttcagacaagatggagctgctcacttttgccgggtttggtggccacttcacccccaaccctgtctcacccccattatccctcctcaattggaggctggacagagctgaataggaaagacttgctattgcctaaggctatgtgtgacaccctcctgaggacctccccaccccagtgtaatggcccttcatggcagggacagaaaggtggactgggggccatttgcttcctgtggccttcagcagaccaggccctgtccctacctggagcctcacctccaaggaaattcatgttctccttaatggaa

SEQ ID NO: 359739 - DNA, 875 bp, Homo Sapiens
  misc_feature (606)..(606): n is a, c, g, or t
ggcctccctgatacttaactaggacctagggcagttgagaggcagatcatcatgcctctactttcttagcagagacaaggaagactggggctgtttgataatgaggaaggggaaaatgggacaaaatactcctctttcaaatgaacactgtggagaaaatctttctgggtttggggaagtcagagtaaagacttaggggagtaataaagccagagaccccccttcttttcctttccctgccttggatctaaggcaagtgagccaaatttggaagagggagtaggaatttaagcttaaggctgcttaatgtcttcctgggggctggtgttttgggaaggcagacaaagagaaacaggtcaacctcaaagctggtctgctcatcctcttagaagaggtctggtatctgtggagtagagccaagagaggcaccacagagagcacagtctcccaaacagaagtaataaccggctcatattttatcagcagttttcaaaagcaatgttgtccggggttggagaaatgccatatcctcccccccttccccaaaactactgctgcgaactttccttcaacccttgtacataaattaatggctctcctcctaangggagataaattctgagaattcaaattttccctctcaaccccaataggctacccagcttcagtgagggggaaggagagctatgcaaagggcccctcacttgaggcagctagactgtccttatttccttggtacctgatctccaaaactcttgatctgatcccaaggtccaaaaggcatcagggtacttacactgaaaacttcaagcaagtagcaccagggctccccctaagcataacaggggcctgattagcaccccagaagaaccccc

SEQ ID NO: 359740 - DNA, 985 bp, Homo Sapiens
ggggtggaggaagagggggaagttggcgcatgcgcctaaagctgacgggtttgaaatggcttcgatgttagccgggacccgactcaggtgaagatcgatgctatagaagacaaacaagggaaggttttttttccttttgcatcatggctcaatttggaggacagaagaatccgccatgggctactcagtttacagccactgcagtatcacagccagctgcactgggtgttcaacagccatcactccttggagcatctcctaccatttatacacagcaaactgcattggcagcagcaggccttaccacacaaactccagcaaactatcagttaacacaaactgctgcattgcagcaacaagccgcagctgcagcagctgcattacaacagcaatattcacaacctcagcaggccctgtatagtgtgcaacaacagttacagcaaccccagcaaaccctcttaacacagccagctgttgcactgcctacaagccttaacctgtctactcctcagccaacaagcacaaataactgtatcatatccaacaccaaggtccagtcaacagcaaacccagcctcagaagcagcgtgttttcacaggggtggttacaaaactacatgatacatttggatttgtggatgaagatgtattctttcagcttagtgctgtcaaagggaaaaccccccaagtaggtgacagaagtattggttgaagctacttataatcctaatatgccttttaaatggaatgcacagagaattcaaacactaccaaatcagaatcagtcgcaaacccagccattactgaagactcctcctgccgtacttcagccaattgcaccacagacaacatttggtgttcagactcagccccagccccagtcactgctgcaggcacagatttcagcagcttctattacaccactattgcagactcaaccacagcccttattacagcagcctcagcaaaaagctggtttattgcag

SEQ ID NO: 359741 - DNA, 686 bp, Homo Sapiens
  misc_feature (34)..(34): n is a, c, g, or t
  misc_feature (55)..(55): n is a, c, g, or t
  misc_feature (65)..(65): n is a, c, g, or t
  misc_feature (77)..(77): n is a, c, g, or t
  misc_feature (104)..(104): n is a, c, g, or t
  misc_feature (109)..(109): n is a, c, g, or t
  misc_feature (112)..(112): n is a, c, g, or t
  misc_feature (157)..(157): n is a, c, g, or t
  misc_feature (240)..(240): n is a, c, g, or t
ttgtgtttccttccttcacctcaatttccttttnaacccattgttccttgattgnttttactccngtggaagcacgnttcacaaagttaaggattttcttgtgnttaanccnttgtcatgttttcgggttcatggacacaagggacacattttcatnctttttctcacagggttttgcggctccggttcacttttgtgtctttaacactcctttcacagagacacttgctcccctttctntcgttcttggcatccccttaggaacttgcacacccaggtctctcgacttctggacctgcttcttaccatgccgtcttaagcagtcaggagtcgctgcctgggttcgagtcctagttaaattacttagtgctgagaccttggggtaggtaaacttttccaagccaggtttatctcagtttcaaaatagggttaatcgtctttatctggcaggtcaggtgggatgtctcacaggtaagcaccagatgccatttgaaaggcttgaagcaaagtcaataaagcattcatgggaaaatacaactggaggcaccactagattttcgtatacattaggttcccacggggaggaccgaagagagaagaaagaagtggaaagggaggagcgtgcaggagagacaggagaagagaataactaaacaaagacattaagacaggccaaaaaaagccca

SEQ ID NO: 359742 - DNA, 880 bp, Homo Sapiens
  misc_feature (76)..(76): n is a, c, g, or t
  misc_feature (78)..(78): n is a, c, g, or t
  misc_feature (106)..(106): n is a, c, g, or t
  misc_feature (112)..(112): n is a, c, g, or t
  misc_feature (115)..(115): n is a, c, g, or t
  misc_feature (127)..(127): n is a, c, g, or t
  misc_feature (161)..(161): n is a, c, g, or t
  misc_feature (188)..(188): n is a, c, g, or t
tggggttcccatggactggggccaatcttggttcaggcatttcgctgttgtgtgccttcagttaagttgcttaacntntttggcctcagcttcctccattgtaaantgggantgntaacagtatatntgctaaagtgggcatgaggcatcgcggaggggangacgggtaaagcacttcgccccagtgnttgggagtggcgagcacgccataaaaggtagctttgattattgtgtaaagcagcaaggacccagtcttgttcatgctggaaatgagtcgagattgcaggctttttaactgcctttaccagatagcagggctctcagtaaatactatataacaatctgccagcaaagcttggggtcacagtggtgacctgacaaatctgttaaacatcgtgaaccagactggaaaggaacatttcacatcatctgcttccgagcaggactgcccctccaccatccacaagtcaagtctcttctgagatggaattctacaactggcacattgtagatgctcaatcaatatatgctaaatgaatgaatgagaatttaaaaaataaactttcagcttaagctttaaaatgacactttgacatcaatttcctcccctcatggaacttccagtcagctccatgggactaagaagagtgtctagctggtcccccaaacccttaaccaacttctgaccttcagaaaagaaatgggtattgacacagaagagcaaaatctgtgttctggtcaatgcaacttgtaatatcaggtggacactcaaaaagtccacaatggtgagccactgtccctaaaagatacttgtgtaggaggtgggtgggtgaggactcctctaatgccccagggagggagagtgatattttatcactga

SEQ ID NO: 359743 - DNA, 460 bp, Homo Sapiens
  misc_feature (17)..(17): n is a, c, g, or t
  misc_feature (27)..(27): n is a, c, g, or t
  misc_feature (86)..(86): n is a, c, g, or t
  misc_feature (280)..(280): n is a, c, g, or t
gttggtttcgttgtggnattttaaaanactcaagcccctaaaccctgtgttcccggtttcctaataaggcccccggggaaaggtgncaaggaaatttgccaaaatagggccctgtaatgaacttatttccctaggacacgggaagcttttcttacctcctttctaccctcttctccaacctgaactcccaagtttcttctcctgaaggtctttgcactataagcgccaaggagcccgtgtgcgtggcaggggcggctgggagggtatctggagaaccttnagttgagcctcggcctagccagagaggcaataagcttggggacgttccgttctgggttctgacgttgttggttctgacgtcgttgtgctcttttgtaagaggaatttcataccttggagacgctttgtacatatttgtaatgactttattaaaaaactgattgtgcacttctaaaaaaaa

SEQ ID NO: 359744 - DNA, 1086 bp, Homo Sapiens
ggcctgggtggcgaattcggcacgaggccttctcgtgcaccacatccaagtccacccaccgtggacgcagtgatgactaaatgctggccttgaagagaaaccctcagccagcttgtctgttgtccaggtccctcagtgtctctggtttccctgccctgcataatttaagcattagtgccaaatacatctgtcatattcctctccctggagactgcgaaatgtccagactttttcagactagtggagggaaggaatgttacataactaagtggaggcctggaactgtcaggatttgacagggctggaccagagacccttccgcctctgcctagtgtgtctgtcaggcaggcagcagccatcaatccaagaatgagccatggcggcaagcactgtgtggagaaaggaacccagccgaggtctgagtttcagacagaaactggggagttgggacatcttctctgtgccaggcttcattgacaccatcgctccccacagcagctccttggggcagggggctcacctgtgcagccacccttactcacagtagcatcccattcttcacactgcaaccccccagcactgtggacccttccagggaggtgacaggagccagcagacacatgacattcccagaaagccccatcttatccagacaggcttccctccatacttctttccacagttttaccctcagaaaaatgttggctgcagtcttcccttccttcacctccaccctggggaagggtcagtaaccaatgccgagggtcggggaaggaggaggcacaggcaagacagggactcagcgcagtgctcccgccatcatcggggacaggtgccagggtcagctgcagctctccttccgggagcagggtgtggtggccctggatggtcccagggagcagagggaggcaggcagctgtcacagccacagcggctctgaatggcttgagcttttagtatgtgttcaagtgcaggatactacaaactggtaaagacttccaccatgtgaagaatgtatgtaaattaaagtttattgtaatgaaggtttttactttttgcaattaaaagtgttggttgataagaaaa

SEQ ID NO: 359745 - DNA, 714 bp, Homo Sapiens
gctattgaacggggattattttccccatggcacaaggggaaacactcttggataaccttcaacaatgaggctttgctaagtggccagacttgggatttgatcttcctcacttgttatttattaagtttaagccttattcagtatctctaattgcaatagatatagttcctgtgacttctaaaaaaattcctgttaatgctgagacagtatcttttttgtcagtttattaatttttggtcaagatttagcctgagtcttaaagcatttatttgtggaatgccccactgaagtgtcttctccattggctaagtacatgtttaaagccatgggttttaatgtaagatactttcagtatctaattctgtttcccccactgagggtgctaaagagaattagaatctttactaagacatgctcaggaaagcttcacgagagaacagcttcaaaatcctccctatgacactgaatggtagtgaggaaagaattcttggggatgccagttacatacaatagccttattactgctaatcactgtcaataaaaggtcacttcattcacctctatttgaggaaaacaatgagaatgtatctgatgaactagaatccttgtcagtattgggaaattttaatgttgcaatatctagtcaaactttgagtgtactggttctgtgaaccacctgaaaaaacaaattaaatgtattaaaccataaaaaaa

SEQ ID NO: 359746 - DNA, 669 bp, Homo Sapiens
  misc_feature (34)..(34): n is a, c, g, or t
  misc_feature (37)..(37): n is a, c, g, or t
  misc_feature (64)..(64): n is a, c, g, or t
  misc_feature (93)..(93): n is a, c, g, or t
  misc_feature (116)..(116): n is a, c, g, or t
  misc_feature (128)..(128): n is a, c, g, or t
  misc_feature (142)..(142): n is a, c, g, or t
  misc_feature (208)..(208): n is a, c, g, or t
  misc_feature (245)..(245): n is a, c, g, or t
  misc_feature (365)..(365): n is a, c, g, or t
ccagggttgggagagttgcccaaaggatttcccntantactttagggtattgaaaactcaaagnatcagctacagctttatctaagtatttantaaatgctacatgagggtgtccntgcccagctttntggcacatgagtcntgtgtggagagttacctcttcttccagggactgtgcttgttgggaactttgggcaagtcacttacntctttgtgcctcaatttctgtataatatttcttaagntacctcactgaggtggtatgaggattcactaatgtatgtagcgtgtttgtcaatcctcccagtgaaaagcactatttagatcacattttggatcacattagcccaaatgcagtaaatggnccaaattagatgtgtgctgaagacaatcagtcactgggtctatattaaacagcaaccagagcaacaaatggcaaacaatttctattttcaagtttgctttgccatatttttttggtggcaaaaccatttataaacttttttttctaacactagtgtctacagcagcattcaaaaaaattctgttaccttttctgtattaggatttaaagtctatttcttattgtatacctgattgaagctgttcttggagatgaatgttttaaatgtctatatccaaaaaataaacattttgatgtaaaaggcc

SEQ ID NO: 359747 - DNA, 1765 bp, Homo Sapiens
  misc_feature (1670)..(1670): n is a, c, g, or t
  misc_feature (1738)..(1738): n is a, c, g, or t
gggcgaggcctgggtggcgaattcggcacgagggtgagttgctgtgaggactgagcaggaaatgggcggaaatggttcagcacagtgagtgctcagtgatgcggttgtcattgataatccatctggaagggattgcttgtcagtttcaggagactcagagaccactccctcctccaggaagtcttccaggctttaagtcttgggtgggaactcaaactgtgggtgagttgaattggattttcctttccacaaggtgtctgtccccctgtgactctcactgcctgtctctcatcatgggcagggactaggctgaattcctctctgcatcctaggactctgctcagaccctgtcacaaagtcggttttgggagctgttagataaatgaatgaatgaatgttttgaggactcagcactgagcattcctggacacgataccattgttctgagagccagaggttgtcttgggctccccttcctgggggccagtgcttcattcaccacccaaatccttgccacagtccctccctctcctaggactggggagcatgtggccacagccacccatcgttagctgggttctatcagctccaccacatcataagttggatgtgcctggcaagactgcatcataagagaggatggccacctgagatggaacaccaggaggactagcaggcatgagcaggtgtccttgaaccctgcctcattcaccattgcggctccagtgtccctcagctcacatctagggacacatgtaagctcggtagggccagacgccagagaagaaaaaagctggagcatggcttatggatggggagcacaacctgagggggatagctgctgaaccacaggcttccctcagggatgacctttgaaagaaacacaaatacttctggatggggcagagcttcaggcaatgcacctggccctccgctgtgtgtgggaagaggagcagcctgaggtcaaaacaccggggctgagaggcagcagtgaatggcttggccagctcatcaggggcccggaaggagaaagatgagggacaagaggcctggagcagaggttgatggatgggcgtacaggagggggaaattaagaggaaggtctttgggctccttccaggaaccatctgccaacaaaacacgccctgaacaatcaggtaagacaggggggcccagccagttggtcgtcggcacggacccgcgaggtccatgacaacgaggacccaccatggctcgacggacgagggcaacgcgggcgccgtcgggccggtgcgcttccaccgtcccgaccctccccgccgcgaccaccgccccttgacaatcggcggtcctgtcgcgaccaccccccgctgtacacgccccctgtagaattggtttttaccgggaccccgcatgatgcaaccctgtcgggcattacacgcacaatccccagcagcccgctcatcccacccaaatacccccgactatgccactacgcctgcttaccgatccccacgtgcgacaccgccgacgccagatcctacaacctcgaccgatcacgacaggcgggaccaggccctcgtatatcaatgaacatcgcgcttgagaacatgccgtccgaaacccaccgctacgatggacccatgagagcccgttcagcggaaatgtaaccgcgcccgaacccccgcgcncattcccaccgctataccccaatgcgccatcagcacgcatcacatgaaaccgctcgcgacgctaccangcagcagcttacgacgtatgacactaa

SEQ ID NO: 359748 - DNA, 404 bp, Homo Sapiens
  misc_feature (323)..(334): n is a, c, g, or t
aagttttctaagcaatatttttcaagccagaagtcctctaagtcttgccagtacaaggtagtcttgtgaagaaaagttgaatactgttttgttttcatctcaaggggttccctgggtcttgaactactttaataataactaaaaaaccacttctgattttccttcagtgatgtgcttttggtgaaagaattaatgaactccagtacctgaaagtgaaagatttgattttgtttccatcttctgtaatcttccaaagaattatatctttgtaaatctctcaatactcaatctactgtaagtacccagggaggctaatttctttnnnnnnnnnnnntctatccatctacttctctcttacctgatttatgtgttagaataaattcatgaaattcgattccaagcat

SEQ ID NO: 359749 - DNA, 667 bp, Homo Sapiens
  misc_feature (498)..(498): n is a, c, g, or t
  misc_feature (549)..(549): n is a, c, g, or t
  misc_feature (615)..(615): n is a, c, g, or t
  misc_feature (638)..(638): n is a, c, g, or t
tctcgttcacgtgggccctactgggagacagatgcacacacaggtctgtgcacacacatacatacgcatgcacaggcacctgtgtacacacatgcagatacacccacagcatcccatctgtgccacacacagacgtaggtacatggagacagatgcacacacaggtctgtgcacacacatacatacacatgcacaggcacctatgtacacacatacagatacacccacagcatcccatctgtgccacacacagacataggtacatgaagacagatgcacacacaggtctatgcacacacgtatgcatgcacaggcacctgtgtacacacacgtacagatgcacccacaggatcccatctgtgccacacacagacatacgtacatggagacagatgcacacacaggtctatgcacacatgtacacatgcacaggcacctgtgtacacacatgcagatgcacccgcagtatcccatctgtgccacacacagacatacgtncatggagacaagtgcacatacaggtctatgcacacatgttcacatgcacangcacctgtgcacacatatgcagatgcacccgcagtatcccatctgtgccacacacaagcatacgtncatggagacaagtgttcacacangtctatgcacacatgttcacatgcacaag

SEQ ID NO: 359750 - DNA, 771 bp, Homo Sapiens
cgaaaagcagagcccaggagtagcagagagaaaacatctcctaatttacctccatgcagtaagcacgcactagcaagggctcaaagtctctctagaaatagcagcaaaatacacaaggggactgcgcacccccagagccctggaagcccctgatccccatttggctgagaagacgtggagacaaggtgaggtaatgagactcccccaaggccctgagtgagccggtgacagggccactcatgccaccccagagtcaggtctttgtcatgacccttgccatgacccttcaaacattgctgatttacttttattttgggggaagtgcattctactttacagggaaaaacctttagaacagagagttctaagcagacactgatgactgtgagagaaacaaccagaaaaaaacctcctgtgtcaatggtatccctcccttcagatcccaccctaactcaggattttagggccgtccacagaagtcctcagaaaactaagggctacatcattgcatttgtttaatctcaatctccctcccctttattttcagttttcacttttatttgtacatttttacagatagtcttgaatagcaaaacagtcacaccatgggtggaaatggggaaggagtatgagagtgagttcatgaaagctcttcacaggaaaggcttcgtcacgctcacaacacagacgcactggtacagacggagagggtctatgggtgacccggaaaggaaaggaaaagctcagcccagtgggaggaatggggttttg

SEQ ID NO: 359751 - DNA, 1057 bp, Homo Sapiens
gttagaaggcaatactttattttgaaataaaatacaaatgtgcaaaggaaattagctcctcctgccccccctttgaacaatgagtcaatagaatgtgagactgggtagattagcagataataggcaaaggtctagcttttcagtggcaacttgaagaaaccaaagatgaatgatgctaaaggaatgaccctttggtacctgttttaaagtacttctggcccccttcttttataaacccccaggagcccagcaccacaccttgttaccctacaatgatcactcacgctccacgatgtcactaatgtaataactgaagatatgggccagtttgtccatgtcacgttccgacttgtaggtcagggtgaacctgtccattaatgctgtaaaccctgaccaacaaagcagaaattacgatgttaactccaaatcctaaactttttggcccctttctccccacacatcaggccagtgtaaaggaaacagatcccttcaagctgagtaattcctttatccattaacatggtgtaacttagaaactactaagggccaagttggttgctgctgccactgggaatccaaaggaccaccctctctgcttccaagagctggagatggtgcccttttcatctggagccagctctttcccctactctcttaggctgcctagctatgggaaacaataggatccctcctcatgtctggctagagaaccactcacacagtgaggacaggcacctggtattacccatcttcatatccctgacacagagtaagtatttgttaaatgaacgactcgcggagtggctgctagatagctacggccagaacaacggcgggcatatacttatgacgccaagaacgaattaactgaacgaataaaataattgaaacagaacgcttaatagaaaatgctcggggttgggaaaaacgggttcaaagcccggggcgtggtcctgtaaaaatcctttcctctgagtttcaatttcatcatctttggggtgagctcaaggactgagccggttcatcccaaaagatgtcctcccacgctaaaacgaag

SEQ ID NO: 359752 - DNA, 754 bp, Homo Sapiens
  misc_feature (609)..(609): n is a, c, g, or t
agtcataagtgctctttgagggaatatattaagggctaaacttaattcagcacagtaaagtgttgaactgaatcagcatgttaagcacagtaatgggaacatcagttctgtaaccaatgaacaaaatggtaaaacacatgtcagttttggagtttagcttgaacaaaaaacatgtggtacaggaaaacacatcaggtggttgtcccatagtggactcaatagaaaaagagcacggagtacataatggacattgtcaagtgttgttaaactagtttgatttgagattttaaggaccctcaagttccatgttaaaaagttttgacttattctcatggttaaaggggatctaagtcttgggcaaatttatgagagaaggtgaaagtctctaagagcagagggatgcacaagaatgttatcttaagcacagaggaccagaagtgttgaataactttggtctggacaatgggacaaggaagagatttaagtaatatctcctgttaacaacctccggtagcatatccctaagggtgcaaatgggcttacaaaccctccctttaaaatttatcccgaatgggttggtgagcataataataaatggtaacaaccaantaaattccaatggcacataaataattaccaatcctcacaacaatgctgcaagccagtctcatatctcctttacacattaggacacagttgctcagagaagttaagaaacatgtcccaagtttcccaaaagcatgactgcaacctg

SEQ ID NO: 359753 - DNA, 1059 bp, Homo Sapiens
  misc_feature (23)..(23): n is a, c, g, or t
  misc_feature (644)..(644): n is a, c, g, or t
atctatgccagctctctggcatnctggggttcctgactgataccagcagttgaaggaagagagtgcatggccctggtgtgtaacgacacaatcagcacaactggagagaggcattaaagaaccagggaaggtagtttgatttttcattgaattctacaagctaatattgttccacgtatgtagtcttagaccaatagctgtaactatcagctgcaataccatggtgaccagctgttacaaaagattttttcctgttttatctgaaacatactggatttatatatgtataagcgcctcaatggggaattagagccagatgttatgatttgtttgctctttttcttttatagttataggcaaaaatatgggataatttctagtgaatgcataaattaggttgcgtttcttattttgctttaaatctctggtagtttttccacccctgtgacacaatcctaatagacagtgtcctgtaaatggacacaacacaataaagtcaagttattattgctgttactctggatgatatggaaaacactgccatattttaaatcaactactccacgtgtttttccatccaatcacactgctgtgattcagggatctttcttctaaaacggacacatttgaacctcaggttcatncacaaacctggtacctgttggcttcccagaggattggagaagtgtagttaatcacacctcttagtttaatctgaaatcttgacccagttatttaacaaataaatacctcattgattatatttaaaagtaatacacttcctgtaaacaaatggggacaatgcatccaaaaaatctttttaaacagattacacaaaaattatttccagaaaggctaccatttatcatcattatatttcaagcctcttatacttaataagcactttctaaaaagtcttgagatcccaccattctgaggaattcaatatgatcactttttccttctttgcctgggagaggttaagaggaggtttcgaaggtatagatgctattgttctgatggcccggctgaataaaatggaaattctagtttgttaac

SEQ ID NO: 359754 - DNA, 841 bp, Homo Sapiens
  misc_feature (506)..(506): n is a, c, g, or t
  misc_feature (798)..(798): n is a, c, g, or t
atcctcgagcacgttggcctactggctttccttattttccccaaggtagtattttcgtgagtattattaaagttatattcatgttttggacactctctagtctaggagtcagaaaccaggggtctttggacactgtgttctattctgcaggcaggagtacccactggaggttttacaactttgacctgcctgccatcaagcagaagtaggaattttgcaggtctgaaggtatagtgcaggccctccaggaacatatgtcaggtacctctgtgctttttccaaagtggaaattccagttctggacacactgaccctttcaaacgtttaccaagctaatgggcaagcctcaaggccaactgagaaaggggctgcgagtggtaatataaacaccaaagttctctaaaatacacaagacctgtaggctatgtgtcttctgtacttcaggtgtgtagtctatttctgacaggttgtgttagtgaattttaagaatggagaggagaatttanggtttgctttttctttgaaagcaaaaataaatgttcatattcctctgatacagtaaaaacccttgaaatgccctaatttagaataacacctgattaattaagagttaaaagtctaaagaaagtttattaaggcgtgcatggccttgggataacaatgaaaccatttgtctactggcatccgtctgctggtttcttgacaccagtgtaatatagaattgtgacgtaaagaaccacaaaatataagagggtttcgtttcattggttttgttttgttctaaggaatgcagtcttncagtcattatcttttatttacctgagtaaaataaatcagttcc

SEQ ID NO: 359755 - DNA, 682 bp, Homo Sapiens
  misc_feature (19)..(19): n is a, c, g, or t
  misc_feature (652)..(652): n is a, c, g, or t
ggatctcgagcactgtggngcctactggtgttggcctactggatatctgtagtctacactatttggaactccaaattactcaacccttagtatattcacagtctttcatgggtttaatcttatattttacaatacagagtcagttgaagagttctttgggttccaagtcaactttaaaacacttagtaaaataatgagacattgaaaaattatttaaaaagtaagagctaaagaagggcaggttaattttcaaactgtaattttaaaataaacattttgctgaaaactattaaaatagccatgatatgtagctctcttccaaaatcccagcggttttattaaccctattactcagtgattcaattgggactcttgaatacatgattgaagcaactccaaacaggttaacagtctagaagtgttattgaatgtatttttctaacgtaaattaaatgttatttttttcttactgaaacacaccacctacttctttctagaggaagaacaattcacatgtaaatatggattttccatgagatgcaacattaacatatttttaaatcacataatttttaagggttaataagaattatttcaggacttctgaaaataattaatggggaacctaagtagaatattttatcaaataacntgttgagggatggcagataacgttttctgg

SEQ ID NO: 359756 - DNA, 1643 bp, Homo Sapiens
  misc_feature (13)..(13): n is a, c, g, or t
  misc_feature (82)..(82): n is a, c, g, or t
gttttcttttggncaggcgttgtttgtgatggatgatttggtgtggaatctggattgttgtctcttgctgtcatctgcatangaagtgccatctgttttcgctcagagagtggataaccaaaaggaatgctaattggtgtggatttcttatttccagcttccttttttgtcttcttcttttctggaccttctttctctgagtatgtcctgtaagaagatataagtctctccccccaattttcacttgtatgtcctgaatctgaatctgtgtctgaatctcgttcttcatttcttgatgggctaatagtaaaaggaagtttacgtttcatggatgatttctctttcatctccttgctcacatcacttcgttcaatttttggagttttgctgtaggatgcaatcttgtctttactctttcttccatatggtttctctaccatattgctgtcactgtcagaattttcactctgaattggttctgtgaacccagatttgggcattttacagctgttcagctagcttcttcttttatcagtcttctcatcctggatccgaggcaaggccggcgcaggaggcttcacccccggaacgagtgcttcggcgtagccgtcgctgtcgttgtcttcgtcgccgctgcagccgcctgtaaagccgccggagcccgggcttgaaaacatctccggtctcggtccgtctctcaccacagcctcctcgctcccaggacagcgtcgccccgcgattggctgcgacgcgagcacgtgacacccgcggacacgtgactaccgcgggcacgggacgggcggcgtgaccgccccggcccccggcgcccgaccctcctgctgctcagccaggctccgcgagccgcagggcggggaagcgggacgtaccaagcggcaggcggcggaggggtgcgggccggaactccgcccttcgtgctggtcggtctccacgccccactcggactagtgtcaccgcctccccgccgcagacactatccgacaaaggagggggaatcaaaggctgggcgaagaggcagggcaggcgccggtgacgctgctgggcaagcgggctctgcagtagcatttgtggcgaccgtggcagtggctgtgactggaagcttctggaaatggcggcgatgaggacccccacatagggatggccatagcagccacaaaaggaagcaaacaagaacaagtcctgatggagcaatttatgaagacaggcagcatagagggagaagaacctgtctgtcaaccccacacacgctttcccagacgtctcctgaaagctgagcatttgttatcttaaagcctcttaccagtttggatagatatggatcttccaaaattaatgagctccttaatatcgacactgtttatcaacataaaggatcaatttaggaagattataaaaactgaagtttccggaacaataaatgggagaattaatcttctgaatcaaggacgtatccctgaatctggggagctctctatcaaaatatacatgctggaaccctaccaaaggaataataaatctggaatgaggctctgactgtctaattaggaaaagactccttcctggaattctgcacatctccctacaccttagtgacggttaaataaattattattaagcttctggaa

SEQ ID NO: 359757 - DNA, 549 bp, Homo Sapiens
  misc_feature (26)..(26): n is a, c, g, or t
  misc_feature (37)..(37): n is a, c, g, or t
cagtggctcttgatgttgcatggggnttgaggctcanccttgaggaggttcgtagctgccactttggtccttttggaatctttgctcatgagagtttccccgttggcccgcagccaccatgttgagaaatgaggtcatgtggagaggccacatggagttttcttggtctagagcacaattgagctcccagaaaacagccagcatcaatggctgggcatgttaacccagctggcatggacattccagacccagtctgtccttttgtcaccttagctacagggaaggcccatgaccccagaagtgcccatcattatgctgaattcccgagccctcagtggtccaccgaggtgtggaagcatgtctcacaagggtcagatggagttctggcctggattgatgtgtagaagctggagagagaagctgggtttctttcagctggggtggctctgctgggatgtggtgggccttgggtttccaggtggtcattttccttatttgcagtagaaggaatgaggcccatatagagaatagagcaaattaaagggagag

SEQ ID NO: 359758 - DNA, 1020 bp, Homo Sapiens
  misc_feature (38)..(38): n is a, c, g, or t
  misc_feature (71)..(71): n is a, c, g, or t
  misc_feature (73)..(73): n is a, c, g, or t
  misc_feature (108)..(108): n is a, c, g, or t
  misc_feature (127)..(127): n is a, c, g, or t
  misc_feature (249)..(283): n is a, c, g, or t
  misc_feature (289)..(332): n is a, c, g, or t
  misc_feature (600)..(627): n is a, c, g, or t
ccttggggaaaacttttaaacgttacatcaaaacccangaggccgggttgagcaccagtgagttctttgcntntactctgaccttagacaacttggggagggaccttntgcccgcaaaccggacacntaggacaaagtttatctataacttggaagaccatgagtggtgtgaaaacatggagtccgttttatagtgactaaaggagggctgaactctgtattagtaatccaagggtcatttttttcttnnnnnnnnnnnnnnnnnnnnnnnnnnnnnnnnnnntcagtnnnnnnnnnnnnnnnnnnnnnnnnnnnnnnnnnnnnnnnnnnnncgactttgtcctttttctcagcatcagagccagacaggattcagaataaggagagaatgacatcgtgcggcagggtcctggaggccactcgcgcggctgggccacagagtctactttgaaggcacctcatggttttcaggatgctgacagctgcaagcaacaggcactgccaaattcagggaacagtggtggccagcttggaggatggacatttctggatacacatacacatacaaaacagaaaacattttttaaaagaagtttcctnnnnnnnnnnnnnnnnnnnnnnnnnnnntggcggcgggcgcacaagtcggaggggtggaagcacccactcctctctctgactttcgcaatatgggtcactgtgtagacgactcacccagtctgcatgtggttcaaggccccagagttctctcagtgatgctaatgggtgatccgtgctggagtttgtaattggcacctctcaccagctccatttccatgttcaagactgagggcctgagggggagccaggtggggggccagcacctcccagtggcgggcatccaccttcccccagccccacagagtgacctcaggaagcagtaggcctcgcctggctatgactgacccggctcagagctggtgagacccaacgcagtccaagtcatttgcttacatttgccaaaaacattttgccattttt

SEQ ID NO: 359759 - DNA, 684 bp, Homo Sapiens
  misc_feature (19)..(19): n is a, c, g, or t
  misc_feature (26)..(26): n is a, c, g, or t
  misc_feature (34)..(34): n is a, c, g, or t
  misc_feature (48)..(48): n is a, c, g, or t
  misc_feature (93)..(93): n is a, c, g, or t
  misc_feature (565)..(565): n is a, c, g, or t
  misc_feature (583)..(583): n is a, c, g, or t
aaggccccggtggataccnaaatgtnaaaatgtnaaagccaggtaaanggccacacttccattttatggtaataatttaagtaatttgccagnggtatgtgttttaatatttttgcctaccctacacattaggcaaaaaaaagatgtaaataatttgggagaaaaagagggaagaacagtgtaaaataaaactttcctataaggtacccccatttcaatgtgttcaacatcatccctaaaaggcaagattttccccacgcaggtgacaaggtggtttatgtactatttaagggcggaaggtgcgtgcccgttcaataagcatgttttttgccaggtaggaaatatgttccatatctttacttatcattgcatttcagatgggaactagaaaaactggagagaaaaatgtaatgaaactgctgctgtaaattattccttttagcatgtattcacttgctaaatacacatttcttcaaaatatttgaattcagatgtctttactgttccctataacatatggtgttaaggaacataagctcataaaatgttgagaaccggagtcagnctgctacataattagctnacagatttcttcattgtagtcatctgtaaactgggttctatatttatggtgatgatgtgaatttttatgccctttaaattaagtattgttctttttaatgt

SEQ ID NO: 359760 - DNA, 1028 bp, Homo Sapiens
  misc_feature (821)..(821): n is a, c, g, or t
  misc_feature (848)..(848): n is a, c, g, or t
  misc_feature (875)..(875): n is a, c, g, or t
  misc_feature (887)..(887): n is a, c, g, or t
  misc_feature (934)..(934): n is a, c, g, or t
  misc_feature (983)..(983): n is a, c, g, or t
  misc_feature (990)..(990): n is a, c, g, or t
  misc_feature (995)..(995): n is a, c, g, or t
  misc_feature (1001)..(1001): n is a, c, g, or t
tgtaaatccagtatgactggtatccttaaaggaagagggaaatttggacacagatacacagaggaaaaaacctgaagtgatgaaggcagagagtggaatgatgccactcaagcccaggaatgcccagtgttgccagcaagcacctgaaacgagataagaaaagattctccctcacagccttcagagagaacatggccctgccagcaccttgatttcagacttaagacttccagaactgtgagagaatatgtttctgttgctgtcatcacccaagtttgtggcactttgttatggcagcccccagaaactaatacaatgagggagtgagtaggaaagaacatcagaatcagccctgaggcttgtcagggacataggaggtccaggaaagcaggtagagaagatatgaccatgaggtaggaaggacccctcaggagaagtgcactgtgacagcccagcgaggatgtcagcaaaggggtgggtgtttacctttgggaaagctattctagagggtgcagtagaggagcttgaaggagaggaaagcaaagagagcttgggccacgggaaataaattggtcacgtggagatgagattatggaaagactagccgggtagagaagcttctgttttgagatggtgcttaacagggaccagggatgagaggcatggtggcaaccacaaggtggccaagacaatttgtctccagttggatgggatgtctgcctggacacagtctgtgcttgcattggttgcaattctgagagtcatctctgatggatggacatagataccttggccttggacaatttgtgctgactgtggancatctgtgggtcctgttgctggcaatngaagcggtaaggagatgactaacaatnaactaccctaangccccttgtctaacgcctctccgtctcaaagtcctcatcctcctgtncacatgactgcatggacaaccaataggtgccttcctcctcaatttcctnaaacttnaacantcatcngttttgccgataaattaattttgtaaa

SEQ ID NO: 359761 - DNA, 785 bp, Homo Sapiens
gcaggataattttaagtgtatatattttaactgcactggtacattgaacatgtcagtgtcgatgccactggaccaacagagcattttgtggctatagggtgcctgataataatgtcgtgatttttctttgggattcaactatatcgaaggtttttcccccagcagtatgggggcgtacaggtgatcgatcattaatgtcattgcaattgttattttttaaaataaatttataaaaataaccgaaaagtaatgtgacttttgaggaatctgcaactcctgggttctagtttgtgtttccagtgttgaaattttgatctcccccgacaagacttgtctgcatggacggtgtctctgtaaacagtatcaaacttgtaatgtctgagcctcttagctttatctccccttaatttcttcccttttggcccttccaccctgttgaggagattttttctgtcacctgcaggctgatcatacatttgatgctactactgaaagtgtttatcaaaatgtgatgaagtaattccatgaggaaaattagccgttatcacaaaaacagccttaagtattgtagaatttcaggtagtgaagatgtactatttacgttttgttagattttgttttggcagaagaccaaaacaaaagtacttttctgattgttaaaaatccacagcatgctcaccttggtactggtttaccttacggtcgctgggaatctaagcaacaaagactagaagcctccgatatgccattatcaacacacaagagacaaacagcccgaggaacac

SEQ ID NO: 359762 - DNA, 676 bp, Homo Sapiens
  misc_feature (37)..(37): n is a, c, g, or t
  misc_feature (106)..(106): n is a, c, g, or t
cctttcccttgaagtgaaggagaatgttttcttgttncatgatacattttataaatttgcttagctggaaagtttggaaaggagccttgtttgtcaattgacaccngattgtgaagctcttagtgtgaatatttttacgtctgtattagacattttctttgcaaatctattgttcgattgaaatgtaaatgaaattaaagatggtgtacacccatcatgtaaaaagcaggcaccatctctaagatggatttaatgctcatttttaaggcatatactcagcttctatttaaaactataatttaaaataattctgtacaatgaaatggggaatatatatgggaataaattctattccatttatttcaatttgaatttccaaattgtaatgtttccctttgtgctataggaataggattaaatgggggaagactaggatttataaggcctgtatatggggggagggcagagatggaacaatgagggttgtgatgatagtgaatagcgaagagtgaattctgtgtgtttttgctgtagcactgaagtgaagagatattagctttggctgttcacaaaatagagcatcatgattttcagtgtttgagagaaaattgatggaaaaagtttgcagtacttgacatgtatttgcatgcacaaaataaaattatttgtccacctt

SEQ ID NO: 359763 - DNA, 941 bp, Homo Sapiens
  misc_feature (96)..(96): n is a, c, g, or t
taaatgcaattggaagtcttaggacacagagagagagaaaaaaggaaaaagtggaaaggaaattaaaggatgatcaagtaaggatttaaaactccntagttctatcccaagaggcatcccttgttaagaaatgactcccccccagctgtgtggtgacagttgaaggctgtccttggaaaagtgaatcgtgaattagaatggaaaatgtctcttagcaggtcctatttttatattttgctcctttattagaaatataaacagatgattatttctctttttatttgtcttgttgcattttttaacaaataatttttggtagcttgtctgtagtatgttttgactcataaaataaccttcctaattttgcctgtgcagttcagtaacttggtctgcactccccatgccccagactttattcccctgacctttaaaaatccaccaccattaactgctaaaaatcccttgatacaaaaacgtcttttcctgacttcaaaactttccaactggtctagcatggaccctgggaccggcccttcttaaccccactgacaacgccttctgccccacttgggccagtttccagtacaaggaaggcatctgggcagggccctttggctagaggggcctaagccttatctttgagtttctccagatagtttctaagttccttgggggcacccacagccacgtcttgacacacccatttgatgtcctcatcattgctgctgacgatggagttcaccgtggggcagctgtcgtccggggggatggtggtaaaggtggtaaattgcaccttcttcctcttggaggtgggcgagtgcagggggtcctgcttctgttctctgccctgccgccccccggagtcggctgacctgtgaatctggctctgcacgtgcttgtgggagccaccatttgagcaagagatggatgctctccttgca

SEQ ID NO: 359764 - DNA, 700 bp, Homo Sapiens
  misc_feature (26)..(26): n is a, c, g, or t
  misc_feature (33)..(33): n is a, c, g, or t
  misc_feature (137)..(137): n is a, c, g, or t
  misc_feature (687)..(687): n is a, c, g, or t
acttgaccacttgacccctcgggatnccacccntgtcatcgtggggatgtccctatatgggagaaagttgggttaaatcaaaaaggagccacgcccaggtgtaatcagagccaacttggtggctgggtctatcacangacataactgatgctgaacatgaccaaagataaaaactgtttggagggtttttgagttgtttttcttatgttgttgggtggggtataccagcataaactctaaagataaaatctatgttagattgtcaatcaactgtgtttttgaacagcataattgtgtagcagcacattgcaaaaatgcattcatccaaagcgacacatgtggcaacgtagaccacgccagtgaaataagccccttcgtgatcacctgactccagttctccgtgtgctccattggctgcggctgcaggaggaagatgcctgacagccctcatgctctccgcaggggggcgctcacaaagatgccaggggtgtttattgtgtttatttttttaattactaaaatcagtagctaagaaagggtccttgaagcctcctaacctgggttggacctttgaaaaatatatttgtagcacatattatagatggaaagaagaagatatttatttatacctgtgatgcccaattgtcattaaaaggcttttcatggcttgacaagtcaaaaagggcnaaaaaaggccaca

SEQ ID NO: 359765 - DNA, 678 bp, Homo Sapiens
gttaaaatggaaaaatgtgtctttagagctcagtattctttattttacaaacacaacaaaatgtagtaacttttttccagcatacagtaggcacattcaaagtggtccaagatggctcttttttctttgaaaggggcctgttctcagtaaagatgagcaaacatttggaatttacatgtgggcagacattgggataacaactttcatcaccaatcattggacttttgtgaagtcgacaccagctaaggctgcttaaaataagttctgatcattatataagaagggaaatgcctggcagacaccatgtaagttataagtgtctgtcttatctttactacacatattgtaacaaattcaatatcctagtcttcatttgtatgaatggtttgtattgtacatagtttaaccaagtgttatttgagctgcttattaatattaacttgtacttgtctctctgcttgttattggttaagaaaaaaggatatgaggaattcattttatcaatgtagctgtgaaggccattaaaaagacaaacttaatgtacagagcatttattcagatcaagtattgttgaaagctatacatatacaacattacagtctgtctgtatttagatattttatttctggaaaaaatgaaatgtacataaaaataaaacacttaaagttgagtttcaat

SEQ ID NO: 359766 - DNA, 729 bp, Homo Sapiens
  misc_feature (16)..(16): n is a, c, g, or t
  misc_feature (21)..(21): n is a, c, g, or t
  misc_feature (46)..(46): n is a, c, g, or t
  misc_feature (68)..(68): n is a, c, g, or t
  misc_feature (94)..(94): n is a, c, g, or t
  misc_feature (182)..(182): n is a, c, g, or t
  misc_feature (193)..(193): n is a, c, g, or t
  misc_feature (204)..(204): n is a, c, g, or t
  misc_feature (222)..(222): n is a, c, g, or t
  misc_feature (678)..(678): n is a, c, g, or t
cagttttgagttgttnggaantaaatcccacagttcttgacatgtntaatgattgcatatctgtgcangttcccacagaggaaaatgttaagcntaacgaggcatccacaactgaggttgaaaataaaaatggtcccgagacattggccccttcaaatactgaagagggttaacataactantacataagaanaacaaatttcntgcaaaagacaatgtgangccatttgtacctgtccttaacaaacacagatctacagttcttcagtggccatcagaaatgctggtttatacaactacgaaaccatcaatttcctatagctgtaatcctctatgttttgacttcaagtctactaaagtaaataataatctagataaaaataagccagacttaaaagatctttgttctcagcagaagcaggaagacatttgcatgggaccactttcagattacaaggatgtatctacagaaggactcactgattatgaaattggaagtagcaaaaataaatgcagccaagtcactcctcttttggctgatgatattctctccagtagttgtgattctggaaaaaataagaacacaggtcagaggtataaaaacatttcctgtaagatcagagaaacagaaaagtataattttactaacaagtcaaataaaacaggacactctagatnaaaaatacaacaaaataaggttgaaagagacccatgaatactggttccatt

SEQ ID NO: 359767 - DNA, 1411 bp, Homo Sapiens
  misc_feature (99)..(181): n is a, c, g, or t
  misc_feature (1303)..(1314): n is a, c, g, or t
aaaagagaaagagtattctgaagataaaccttatcagtctgagtcctgtcagaatcagagtatagtgaggaggtgcgagcaaaaaagaagaaaagcagnnnnnnnnnnnnnnnnnnnnnnnnnnnnnnnnnnnnnnnnnnnnnnnnnnnnnnnnnnnnnnnnnnnnnnnnnnnnnnnnnnngctgctagttcaagtccggactcgaccataacattaagaaaaatcaggattgcccttataaacgagaagtcgcaatgtcggaggaaattgcagactgtggaaaactacagagcatatgttactaagaatgcatgaatttgtcttgtgtataggaatgattgcctggactattcagtaggccacgtcacgatgccacgtgtgtgaaagggccataaatgttgcctgctgcttgaagcatctatttctgttctcttccagtgcttgataactctgggagataatacagctgcagtacgtactagtggttgaagatatctgggaataaaattaatacttttgactagaagcgtctaaggataaaccaacagaaatggaatcgggatacatctttaagatgtaatcagaaatgaccagatgactctagttagaaatttcgaaggagggattaacattaatatttcaaaacccttactctgtagataagtgtatttgaattttttcccctcgtatacttttatttacctggggaaggagcttttagggttggggggtggtttgctagctctttagctagcagaaaagtgtgcctttgatcctcacacatcctgttatcatggacacagtagccatgcttcacggggaggtcagagctggctaccagcagtcttgccctttactgagcttagtgtcatctttggatgctgtcatatgctgctttgagtgaaccagagaaacagccatttgcagcatgagaaagccccaaaagctctgggatttacctccactttagtaataatgaatattttttagcattagaatgtgttatgtcatttgaattaattttgactacactttggcttgggagaggaattattttaaatagacattggtactttttgaacttgatagctaaagattctaaaatgcatgttttatactaagttttaaccagtcaggaaaattttatgtaactagtgatagtttatttttttgtatgaattttgtttaggctgcaatgtttagcttttgttaactcctcactcttgctgtcttaagttcattactatgtttaatggcctacttgccaagatatttagcatgtaaaaagcagggttttgattnnnnnnnnnnnncggcttcatattgaagctgagacttacaataacaagttgagtggcaagcctggtatgctgtgtcttattgccagaatcttagtaaatgtaatgtttt

SEQ ID NO: 359768 - DNA, 1564 bp, Homo Sapiens
  misc_feature (508)..(533): n is a, c, g, or t
ggaagccacagagtggccaagacttgcacggaaggcggagcattatggagggcgtcagtcacctggtcaggggcccaggttccagaacaagtgccggtgcccccccaagggccggggcacaacacgattgcatggcccgtacagctaagagagataaaggcgtacgccgaatcccatgcccccccagggggacacgccgattctaataatgtcgcagccagaaggctgtgggggtacagcagccaaggggagaaacagaccggacaccggcgctagcccatactgcacagaaaaagcggagaaggagtgacccggatgcttccgaagcacgcgagcgtgattttggatggaggcggccggtgactgcctagctgtctgccggttcctgtaagggacattttttctgagtaaatggcgattcctcttccatgtggcatctgtcttggatcacgatgctgattgtaactggaaaggggtgttttggggagctgtattcagggaaggaagnnnnnnnnnnnnnnnnnnnnnnnnnncctagattgctcaaagtttctgcctcttttgtaggaatggtaaatcaactatgagcaagtattttaattcaacattaagggaaaaaaaaggactttggaaagcatacagaaaaaaaggtagttaacgttggatcatgtgtaaaacggaacctcagggagtctaaacaaaatgcaccttcggtcaacttgtgctttttgaaattcctcgtttgacttcccgtcccagtgcacatggaaatgacagctgccgcgagaggtgtggagtcggaggagtctccgggagcatcagagggttcggggcttgtattctggcagtttcttgatcttctctgttctcagtctcactgtcatctcttgctatcaccaaggagtgtgagtagcccatggcgacctgctctgagaaaatggccatccagagtctttacctcctgggctgcagtggaagacttgggcttgtggtccccgtagcccagttccccaaaggtcggtgacggaccccagctgatggtgctctcatcggcggccacaatgatgctgctcttcccacaagccaggctccgaattctccagccgcagaggtcctgcactgcttttgggtacatggtagattcacgggaggtgttggtggccccccagaaaaacagaccacccacttcactgacagcaaaggagcaggtgtaaccagcatagatctgggaagccccacgcccagggaagtcaaacagcttcaccaggcgggggaccatctcatccttctgctctgcgtggcccagccggccatagccaccaaagccccaggagaagactcgcttctgggagtccaggaccagcgtgtggttagcgccacaggccacgtctcgtacaaccacgtttggtacaggcagaatctgtccatctttcgtcttctcaatgaagatgcacactcgccggggaactagttcacagtcgtactctatccgctgtgcccggcagatgacttcccatctgacttctcccagctaccatattcagcaccaaagttagagttcata

SEQ ID NO: 359769 - DNA, 772 bp, Homo Sapiens
  misc_feature (112)..(139): n is a, c, g, or t
  misc_feature (646)..(646): n is a, c, g, or t
  misc_feature (713)..(713): n is a, c, g, or t
  misc_feature (717)..(717): n is a, c, g, or t
  misc_feature (725)..(725): n is a, c, g, or t
  misc_feature (734)..(734): n is a, c, g, or t
  misc_feature (745)..(745): n is a, c, g, or t
ggagagggcgttacacacacactctgccggtagcgctcgggccctgggaatcggcaaacgctgcgggttccagtccccgcgactcagtgccgggcgaagatcagagtcaccnnnnnnnnnnnnnnnnnnnnnnnnnnnnacccaggagggtcggacccccaggggtgtgtgctgtgtggcagcgtaggtcttcggggctgcgtgactccctggcccccgggacccccctgtcccgctgtggaaactggcacgggggacctggaggacggatcccccgggcacctgccgatggccactgacccaggtctggattgttccccgaggcccagaggtcaccactgggcccccccggggactgacgagaggcctctggcgggaaaaggggctggctcaggcaggcagcaaggccccagaaccccccgcacacgcgggcacaggaagccccagcaatgcccctccctccaatttctcaacccgtgatgggaaaagaagagaaaaggaagaaagatttcctccaaagcttcactgtggcagaattccgctctgaggtccttacccgcctccaagcgggcctccctgctcgccgctcaactcgggcacaaggcacaaaattgtgtccttcttctgctctaaactctgctgtggntccccaattgccctcaaggagaaaaaaccaaaactcctccctgcggccatgaagccctcaacaagcnttgnatccctgntccaacaanacaactgcccnaaggaacacaagctcaagttgccccaa

SEQ ID NO: 359770 - DNA, 700 bp, Homo Sapiens
  misc_feature (50)..(50): n is a, c, g, or t
  misc_feature (60)..(60): n is a, c, g, or t
  misc_feature (79)..(79): n is a, c, g, or t
  misc_feature (105)..(105): n is a, c, g, or t
  misc_feature (177)..(201): n is a, c, g, or t
  misc_feature (219)..(231): n is a, c, g, or t
  misc_feature (690)..(690): n is a, c, g, or t
gaggtgagagggtcacttgagcccgggagttttagacaagcttgggaacntagcaagatntcatccttacaaaaattantattggtgtgtgcctgcagtcctagntacttgggtggttgagccaggaggattgtttgagtgagggaagttgaggctgcagtgaacttatgattttannnnnnnnnnnnnnnnnnnnnnnnnaaatgagaccctgtctcnnnnnnnnnnnnngttttctagaataagcaggatgattgtttaatttgaagatggaacaggaaactagagtgcatttaaaatactctgtcttcattttaacatgttgaatggaataactgcatatcaccatgagtttgttttgcttttcatacagacttgtatgtgtcatttgagtggtttccagattggagcgaggttattctgatctaaatgaacagcatttttttccttagcctctgtttgccactctgggtatctctcctatgggcaaagccattagaaatgcataaaacctcgagacatggtttttggcaaaaactccatgactttaaactagctcttttactactgacctttcacagagaaaaaatatttcccttgaaaaaaactgggcttgtcattttttcccttgtagctttaagcagagacataagtgccttgcattacacatagtaaactttctttaaagcnaaaaaaggcc

SEQ ID NO: 359771 - DNA, 851 bp, Homo Sapiens
  misc_feature (105)..(114): n is a, c, g, or t
  misc_feature (336)..(351): n is a, c, g, or t
ttttttcggggcccattttattaaaaaacaaaaccaaaagaaattttgcagggaaatttcctggaattcacaaccctcatttaaaaatccttatagttgcaatannnnnnnnnnagccagtacgtaagaacacgattgcacttatttacatgatagtcttctatataacaaaaataaccatgttgtaatgactgtttccaactatcacccttgtttcatcactagcccattatgagacaagttgattacgctctccaagtacaaagagaatagaataaagcaaaataaaagtctgtgtctcctaatagaagacaaattcctttaaagacagttacnnnnnnnnnnnnnnnncaatttctttgtatttcaagagggatataaagtgctttgaaaggagtagggtaggtgcctgaggtggggaagaaggaaagaaatttatacagaaaaaatttaaaaaactacactgccttaactaatcatctcaatatgcacacaactttgtacagaagattagttttgggtaaaaacgctacataattcactagtacttatttcggcaattaagaactgaagtccaaatgaaagactccccatgcaaatgtcatcaaggagtgacttttttgtgattttgggtcagatgctatataaatcaaggaagctcagtcacacagtctgaatatggagaggatagacaatgccgagatggaaccatcatctactacctgcagactagccagaaagaccttgtggggaagctaagtagactttaccccaacatcaatcattttacaacaaaagcattttgttgcaagcatttgtttacaataaaagtaatttgtgttaggatggaa

SEQ ID NO: 359772 - DNA, 310 bp, Homo Sapiens
  misc_feature (86)..(99): n is a, c, g, or t
ggaagtaaatatagccataagaaaatatctgctatacaggaaaaccagtattaagcaaataccaccatccttaacagaaacaaaannnnnnnnnnnnnntatttttaaaaattagcattgtcatacagtacaattcttagtgaagtgtattgtggaacaatttagaaacttcctttttttcccctagattaaggatactttccttgacttgagacttgtggtcttcaggaaaactactcagaatataatgactcctcatcagtatcatattgtatataaataatgaaatgcattaagaatattcacaaca

SEQ ID NO: 359773 - DNA, 891 bp, Homo Sapiens
  misc_feature (403)..(411): n is a, c, g, or t
ggggggaaagcggaatctacaccttcccggccagcggtacaactgcagaactgcaggagactatctttctagacaaggcagttgaggaggagggagcgcttgagggggactggcctggcgtgcactccgcacctcggggacattattgcgcgtggaacggctgcttttggaagactattgcccagaagaaaagatgtttggttttcacaagccaaagatgtaccgaagtatagagggctgctgtatttgcagagctaagtcctccagttctcgattcactgacagtaaacgctatgaaaaggacttccagagctgttttggattgcatgagactcgttcaggagacatctgcaatgcctgtgtcctgcttgtgaaaagatggaagaagttgccagcaggatcnnnnnnnnnctggaatcatgtggtagatgcaagggctggacccagtctaaagactacattgaaaccaaagaaagtgaaaactctatctgggaacaggataaaaagcaaccagatcagtaaactgcagaaggaatttaaacgtcataattctgatgctcacagtaccacctcaagtgcctccccagctcaatctccttgttacagtaaccagtcagatgacggctcagatacagagatggcttctggttctaacagaacaccagttttttcctttttagatctcacttactggaaaagacagaagatatgttgtgggatcatctataaaggccgttttggggaagtcctcattgacacacatctcttcaagccttgctgcagcaataagaaagcagctgctgagaagccagaggagcaggggccagagcctctgcccatctccactcaggagtggtgactgaggtttttatgtagaaggggaacaaaaaa

SEQ ID NO: 359774 - DNA, 691 bp, Homo Sapiens
  misc_feature (631)..(632): n is a, c, g, or t
ggaattacgttagggcaaagccatgaggaggaacaagccccggcagcgcggcgtgcgggaggcgcggcctgcgggaggcgccgggccgggctggcgcggggcccgttgttccggcgcaggtgagggaggtggcggcgagcgacgcggttcacctcccgctgccctcgccctcgccccggcgagcggcccccgcaggaactttcctcccgacgcgagatgtcttatttaccaacaaatccaccagggagcattcttacttgctggctcggcgtctctctcggcagtcaccggagtgcccgagggggaagcacgatttacggaagactattgcccagaagaaaagatgtttggttttcacaagccaaagatgtaccgaagtatagagggctgctgtatttgcagagctaagtcctccagttctcgattcactgacagtaaacgctatgaaaaggacttccagagctgttttggattgcatgagactcgttcaggagacatctgcaatgcctgtgtcctgcttgtgaaaagatggaagaagttgccagcaggatcaaaaaaaaactggaatcatgtggtagatgcaaaggctggacccagtctaaagactacatttgaaccaaaagaaagtgannactctatctgggaacaggataagaagccaccagatcataaactgcagaaagaatttaac

SEQ ID NO: 359775 - DNA, 466 bp, Homo Sapiens
gatcctgctggcaacttcttccatcttttcacaagcaggacacaggcattgccagatgtctcctgaacgagtctcatgcaatccaaaacagctctggaagtccttttcatagcgtttactgtcagtgaatcgagaactggaggacttagctatgcaaatacagcagccctctatacttcggtacatctttggcttgtgaaaaccaaacatcttttcttctgggcaatagtaggcctggtctgaagtcttaggtcaattagctgtccactcagatgttgtcaacttctcgtcctggtttcagggttgaagctgtttggtgaatcagagacagggatctttggtgggagtcatggtccattcaggaagttgtgccttccaaaagcagccgttccacgcgcaataatgtcccccgaggtgcggagtgcacgccaggccagtccccctcaagcgctccctcctcctcaac

SEQ ID NO: 359776 - DNA, 1834 bp, Homo Sapiens
  misc_feature (236)..(244): n is a, c, g, or t
  misc_feature (1301)..(1301): n is a, c, g, or t
gggtttcaccacgttggcaggctggtcttaaatgaccctcttatttttaacttggatacctgctattcttgccaaaagacaatttctagagtagttttgaatgggttgatttcccccactcccacaaactctgaagccagtgtctagcttactaaaaaaagagttgtatataatatttaagatgctgagtatttcataggaaagctgaatgctgctgtaaagtgctctttaagtcnnnnnnnnngttaatccccttctaatgaatgaaactaggggaatttcaggggacagagatgggatttgttgtatgataaactgtatgtagtttttagtctttctgttttgagaagcagtggttggggcatttttaagatggctggctactctggttttccctcatgataataaatttgtcataactcagtaacatgaacttgcccctagaggtagttgttaataatttggaaatattaaggtcttgccaagcttctgatgattcacacctgtactactgattattaagcaggacagactgagctttctgttgcaaataccttggaggagaaagtaatttctaaatatacagagaggtaacttgactatatatgttgcatcctgtgcctcccttcatattaatatttgataaagattttaatttatgtaaaacttctaaagcagaatcaaagctcctcttggggaaatggcaagtcttcaggataggcaagaccctgtatgaatagtaccaaagcattaccgcatggtagagaacacactcgattaaaaatgttaagctatctgaaaaataaaatgtgcaagtcttcaggatggcacaaaacaaaggttaatgcttcttggggcacatttcttagagggcttgctgagtgtgtaaatataatcgacttttgtttgtgttacatgacttctgtgacttcattgaaaatctgcacaattcagtttcagctctggattacttcagttgacctttgtgaaagtttttatctgtgtagaatgggtgtttgacttgttttagcctattaaatttttattttctttcactctgtattaaaagtaaaacttactaaaagaaaagaggtttgtgttcacattaaatggttttggtttggcttcttttagtcaggctttctgaacattcatgaaaagcctctcacttgaacccaaaccagagtactcttactgcctcttttctaaatgttcaggaaaagcaatgccagttcagtcttttcaaaaagagggagaaacatttgccggccctggtaataacaagactcagtgcttatttntttaaactgcattttaaaaattggatagtataataacaataaggagtaagccaccttttataggcaccctgtagttttatagttcttaatctaaacattttatatttccttcttttggaaaaaacctacatgctacaagccaccatatgcacagactatacagtgagttgaggttggctctcccacagtctttgaggtgaattacaaaagtccagccattatcatcctcctgagttatttgaaatgattttttttgtacattttggctgcagtattggtggtagaatatactataatatggatcatctctacttctgtatttatttatttattactagacctcaaccacagtcttctttttccccttccacctctctttgcctgtaggatgtactgtatgtagtcatgcactttgtattaatatattagaaatctacagatctgttttgtactttttatactgttggatacttataatcaaaacttttactagggtattgaataaatctagtcttactagaaaggaaatcaaa

SEQ ID NO: 359777 - DNA, 1051 bp, Homo Sapiens
  misc_feature (646)..(651): n is a, c, g, or t
  misc_feature (948)..(974): n is a, c, g, or t
taatctgccagcatttggggagatcatggtaaatacttgaggcggtgaatacatagtgcagtgagcccaattcccttttcagttgtcacctcagcacccataacatcacgaaagaacatccattaatgcaaacctcctcactaagcccttcagacccaaagtggctttcctgatggactctgcctgtctgtcctacaagtggagtcagattcaaagtagaaatgtatccatccttgggaaagaaaataggaagtcttcccccactgtaggagtatataaaaatgtctcctggttgcttaattcccaacactcaatttccttcttctaaacacatttataaggagcaagagatggtgcacttattatgaattaatattaagcaatcactaaaagaaaggaatattctcttcctttcaatcagaaaccctgatatgtaagttgtgcaattaatgctaaagcatataaagtctttaagctgataagtatctgtaatcaaataatgaaaaaaggaaagcagttaaatgaacacactattcagggtcaaatatgttcagcaaaaagccgtagcgggtctttgatcatggttagattcacagtgatatcaaacagttggttctcatgtaacagctaaatgtttcagtttttnnnnnnttttattaaatttggcatttcacactgagatctgtattcctagtgaataaaagacagctactatattaggagggattccattttcacaattgcaaaacagatatttcaggaacatgggccacaaaatgtactcctttcacagtgttctcctcttctgaactgtgcagttatctattaaattttctaatagatatttgtgtaaggtgtatgtatgcttgtgcaattatttaaaaaacggttttggaaaacagtgtatttattaaagaaaattacttatggggcatgtacaaaactgtnnnnnnnnnnnnnnnnnnnnnnnnnnntcacattcaatttgcccagtaaagttgtttttgtgaaatttctgtgttgttgaataaaggactttagtactcaaaat

SEQ ID NO: 359778 - DNA, 628 bp, Homo Sapiens
  misc_feature (68)..(68): n is a, c, g, or t
tgtttacatactgaattctgtaatatgacctaggaacgcatttactatgagaaaatatggctcttaancagtgtaagagtgaaaatataagcatatttccattaccagtatattgacttgatcagcagctctcattttaacatcagttaggcataatatttcatagttttcaagcctttttttctgctaacattcagacaagtaacaggcaacaaagatttaagaaaaatttatggtggaaaaccttaaaaattgagacaattcaatctatttaatctattaaattttttctctgaattgggtatatggcatcattatttgattttagcagggaacatttggatttagcttatgaaacacagatgttctatgggaacatggcttgaagccaatatgtaatttaatgtttttccattaaacaaacatctgaacaccaacttagctaccaagtgaggtcaagtgcctgaaaagtactgtatacatctaataagcatgttttccttatgtaaaagatgcactttatggcaatgcataccaggctttcacctgctagaaacatacttgttgccaactttgccatctaccactattctcctccttagaacaggtagaaacctattttgcaaaa

SEQ ID NO: 359779 - DNA, 721 bp, Homo Sapiens
  misc_feature (42)..(42): n is a, c, g, or t
  misc_feature (47)..(47): n is a, c, g, or t
  misc_feature (99)..(99): n is a, c, g, or t
  misc_feature (153)..(153): n is a, c, g, or t
  misc_feature (326)..(365): n is a, c, g, or t
  misc_feature (699)..(699): n is a, c, g, or t
  misc_feature (701)..(701): n is a, c, g, or t
aaacccaggatgttttgttggcttgtgttgaccattattccntttgnaattgattgttttgggattgaggactttggtttggcccaaccattgactttnttcatccattgcaacatttctcttgactaccattgtgacggttgtaccaattgngattttctcatttattattaaaaaattgtgtaatgttttgcaaagcttctgtcttaaaatgtccaggtcttaggaaaaaaggcagcttacactgttttgcttgcagagtcatatctttttcgtacaatggaaatcctcaagtccactttgtgcggtctccctctccttccccnnnnnnnnnnnnnnnnnnnnnnnnnnnnnnnnnnnnnnnntgtagcatgttggctaaaactggagcaaagtgcactaaaacaatttcctgaactcacctgttgtactattcaccttttaaaccataaattgctctttagccatttgtagtgcagtaaatgttacaggaaaagacttggcacattttcttccaaatttcaagaggtgattttcaaaagctttattggggtatgttgtcagaccagggttttcagagttgatggaaaagagtcttgtgagaaaacttattttgataaattattacacacgcagaaaaactgatcacactgactggatctgtccacgacatggaaaataaactggatttccaaaaancncaacaacaacaccacaaaaa

SEQ ID NO: 359780 - DNA, 789 bp, Homo Sapiens
tccacttctggtcaaacctcaaagtgaggtatccagtagtaaaagttcatcccggactgtgtttaccacactattccaaaagggaaaattaaagtatccagaagagtttaaagagtctcaaaaactattttgaatgcaaactggtagtaatgaaagtgtacacattattttcagatgaaatcttcaaaacagacgcacttttgaacttagcatccccagtttgatgcacctggatacatgggctgtgcctgacctaaaacgtgtgtctgttcgtttctgaaaataggactgtgttgttctacagctatagcctacctccttggtcctctcctacatccatttgaaaaatctttgaaaatgggaagagatttttaaaactcagacaacggtcaacttgaggttcaaactggttctagtttgaagttctaaaattaacttcctttaaaagaaactcagcatgatcagatttttaggctagcaagctaaatgtgctgcaatgtactgtggaaactatgatgactgtgcttttatctataaattcaatctcctgtaacattcaccaagactacgaaaagcaatcactgagcaggccacccattttctctctactattctttcaaaacaggaatattaaaatgtggtacaacacagaatcatctttactgtgaattacatgttctgctaagtaacttgcaaaaaagaaatcaaactggcagtaactttactaaagatacaaatgcttatatgctatattttcttattctgaatagaatattaaaatttattacc

SEQ ID NO: 359781 - DNA, 968 bp, Homo Sapiens
  misc_feature (24)..(24): n is a, c, g, or t
  misc_feature (532)..(633): n is a, c, g, or t
  misc_feature (745)..(755): n is a, c, g, or t
ccccttcccgccacacgaggccanaccgttggaggtaattggttgccggtgaatgggttttaaaccgcctaatcctaggaattccagaataggagaagcctttaagatttggcatgcctttgccttaccctaatttaatgatatcctaccctttcctatttgtaaactaacaatagcctaagttgagatcagaattttaacagaaatattatttatataaaaattgttatcttttattgtcacatggcattaacaataagaaaacatcctgaaggtgatgtgacaactcggattctaaaaattatacttcaggtatttcctgatccgtggtttttcaaaattgaaacaaagtcgttctcatcagaatggcttctcctttgttctggaattgtggcactataagtggaaactggtgggaccctggctggcttcagagtggagcctaatttttaaagttctttaggggagaattcttagatataaattttagtgaaagttctttgggggagaattcttagatataaatttgagnnnnnnnnnnnnnnnnnnnnnnnnnnnnnnnnnnnnnnnnnnnnnnnnnnnnnnnnnnnnnnnnnnnnnnnnnnnnnnnnnnnnnnnnnnnnnnnnnnnnnnggttgagccactgtgcttggcttagaggtaataaattttaatattctattcagaataagaaaatatagcatataagcatttgtatctttagtaaagttactgccaagttgannnnnnnnnnnggcagttacttagcagaacatgtaattcacagtaaagatgattctgtgttggacccatatttaaatatctccgggtttgaaaagaatagttacagaagaaaatggggtggcccctgccccaggggattggcctttctccaaaaccctggggggaaatgctcaccgggggaaattgtgaattttattaagaataaaaagcccccgcgtccttct

SEQ ID NO: 359782 - DNA, 583 bp, Homo Sapiens
gtttttcagaaaatccattattaggagtagaggaatgaggagaaatattcgttccaaagagaatcaaaacccccaatgagagattgtcttacccccgttagaatgacagttaccaaaagacagtaacaaatgctgacgagaatgcagaggcaaaggaacgtttaaacactgttagtgggaatgtagacttgtacaaccgttatggagaagagtatggaggttcctgaacaaactaaaaatagaactaccatatgattcagcagtcccactactgggtatatatccaaaagaaaatccatatatggagacatctgcacctgccatgctcgttccagcactattcacagtacccaagattggaatcaacctgtgtctatcagcaaatgaacagataaaatgtggtatatataccccgtggaatactatttggccattaaaaaaacaaaattctgttattctcagcaacatgtatgatcttagaagacattatgttaagtaagccaggcacagaaagataaatactccatgtactgtacttatgtggaaggtaaaaaagatctcatagaagtagagagtggctcat

SEQ ID NO: 359783 - DNA, 711 bp, Homo Sapiens
  misc_feature (563)..(563): n is a, c, g, or t
  misc_feature (594)..(594): n is a, c, g, or t
  misc_feature (672)..(672): n is a, c, g, or t
cagacagacttgcaaatacttaaccaatttataaaatgtggcaagtgcttagaatgcagtgtaggaaaggtgatgtgggggctcacagggaagatcctctctctgtaaagcactgcttagtaaggggcttttcccctttcttttctcattctttccctctcatttcttctattgtttattccacctcaagtgcttgcttttattcctcagagtttgatacagatgtgtgggagttcgcttagcttgtgtcgacacacttcacaagcatggaggagtttacgtgtctgagggcatccctcagccagtgcggggtgggctttggttgttgaatgatgtggcttccctccaaagggacagctctgaagtgtgttctccgtgcttctccagagggatcctagaaggactgggtattgtggcctaactcaagtctggtaagcagctcaagtgtgcacccttctgactcctctccttacttccacactctggctttctggattcaccctttgcaagctacttgcacccaagtggttttctcttaatttggcaagaacacaaaccaaggncgttggtactagaagtggctctagaaaacangccgggagatagtattgggaaaaaggaatcactcaccctcagttggcaacaaggacctctttgctagtattaattgangtgttggtaacccctggtactctctaacatcacaagttg

SEQ ID NO: 359784 - DNA, 806 bp, Homo Sapiens
  misc_feature (697)..(716): n is a, c, g, or t
actgaaccagtcttggatgcggctggcaggtccttgaagttggacacaacgacccataccagtggtttgcaaccagggctgattttgcctccccaagggatatttgccaatgtctggatatatttttagctgtcacagctgaaggttgcttctggcttctacttgagtagggatgctattcagccacctccaatgtacagaatagctccccacaaaaaagagttatctggcctaaaatgtcatagtgctaaggttaagtcactttggactgcaataaatgcggtggaggcatcagaactattttggcagagtattgaggaaggaatcacctgcacctcctgcctgttttcctgggagggcctattcctttcactctgctaatgtggaatgcccagtgaggggacctgcatctttgagaagctcagtgttggctgtcttctgtaggacaagattgaccttaggagatgttactgtgaaactaggttcccaagtatcaatgaggatgataggattctgagatagtggaggccagttggtggcagttaatcatcagagacaaggtagacatagtgcccagaatgggcagcaaggctggactcacaactggggaatcttgacccactctgatgcgaatagaacatggtgtttctaaactgggcagctaaccatggtgctgcttgacttgtataatccgttnnnnnnnnnnnnnnnnnnnnttaagagctggcacgtggaagattgatgtcagctgctacatggagaaaaatcactatctctccccttgtgttcaaaacaggtagagccga

SEQ ID NO: 359785 - DNA, 723 bp, Homo Sapiens
  misc_feature (27)..(27): n is a, c, g, or t
  misc_feature (68)..(68): n is a, c, g, or t
  misc_feature (80)..(80): n is a, c, g, or t
  misc_feature (153)..(153): n is a, c, g, or t
  misc_feature (238)..(286): n is a, c, g, or t
atgctcaggtatttttctctcacttcncagcatcaagactcttcttgtttatgtggggcccatggtgnattagcttgagnaactgtcaaattaaaatgaaaggaaagcaagttggggcaagaaaattctcactctgaatgtgaaagaaaatancagtgttcttctctctggcaaagatttgtgactgttggggaagattcatgttatttctcaggtagactttactttttgagattcnnnnnnnnnnnnnnnnnnnnnnnnnnnnnnnnnnnnnnnnnnnnnnnnnattttgcctggtggggggttaaaggcagatagaatgtagttgtttatgagtttatactttctctttagcataatagatgccctgtttattttctcagaatgtgacaataaaattaggaaaggagaggaattcagaggcccatgttgcagttcatggcaaagttttacccaaatatttccttcagaaacatttagtcatagcaagccatataaattattgtctgcaactggtatcagaaaaagaaatcagtaggtggggactgtagaccccaatggtgcatctgtttacaatctttcttttccaaggttttaaggttcatgaataacatgagggaattttgggagagctaccacatcagtactttggcacgcattaactgttccacaggaaaactagggttgcttcagggctatttttgtttgaaatgacacacatac

SEQ ID NO: 359786 - DNA, 383 bp, Homo Sapiens
  misc_feature (124)..(152): n is a, c, g, or t
tttttcttttttaaaaacccagtagttttatttcaaagtataaatttcaggcttgctggacaaaaccccactacaggtaacacttatacagacaccactctactatacatttaaaaaagaaaannnnnnnnnnnnnnnnnnnnnnnnnnnnnaaccttcaaaaccctaataaaaatagggccacttgctggagcccagtttgtattagacattaggaaggtcttacttacattgtcttattatttacactttcaattgcaataaagaaaaattaggatgcaagtttcttacaaaggatttttatatttaattttaaaatggctgataaaatactaaagccagaatccccaaaaggtgtttgattgcccagttaccttatttac

SEQ ID NO: 359787 - DNA, 937 bp, Homo Sapiens
ttggattccttggcctgttggcctactggatttacttgatataattttaatgagggcaaaaatcctttgaataatctcaatgaaagcagtttaagcctaatcctaataaatgaattcgtatactttttttgaccttggaaaaataccactttacacccagtgctacgtttgataagtcatagagaagcatgcacgcataaagtgaatggaaacagaaacgtttaaagattataagaacaattcaaataggaggaaaaacaaactgcaggaaactggataggaagttataaaaggaatgggagaaggaaaggcccagctcttctgtaaattagaatcctcaactaaaatagcaaatgagattgaagaaatttttattcagtggcccccaatggatcagtgttcatataggtacaggccaagtgttaactatgttataattgccatagaagtgtgtgtcaggagctgaattttactccaggatgacgttgttgaccacatttgtagctgtagtccgggaattggtttgaaaggaaattggcattttcatgttgccaaaaatcagatatggctattttgtttatataccgtaccttaaaatattaactgctttttagaaaccaataaaaagtcttgtgaaatgttaaatgataaagttgatcattacatttgttaccaaccttgttagtcaatgtgacgtgacttttttcatgatgatgttttcacttgaaataaaatgagctttagggtttggcaaatacctttaaaatgtaatgctgaaattcaactctaaccagttctgaatctatcgtcatacatacacatcatctataacaatttcttttactgaaatgattgcttaaaagtatgaatttcattaaatttcctattgtaaaatatttatctgctgcatttcacagtaaaccttgatgtcagtggt

SEQ ID NO: 359788 - DNA, 604 bp, Homo Sapiens
tttgacatttggatgggatggaccatcttggaggctactcacagcccttaagtggttatgtctggaagctgagaaatttacatgctggaaaaaagtacttcttggggaggtaatttcagatacgaatgagaagacaagtttggacatagcccagaaaatatgctattatttcatagaagagactaatgctgtgcttcaaaaggtgtctcatatgaaggatgaaaaagaggccctgataaaccaactaactttggtggaatccttgtggacggaagagctaaagattcccagggcatctgccgagaccctgcacagtttgcaaacagcttttacctgatttcaccgaagcgcatttggtcacctcctctgaaacaaaagttaattttgaagagcatcatcatgggctggggtggtggctgcccccaggacatgcaggatttctgcagggggcagcacaggttctgggattgtgaggctgtgagtgaaggtggacaagctgtctggatggcaggtctaatgctcttccgaataaagtgctgaactgtgaggagagaggcggactgtgaggcagccaggagccattcgggtgcagcgttaatagggg

SEQ ID NO: 359789 - DNA, 704 bp, Homo Sapiens
  misc_feature (25)..(25): n is a, c, g, or t
  misc_feature (48)..(48): n is a, c, g, or t
  misc_feature (53)..(53): n is a, c, g, or t
  misc_feature (110)..(110): n is a, c, g, or t
  misc_feature (129)..(129): n is a, c, g, or t
  misc_feature (147)..(147): n is a, c, g, or t
aagccagtgttaaaaaaaagaaatnaaaggccaatagtttgaaggatnaaatncactttgttcccaagtacatgattgtcttgtaagaattctaaatacaaaaaccctgntgacattaataagcaattncagcaggattgcaggatncagtcctcaggtagatgataaaaaggaattggcatcaagtcattaaaagacacggagaaaccctaaatgcttattgttaagtgaaaaccaatctgaaaaggctttctattttgtatgattgcaattatatgacattttgggagaggcaaaactattgagccagtgaaaggaccagtggttgctgagagttgaggggaaaggagggatggcaggtagagaggtgatttttaagacagtgaaagtactctctagggtactgtaatttgtcaaaatgcagagaatggaaaacagtgaacggaaaacacagagtaaaccctagtgtcaactctggacttcagttaataacagtgtaccactattggctcatcaattgtaacaaatgaaccataatgatgcaagatgttaataattggggagcctgtggaggatgggagggttaaaggtttatatgagaattctctgtactttttgctcaatttttctgtaaccctaaagctgctctaaaaaatgaagtgtattaagtaaataaataagtaaataaccaaccaaccctgagg

SEQ ID NO: 359790 - DNA, 925 bp, Homo Sapiens
  misc_feature (28)..(28): n is a, c, g, or t
  misc_feature (40)..(40): n is a, c, g, or t
  misc_feature (62)..(62): n is a, c, g, or t
  misc_feature (115)..(115): n is a, c, g, or t
  misc_feature (145)..(145): n is a, c, g, or t
ctaaaagtaaccctgaaggggctccaantgggctaacccnaccacggctgggttccggctgnccttccccaagaccttaaagaacacgtgtttggggatcacggactaacatcanaaccctttcctccctccctattccccccangcatctgaaggtggtctctccctcccatcaagagacagagctttggaacagtaacagtaaaaaacctcggggttaattatatcaacaactccccattgacttgcaaggttgagagagggccagagaacccttcctcccgttttttcaatcttcttcccttacattccaccagccctagttgtctactgtgcctctcagttgacaatgctgaggacactggcctgatgcgtgagagagggaagagaaaggagctctctgattcgccacccacctagaattgcacggtcctatccatctagtgatagaagcttgcacattttttcaacctaatacaaaaatattaacacttctggacattataggcataagttgttatatctctacaatataataattcatactgtacagctataacagataacaaaaggtgcaatccttttaaaaaaaatcacacagttcacgtttttatcattttatttttaagtataaatttttaaacactttacataaattaactcctctgagactaagatttgatgtacagtaaattgtacatcatatcaaaatccataaacaacttgtctcacataatttacaaaaaaatcaggatttcctttgcttatcagtgacaaggattctagttgccagttttatccccgaagggaaaccacgttagcattgtaaaatccattaataaatccccgccgcagaagtcactgtgccaatgtccttctacaaagctgcacagggaaagcagttgggttgtctagccacattcga

SEQ ID NO: 359791 - DNA, 534 bp, Homo Sapiens
cttttccctccttgcttttctgccagttcctacctggcacggagaagtgcagggtggagagatctccgagaagcgccagccttctggggcttcctgttccttacagcgggaagcttggtagatggacgtattattgacacctccctgaccagagaccctctggttatagaacttggccaaaagcaggtgattccaggtctggagcagagtcttctcgacatgtgtgtgggagagaagcgaagggcaatcattccttctcacttggcctatggaaaacggggatttccaccatctgtcccagcggatgcagtggtgcagtatgacgtggagctgattgcactaatccgagccaactactggctaaagctggtgaagggcattttgcctctggtagggatggccatggtgccagccctcctgggcctcattgggtatcacctatacagaaaggccaatagacccaaagtctccaaaaagaagctcaaggaagagaaacgaaacaagagcaaaaagaaataataaataataaatttt

SEQ ID NO: 359792 - DNA, 531 bp, Homo Sapiens
gctcttgtttcgtttctcttccttgagcttctttttggagactttgggtctattggcctttctgtataggtgatacccaatgaggcccaggagggctggcaccatggccatccctaccagaggcaaaatgcccttcaccagctttagccagtagttggctcggattagtgcaatcagctccacgtcatactgcaccactgcatccgctggagaggcagaggggtggagagggttagactctctgcattttatccagggctcagaatctgaatgaaaatagggagcgtaggccacagcaaagccaacaactatgaagctgacaagatttaaatgtgggcttgaattcctttagacaagagtagaggaggggctgggggactgtataatgaaaagaattagcttacaaaaaagaaattgatattcaaagtattttaggcaaagccagtcaaaatgctttcatgatattttgagatgaaaattttgtctgattcgtattgttcttgtcatttgccttcttaactttatatgtga

SEQ ID NO: 359793 - DNA, 1349 bp, Homo Sapiens
  misc_feature (261)..(280): n is a, c, g, or t
  misc_feature (1061)..(1073): n is a, c, g, or t
  misc_feature (1203)..(1213): n is a, c, g, or t
gtagcgaggcctgggtggcgaattcggcacgagggagggcgcccctcggcctcctccctttcggaggtggggacaaggtggaggaagggctgcaggaggaggagctctagcatcgcgacccgccccgtcccgtccagtctggcctgggcgccgcgggaacgctgtcctggctgccgccacccgaacagcctgtcctggtgccccggctccctgccccgcgcccagtcatgaccctgcgcccctcactcctcccgctccatnnnnnnnnnnnnnnnnnnnncagtgcggcggtgtgccgggctgaggctgggctccaaaccgaaagtcccgtccggaccctccaagtggagaccctggtggagcccccagaaccatgtgccgagcccgctgcttttggagacacgcttcacatacactacacgggaagcttggtagatggacgtattattgacacctccctgaccagagaccctctggttatagaacttggccaaaagcaggtgattccaggtctggagcagagtcttctcgacatgtgtgtgggagagaagcgaagggcaatcattccttctcacttggcctatggaaaacggggatttccaccatctgtcccagggactaaagacaacctgatgaggccacctggcatgacctccagcagccagtaacttgttagggaagagacctgcttgggccacatgggtctgctgcctgtgccaccacctttcccagaacactggacttctttcctgcccttttctacaactctacgctgtgtcagctgtacagccaccccccaccccttcctttcagcctccatcagggaagagacagtaaaaataatcacagtcaagtgattcaaaacaaaacaaaaagcaactgttaaagccaagtctgccccataactttaaaagccatcattggtcactgccgatgtctatttttgaagggttgagatggacagatttcccaagatgcatatctttttgctttcaggtctaacaaatgttctattagctaaaatggggtgtactccacagaagattgggctcggaattccnnnnnnnnnnnnngaaagggagttccactcttggtggccaggcctggagggccaatagtggaattcttcactaaccaaaaacctccgccccccgggttcaagcgattctccttggtccgccccccgagatagtggggaattcnnnnnnnnnnncccccctaacggggggattttatactctttaaaaaagaagggggcttctccctggtggggccaggtctggcctccaattccccaaacctagggggatccgacggcccgtggttacccaagggcgggggaatacggg

SEQ ID NO: 359794 - DNA, 799 bp, Homo Sapiens; identical to SEQ ID NO: 178389
  misc_feature (129)..(148): n is a, c, g, or t
  misc_feature (724)..(725): n is a, c, g, or t
  misc_feature (732)..(732): n is a, c, g, or t
  misc_feature (735)..(736): n is a, c, g, or t
  misc_feature (740)..(742): n is a, c, g, or t
  misc_feature (744)..(750): n is a, c, g, or t

SEQ ID NO: 359795 - DNA, 713 bp, Homo Sapiens
tccccgtacgccccaatttagaaaactatgagatttcaaaccacataaacatgattctgttttccatttaattttttaactgttaggtatttgcagttctgttccgtggaacttctgcaggcctgtatttagcatgctgtaagtacttttgggtgaaataggctctgagtctaaattctcagacatgtttctgatgtattaccatgaaaagcttgtgccacatgacagaagtgagatcatagtcttaacctcttcttgacgtggactggtcttcactcgggcaccgataaataacagatttggagtatctcctggtgcttattttagatgatgaagtcaaatcaacccaattagtgtcctgttagtaggtataatgagcctatttctttctaaaaagacttgtgatctggacatgcttttacaagaaatagtgaccttggggaatatgtaaacaaaagacctttttctaagagttgggagggggtgggggactgtataatgaaaagaattagcttacaaaaaagaaattgatattcaaaggattttaggcaaagccagtcaaaatgctttcatgatattttgagatgtaaattttgtctgattcgtattgttcttttcatttgccttcttaactttatatgtgacctgaattttccataacttgatgactatagattgcacctaggcattccaataaaagccaacccaatgtg

SEQ ID NO: 359796 - DNA, 574 bp, Homo Sapiens
  misc_feature (63)..(63): n is a, c, g, or t
  misc_feature (77)..(77): n is a, c, g, or t
  misc_feature (90)..(90): n is a, c, g, or t
  misc_feature (115)..(115): n is a, c, g, or t
  misc_feature (119)..(119): n is a, c, g, or t
  misc_feature (144)..(144): n is a, c, g, or t
  misc_feature (168)..(168): n is a, c, g, or t
tttaatccggaaaaccttggccaagtattatgaagccccaaatttagaaacctatgagatttncaacccacataaancaggatccggttncccattttaatttttaaactgttanggtnatttgccagttcctgttcccgtggnaacttctggcaggccctgtatttnagcatgcctgtaaagtaccttttgggtgaaaataggcctctgaagtctaaattcctcagacatgtttctgatgtattacccatgaaaagcttgtgcccacatgacagaagtgagatccatagtcttaacctcttcttgacgtggactggtcttcactcgggcaccgataaataacagatttggagtatctccctggtgcttattttagatgatgaagtcaaatcaacccaattagtgtcctgttagtaggtataatgagcctatttctttctaaaaagacttgtgatctggacatgcttttacaagaaatagtgaccttggggaatatgtaaacaaaagacctttttctaagagttgggagggggtgggggactgtataatgaaaagaattagcttacaaaaaaaa

SEQ ID NO: 359797 - DNA, 543 bp, Homo Sapiens
ttctacattgcagggcacacgcgaaacagatgattttggcactgatatatttgacagtggcataggaactgaccttgatccagtagcctgagtgtgactgattgttatatggttgccatgaagaggtgactggcgatctttctccttactgtgacgactactctgtttactgcgttgtagttgctgcctcagtttggcgatctcttttagttgatcagcactcccccatgacgcagaacgctgatgtgacctcttttctgcaccctcttctgcccaacagctaggtgtccgaagtaggctttgtctttcatgcatgaagggtagtgaacatgaggatcccgtggccactgtcctgtgaggtaaggtcctgttattgtatccaaagaggaggttcgccttattgtactagaggtccgaacttgctgagattttgccttgtccgctctgcacacgggcgagccggggctccgtctctcaggtgagctgctcctccggtggctctctggggaccgtctcgggcggcccttggcccgcggcgcctgc

SEQ ID NO: 359798 - DNA, 593 bp, Homo Sapiens
agttttacttccctgagaacaaacatcccgggcgagagggtggccacggtgctggcgacagacgcagacagcggtaagaacgccgagatcgcctactcgctggactcctctgtgatggggatctttgccatcgatcccgattctggggacatcctggtcaataccgtgctggaccgcgagcagactgacaggtatgagtttaaagttaacgccaaagacaaaggcatccccccctctgcagggcaggcactacggtgattgtgcaggtggctgataaaaatgacaatgaccctaagtttatgcaggacgtcttcaccttttatgtgaaagaaaacttgcagcccaacagccctgtggggatggtcaccgtgatggatgctgacaaggggcggaatgcagagatgagcctgtacatagaggagaacaataacattttttctattgaaaatgacacggggaccatttactccacaatgtcttttgaccgggaacatcagaccacatacactttcagagtcaaggctgtggatgggggagatcctcccagatctgccacagctacagtctcgctttttgtgatggatgaaaatgac

SEQ ID NO: 359799 - DNA, 465 bp, Homo Sapiens
tctcattagtgaacttatctttgcagctgagtacttaaattctttttaaaaagataccctttggattgatcacattgtttgacccagtatgtcttgtagacacgttagttataatcaccttgtatctctaaatatggtgtgatatgaaccagtccattcacattggaaaaactgatggttttaaataaactaattcactaatattatttgtcttacatgcattttcttttcctagtgccttatttccctagatagaaaaagtactattgatgattttaaatacctttgagttagttaatttatgttaatttgggttttttggagaacatgtttcctgaaagtatacaagatttaacatcaaaatctatttgctaagtttactaggagaagtctgttaggttttgaaattatcatggaagtttaatagatgctgtcgatcattcacaggtttagaaacgaaatcaa

SEQ ID NO: 359800 - DNA, 646 bp, Homo Sapiens
  misc_feature (623)..(623): n is a, c, g, or t
tataagaaaattttactattattttcagataaatttatgtcactgtcattcattacattttaatttttgaaactgatgtctttcccagaatttatgtactctataacggtgtgaatgattaccagtattaagccattttctcatctgatatattgagctatgttttatgtaagtattgcttattcaagtagttttaaaagatatgtaattggttgttgtttcatgtcctacacagtaagaacaagagtatgttaacctttttgtcaggatatttgctatttcatatctttgaaatagagtagtagctctatttctaactaaattctatttatgtaacaacacagctaatttactcttggatctcattctccctttttatcctgagttaccatcagtgctaatgttcctcttttgggtatagttctccaggagaacttgtcctatatttctttgtgtgtgtttttttccttccagcttaaacaaattaaaactaaatatctaaaccttgtatacagacattaaaattagtgagagaaacaaaatatccttgtgtcttggcttttactttttgaagtcattaacaaataataaattaaagaataaaatgtgtccttaattatgtnttccttgtttgtagttacagcta

SEQ ID NO: 359801 - DNA, 750 bp, Homo Sapiens
  misc_feature (109)..(109): n is a, c, g, or t
  misc_feature (162)..(194): n is a, c, g, or t
ctgttccgcctactggtttgtttattgcttactgtcaggactatttcaaagactaagaagagtttcttctaacccctccctctcaaaggaatcctaaattattagtggntagataagttttgtatgctaagatattcaggtttatagtttatgtatgtgtgnnnnnnnnnnnnnnnnnnnnnnnnnnnnnnnnntatgttcagtttggagtctggcacaactccattatgtggattagagagtaagatattatggatgataaagtactaaatgaaacataatatttatttataaaagtgtgtagattgttaaatcacaaaaagagtgctatgaccattatgtatgaggaaacaggcctttgacctcctggaaagcactgctcaaaagtcattagtgcccatttttgaattccccaaacagaaagcttcttagaaaacacgctgagattttatttacagggaattctttgcacatttcaattggtgtgtagtcaagtatagcaagtacttaataatgactgaatttcatgttcctacagtcatacatattcattagaagttttatgttgttggtctgatctgattcttctttgtttgtgggtggaacggcactgagagaagtatagttttttaaacttgaacatgttcagtagttacattgccttagaaaacccagacacatagcagtggaaatgaaagaaatggcatcagaagtgacttaatttagcaattgtgattcctcttgtaaacc

SEQ ID NO: 359802 - DNA, 748 bp, Homo Sapiens
  misc_feature (140)..(140): n is a, c, g, or t
  misc_feature (633)..(634): n is a, c, g, or t
  misc_feature (687)..(687): n is a, c, g, or t
  misc_feature (692)..(692): n is a, c, g, or t
  misc_feature (696)..(696): n is a, c, g, or t
aggcatgaataattattcacaggcgttgaatataatcaaatgacttgcaacatttaccactgggattttaaaatgtggtggaccaatcattcttttagtctgtgcattttcccatttttttcaacaggaatgtctagagncattattcctgttttgccactgtatttttggtgaatgtgtagtaagtaacttggcctctttagtatcacaaagctggatgaagaaaatgtggtacatatacaccatgaaatactatgccgccacaaaaaggaaatgagatcatgtcctctgcagggacatggatgaagctggaagccattatccttagcaaagtaacgcaggaacagaaaaccaaacaccacatgttgtctcttagaagtgggagctgaacggtaagaacacatggacacagggtggagaacaatacacactggggcttgatggggggtggaggggagggatggggagcattagaaaaaataactaatgcatgctgggcttaatacctatgtgatgggttgataggtgcagcaaaccaccctggcacatgtttatcaatgtaacaaacctgcacatcctgcacaggtaccccagaacttaaaatttaaatcaaggaaaggcaaaggacatggnnagatattttctcaaaagaagacactcaagtatatggaaaaacactcatccttnctaancatnaaataaataaatgcaagcaaaaaccacagtaagatgccatctcacatcagtc

SEQ ID NO: 359803 - DNA, 197 bp, Homo Sapiens
gaatggacattttttaaaaaaacatcagtacttcctaccactgctgcatgagtataatgctccggaattatcagaaagcataatgcagaaatacgaattagtggaacttaatcatgtgccatataagcttacctaacaaacagttatatccctattcctcaactgaatgtctttcaataaataagaatttatcattt

SEQ ID NO: 359804 - DNA, 650 bp, Homo Sapiens
  misc_feature (73)..(73): n is a, c, g, or t
  misc_feature (77)..(77): n is a, c, g, or t
  misc_feature (80)..(80): n is a, c, g, or t
  misc_feature (110)..(110): n is a, c, g, or t
tttaagagttccggtttaaagaaaacaaggtgtaattatttggtattagtagcatttacatatgcttgaaaantttntgntatatatccagtaagattaatttattctancaatgttttgataatccccctgattcccagactccttggaatagctccacagctatcagtggttctgccacaggttcagagccttcccagtactggccttcttatttgagaggtgtgctaagagctataaagcagaggcttcaattgtacacagtttggaagtttaggcaaaagtcatttcttccctatattttgtcatgcttatctcctgtctctttctgttttacagattagcaataaactccttaaaacccaaaggtttgggcttctgttcctttcacttgcagtcagacatggagttagtggtagaagaaacagaaggggtaacctgcatggtgacagctactgaggggatggataggaaagcaggctgagtccctggggccagtggttaccaaagccaaggagagagcaaggggagcccagtgggcctggccatggactgctctggaattccgagtgtgaactttcagccaagaaggtagtgtgaaaatattactgtgagggtttaaaagtacacaaataacaattgttttttat

SEQ ID NO: 359805 - DNA, 1195 bp, Homo Sapiens
  misc_feature (55)..(55): n is a, c, g, or t
  misc_feature (71)..(71): n is a, c, g, or t
  misc_feature (86)..(86): n is a, c, g, or t
  misc_feature (182)..(200): n is a, c, g, or t
cagacttccctcaaataaaatccttaagcctttttcatagtctttaattaaactncttctcttccattatntccctttgcctactnttgaactgatattcagaacttttctgttaatgtttaattttcatccattattcttgtctgtacagatctttttgatttttgactctcttatctagnnnnnnnnnnnnnnnnnnnggcttcccgttgtgttatccacaggcacaatgggtatattgactatcgttcattgaagttgttgatacaaatgttgaacaggagaaaaaccagtagcttgccaacttggcacctcattctctagcttgacagtaatctcttatctagtagtttttagatatggttatttaatcaaatatcactagcttctaattttgttataattcattcatgtatacagacaatgaagaatcatctttcttcattcaacacatttattgggaaccaatcattgtccaaggcaatatgctaggcattgtgtaatagaaagcgattaagcttttacccctgtcctctttggcctgcaaagagcaggtaagattcatgcacagacaaatgtagtaccaggtaaatagtgaggccaaacacaagaggcaggtcaaagggctttggattcagaggatggagaagctctttctaggctggtgaaatatttgcagaatgagtaggctcataagtggaggtgaggtacaggctaagctgctgtaagaaagagtccaaaatgcaaaggatttaccacaatgcagttaatttttctcacaacggtcgaggtaggcacgtggtccaagtccagttaatcagccctcctcaacacaagggcttccccttgtaagctcaggatgacccgctccaggttctcatcatcccccagggcagaaaaacggggagaacagagaaactaagacggtacccaccccaagtcatttttaaaggaacatagccccaggcgccaggggggccaaggggacttcagccatccttgttaaattcccaaagccacctttttgggggaaggctccccaagggccttggaagggaataaacctttggaaagcccaagggaaatttttgagaaaccctagctttggggataaagaaaaagccacagtaccccttggggcctcccacccaaaaaaatttttccccctgtctcccttaaccacccaggaatacac

SEQ ID NO: 359806 - DNA, 704 bp, Homo Sapiens
  misc_feature (21)..(21): n is a, c, g, or t
  misc_feature (25)..(25): n is a, c, g, or t
  misc_feature (35)..(35): n is a, c, g, or t
  misc_feature (60)..(60): n is a, c, g, or t
  misc_feature (64)..(64): n is a, c, g, or t
  misc_feature (97)..(97): n is a, c, g, or t
  misc_feature (156)..(156): n is a, c, g, or t
  misc_feature (171)..(171): n is a, c, g, or t
  misc_feature (178)..(178): n is a, c, g, or t
ggccggacttaaaagtgtccnccgntttttaaaantgtccaagaaaatggtaagaatggncccntcaaggtggatggtaaagtcagccttttaagcntcaaggccggtgtggttgtagttggggtggggttgaggccccgaagcaggcagctaccncagtagccccgatgnaagcagnagaatgaactgaaaggacggctgtggaacgacaacgtgatgagaataaacccggttggttctgccctgtgcacacacaggtagctgtgtgctcccggatgtgtcagctggtatatgcgtctgtcagaaggcagctggggagcactgttagctcagagactaagaggcagacccaggaagcccttctttgcattggtcagggtttgctgcattttcccaagcccaggaaatggaacccagttcttcttctttctgtgtaaaataataagcatcacaataggctgtgctcatgagaacgcattttgtttccacagaaatgttttctctcactctgtcctgattttgatttctgttaaactcagtaaacacattaccaaattttaaaataaggtgacttgttttccccaactcacagttcaccaaaggtatttcatctgtttgttctgaaaatgcagctgctgtctagatttatgtgtgctctgacaagaaatgttttgtgtaacaataaaaatcatttcctttgatga

SEQ ID NO: 359807 - DNA, 591 bp, Homo Sapiens
  misc_feature (254)..(254): n is a, c, g, or t
  misc_feature (527)..(527): n is a, c, g, or t
  misc_feature (548)..(548): n is a, c, g, or t
  misc_feature (556)..(556): n is a, c, g, or t
  misc_feature (563)..(563): n is a, c, g, or t
gctaattacaaatacaggaaaatggataggccatgtgtttataagtttgagctcttgagccagtgacttccctgcacgttcagctttctcctttgtgaaatggtaatagaagcacgctgcacttgggattcttgtggattacatgtgagggtcttagaaacacttgatgtgtaagccaactattatgtattactgtatatggaacacaagggatgtagccaaaactaaatgcaagtttgtgcctcagatgtctntcctatcagaacagagtcaaatccagattttgatgcttaaatgtgacagcttattcagatttagaaaaacttttggtatgggccaaagaaaacatatccttaaggggatatggcccctaggcctccattttccttttctgtctgagcaattaaaaaaagcattaagtaaattccacaaattctttggaatacctagagataaacagatatcatgttaacctgtatgattaataaagttagaataccttgcaaccaaaaatggcagaagttttnctagggaaaaccaagtaatcnattccagnaaattanggaatatgaaataggttccctcaggttc

SEQ ID NO: 359808 - DNA, 489 bp, Homo Sapiens
  misc_feature (64)..(64): n is a, c, g, or t
  misc_feature (69)..(69): n is a, c, g, or t
  misc_feature (113)..(113): n is a, c, g, or t
  misc_feature (121)..(121): n is a, c, g, or t
  misc_feature (182)..(182): n is a, c, g, or t
  misc_feature (200)..(200): n is a, c, g, or t
ccttttgattcaccagcccacaccccaatttggattggcaatttggattggcaatttgggtggnggccntttaaaggttgttgtgctaatgaaggcttaaacgttgaatcccngtgaatgnaaccctcttcacatctttactgcttgtcctgggatcttcacacctggaatattgatcttcnccgagtaatttggaaaancagaggcagaggctgaagctgctcaccgtcctatggcagggcaggtaatgtccttaatgagatgggcttattccagtggagcagtggtggggaagcaaaagccttggtgttctctcctcatggttgcgaaaatattcacataaaagattcactagctactgttaataattgaaggactttcctcaaaatccatgtattataacggtttaatatactaaaatgatttggaggaaatcggcctcagcattggtgaatgtgttgacatatgaagctattatttttataattc

SEQ ID NO: 359809 - DNA, 1052 bp, Homo Sapiens
  misc_feature (727)..(735): n is a, c, g, or t
agcggattagtaatattcctttggattcagagacccacaactaccagattgtcaatcatgaccaaaagttgcttctcatcacttctacaaccccacaatggaaaaagaaccgagtgacagtgtatgagtatgatactagggaagatcagtggattaatataggtaccatgttaggccttttgcagtttgactctggctttatttgcctttgtgctcgtgtttatccttcctgccttgaacctggtcagagttttattactgaggaagatgatgcacggagtgagttctagtactgaatgggacttagatggattcagtgagctggactctgagtcaggaagttcaagttctttttcagatgatgaagtctgggtgcaagtagcacctcagcgaaatgcacaggatcagcagggttctttgtaaatagtattttgagacactaagatgtttctactgctacggaatgtattttaaacacatatcgtttctttttcttggaaaaaaagttgattaggaccacagatttggtttagaaagggtaatattttgaaatactacaaggtttagacagtccatgaaatcgacctgtttaataatttaccatcctgaaagtccagaattaaaatatggaagcaagaactatataattgattaggatgcttggtaggtttttttcattgttcaaatattcattgcacagtggattgttttgattagttagtatgcnnnnnnnnnaattaattcagtcttctgttaatttttaagttttggttagtgccacaaggaatttaactttttgatttgtataatagaaaactgaactaggaattgttagcggggttttgaaggatgtgtactttccttcaaaataaagtggtagattttcaaaattttacactagtcagttctttatattctaagttaaatgtagtttgtaaaattattttggttttcttctacaaaggaaaaaattggatttatatatataaggttactgcataatgatttcattttgataatgtgcagaatggcctcataagctcacagaaagt

SEQ ID NO: 359810 - DNA, 644 bp, Homo Sapiens
  misc_feature (80)..(80): n is a, c, g, or t
  misc_feature (548)..(548): n is a, c, g, or t
agagtttggtttaggatgggaactgaatttttgaccgaaaggaaagagaaaggatgaaaacccaaccaaccaaaaaaccncccgataatgtttcttagtcattttgattggccatttgaccagtctacaagtttaacgttatttccagtgaagtaggatggctgacctagcaatacatgtttcttcaaaagggtaaacatgctttagtgacctaaagctaaattttgtacatttgacatccagggatgttataagtactgcacttaatacaaagctatttctcaattgtgttatttttgagacaaatttttcttcaccattaacttcttgttggtagctttttgttttgtaaaaattgagagatggcaatgcttatctcaaccagattatccatctgcagaattaaggtatgcaactggtaaataaaagacaaatgctccagtttgtctttctcaacctttgagttcttaacctttgagttaaaacctagtctaaatagtgggaatgtcttggtttacagtaaggttttcttgggaaggatcttgctntttgtgatctatttgtgaattaaggagtaaatgttaaccattattttatagataagtgatttgtacatggttagttataaataaaactggtactag

SEQ ID NO: 359811 - DNA, 1501 bp, Homo Sapiens
taacggtctaggtgcgaggctgggtgtcgaattcggcacgaggctgtgatggccgattccttccagatcaaggttaacctgatgactgtagaagctttagaggagggagactattttgaagccatcccattaaaagcctcaaaatttaacagcgacctaatagattttgcttctaccagccaggctttcaacaaagttccttcacctcatgagacaaaacctgacgaggatgctgaggcttttgagaatcatgctgaaaaactaggtaaaaggagtattaaatctgctcacaaaaagaaggattcgccagagcctcaagttaagatggacaaacatgaacctcatcaggactccggaaaaagaagctaaaggctgtccttcaagcccaaaaagagacaccagtggataaaaagccagaggtgcatgaaaaggccaagagaaagtccacccgtcctcattatgaggaagagggagaagacgatgacctccagggtgtgggcgaggaattatcttccagccccccaagcagctgtgtcagcttggagacccttgggagtcacagcgaagaaggcctggatttcaagccctccccacccctctcaaaggtttccgtcattccccacgacctcttctatttcccacactatgaggttcccctggctgcagttttggaggcttatgtagaagacccggaggatctaaaaaatgaagaaatggatctcgaagagccagagggctatatgccagacctggactccagggaggaggaggccgatggctctcagagcagctccagttcctcggtgccaggagagagcctccccagtgccagcgaccaggtgctgtatctcagcaggggtggtgtgggtaccacaccagcctcagaacccgctccactggccccccatgaggaccaccagcaaagggagaccaaagagaatgaccccatggacagccatcagtcccaggaatccccaaacctggaaaacatagcaaaccccctagaagaaaatgtaacgaaagaatcaatcagtagtaaatcaaaaggtaaaaaggaaacatgtggaccacgtagaaagttcactatgtgtagcaccaggaagtgttcaatcctcagatgacctagaagaagacagtagcgactacagcattccctctccaggactagtcacagtgactccagcatttaccttacgacgacatactcataggtcttcggaatcggatcattttagctatgttcagttgaggaacgcagcagatctggatgacagaagaaaccgaatattaaccaggaaggccaacagctcaggagaagccatgtcacctggggagccacagcccgcagagtgactccctgacacagcttgtccagcagccggatatgatgtattttattctcttcctgtggctcctggtgtactgcttgctgctcttcccacaactggatgttagcaggctctgatacgtgtgtctggataataaaaaagacaggaccctg

SEQ ID NO: 359812 - DNA, 782 bp, Homo Sapiens
  misc_feature (700)..(700): n is a, c, g, or t
  misc_feature (732)..(732): n is a, c, g, or t
actggttaaagtatttcatcagttgggcctaccaaatatcaagtcaggatttggccatctctgctcttgccattccacctctcacgactctatcctcaaaacctgggcttggctgggaacaagagatttaaatcagactcttttaggttttcctaataagactgctacaaataaggattgagccctagctgaaggcctcatccttccatgccctttgcttgtccacccatcaacaagccaggatgaggagaagcaaagacagcagcatttacccacagaaccctttgttggcagaagcaaaaattgatagtggaacacatgagggcagttccacaagatccgtccatgaagagtcggatttatcaagaaaaatattattctttcgagaacaagaaagaaaacaagacaatttaaaaacatctagattaaagatgagcatgtcaatttcaggtgtaagtggcctcgcaggaatgaaaggctgtgctgtctgtataccactgcactgttgcctccctggagaactttatgccttaccctggaagcaccctatcttcaaagcaggggtgtttgaaaattcattcccataacagtgtggagcacatcgagaaagactgtattgaaacttccagatagaacttatgaggacccagacccagcaatggctgtgaggatgaagaggcaatgggatctgggacctcanatagatccaagaaatatgcagcagtggggaanaacggccttgtatagatccttgatgttagaaggaaaagtgagatgaatga

SEQ ID NO: 359813 - DNA, 827 bp, Homo Sapiens
  misc_feature (22)..(22): n is a, c, g, or t
  misc_feature (69)..(69): n is a, c, g, or t
  misc_feature (74)..(74): n is a, c, g, or t
  misc_feature (107)..(107): n is a, c, g, or t
  misc_feature (109)..(109): n is a, c, g, or t
  misc_feature (121)..(121): n is a, c, g, or t
  misc_feature (138)..(146): n is a, c, g, or t
  misc_feature (151)..(151): n is a, c, g, or t
tcccaaaggccttcataacggnatttcccccaaagtgtatgagaatgtcatttcccccatatacccatncttcncttgatagtttttatctgttggccaaaaaagancnttttcttatttngcatttccctgattatnnnnnnnnntggtnagattggggttattttcatgtttattgcccatttatagtttactgtggattgtttgtatcccttacctgctttctattgggttatgtgtggatatattgtttttatttgttcagcatctccttccccatcttctggtaacacaacctttatttatttgtggggaacctattccctgtggcttaggtgagcatgtgaccaggcctggcctcctgagtcccacagcttcctagccacagtgataaaagaatgggtatataacttaagccaggctaaggaaagcccttaacagaacttctgctggaactactggaaagaaggctttatggagatcccaggaaccaaggaccatgtaagcctgaatttgtgccatgtggagagagtctgtctgaggagaaactcggatgctagcagaaatggaaagagaactaagttctgatgtcatttttctggaggccctagatccagctgtgcctaaagcctgccctacctccggactttaaagttttgtgagccaataaagtccctttcttgtttaagataattgaattgagtttctgttctgattaatataggttatttgtattttcttattgatttgtagaaaacctttgtaattttaaattctagactttatgccctatataagttaataaaattagcatggccttcaaaaaa

SEQ ID NO: 359814 - DNA, 1252 bp, Homo Sapiens
  misc_feature (99)..(111): n is a, c, g, or t
tttttttaacatttctgagtattttatcaaccatcacacactgaaactataaatacattttgttatgcaagctgaatactaaacaatgagacagaggannnnnnnnnnnnngtttaggagggacaaacacaaagctcattttctatcaagttaaaataaattagactaacaatggaaggctctttctttcttgtaattcataattctatctggaactctgcctctccctttcaacatcattttgtcaggatagacatgaactgtgccaaaggcttggctgtctggagctgtttcaataactccttctaggttgacgtggtatacaccaaaaggatcctcagagtagccaccatcatgggtgtgaccagcaaagaaacacaccacacactcatgagaccaaatgactgccagggcatctctgtagttccaggccaggcacacattgtcagaggcgtccgggtaaatgggaagatggctcacaatcaccaccttttcttggtttgtgtcagagaatgttagcacttcattcaaccagtttagctgttcttggctgaatcctccattaaactggacaaactggggctcagaaagtccttgaggactattcagttccgtatttggattgtgctccctcaatatcttcatacactgctcgtattttggagaagactgatccacgcccaagacactcaagtcatatgcatcaagtaaaatgaaccggaatttagggaatggtacaaaatgataagcataataatcttctgaaggcatggtctcaggatgatgtacaatctgatcttctagaaacttagtgttaagtttagagtgtgttaaatactctctactgaagttatagaattcatggtttccccatgtatgatgaactggaactttaagcctcttgaacatgtccataacaagttctagggactttttggatgcattatactgtgcattatatccatcgatgatatctccaagctgaaggacacaacagggcatgctgctttcattattccagtcttcaatggcaccctgtaagtgaagaagactatgtctgtagtatcgccgcctggttccttggaaattaaagccatcttctaagtctgcaaattgaacatctgcgatgacgccaaaggagaaaagacgctctgaactgtcacttagggcttcaggattgggtttatcatcccataacctcccaaacaggtttcgtgcgccgggcccctgggctgaaaaaaagccagtaggc

SEQ ID NO: 359815 - DNA, 859 bp, Homo Sapiens
cgggtaaatgggaagatggctcacatcaccacccttttcttggtttgtgtcagagaatgttagcacttcattcaaccagtttaactgttcttggctgaatcctccattaaacttggacaaactggggctcagaaagtccttaattgtccatcttcctgcgtgaataaaaggtagctgaagaatttaaagaccatctattagattctcagctcaaaggaataattcaccttgaggactattcagttccgtatttggattgtgctccctcaatatcttcatacactgctcgtattttggagaagactgatccacgcccaagacactcaagtcatatgcatcaagtaaaatgaaccggaatttagggaatggtacaaaatgataagcataataatcttctgaaggcatggtctcaggatgatgtacaatctgatcttctagaaacttagtgttaagtttagagtgtgttaaatactctctactgaagttatagaattcatggtttccccatgtatgatgaactggaactttaagcctcttgaacatgtccataacaagttctagggactttttggatgcattatactgtgcattatatccatcgatgatatctccaagctgaaggacacaacagggcatgctgctttcattattccagtcttcaatggcaccctgtaagtgaagaagactatgtctgtagtatcgccgcctggttccttggaaattaaagccatcttctaagtctgcaaattgaacatctgcgatgacgccaaaggagaaaagacgctctgaactgtcacttagggcttcaggattgggtttatcatccataacctccaacagtttcgtgcgccggccctgg

SEQ ID NO: 359816 - DNA, 922 bp, Homo Sapiens
  misc_feature (106)..(155): n is a, c, g, or t
  misc_feature (806)..(807): n is a, c, g, or t
gcctgttggcctactggaatgatttgaactaagggccagcaaagaattatccctggtttttgtgctttgcagcattcctcaaattgttttcacatctcttaccatnnnnnnnnnnnnnnnnnnnnnnnnnnnnnnnnnnnnnnnnnnnnnnnnnngcaattttagcgttcaagaaactcagacccttttgaaagaaattacgaaaaggaaagaagtcatcttttccaagcagctcaatacaacaattaatgtgatgaagcgaatggcttgggaagagattgcacagtgtgtgaatgctgtaggagaaggagaacagaggacagggacagaggtgaacaagaaggtaccttgactggcgagcacttatgaagagaaagaggatgaaggccaacattaagctggttggttcaggatttccccttccctcctctgatttggataactctctcactgaagagatagatgaaaagattggattcccgaaatgatgcaaattttgactggcaaaatgtggcagatttcagggatgcaggtggatccttaactgaggtcaaggtggaagaagaagaaagggatcccaaaagtcctgaatttgaaattgaggaggaggaagaaatgttgtcatccgtcataccagattccaggagagaaaatgaacttcccgatttcccccacattgatgagttttttacccttaactcaacaccatctagatctgcatatgatgagcctcatttgctcgtaaatattgagaaacagaaactagagttggaaaaacgacgactggatatcgaggccgaaacggnncaggtagaaaaggaacgcctacaaatcgagaaagagaggctgcggcatttagacatggaacatgagcggcttcagctagagaaggagcggctgcagattgaaagagaaaagttga

SEQ ID NO: 359817 - DNA, 939 bp, Homo Sapiens
gaaccattcaatacaacatgactaggacacgagacaagtaccttcacacaaattgtttggcagctttagcaaatatgtcggcacagtttcgttctctccatcagtatgctgcccagaggatcatcagtttattttctttgctgtctaaaaaacacaacaaagttctggaacaagccacacagtccttgagaggttcgctgagttctaatgatgttcctctaccagattatgcacaagacctaaatgtcattgaagaagtgattcgaatgatgttagagatcatcaactcctgcctgacaaattcccttcaccacaacccaaacttggtatacgcccctgctttacaaacgcgatctctttgaacaatttcgaactcatccttcatttcaggatataatgcaaaatattgatctggtgatctccttctttagctcaaggttgctgcaagctggagctgagctgtcagtggaacgggtcctggaaatcattaagcaaggcgtcgttgcgctgcccaaagacagactgaagaaatttccagaattgaaattcaaatatgtggaagaggagcagcccgaggagttttttatcccctatgtctggtctcttgtctacaactcagcagtcggcctgtactggaatccacaggacatccagctgttcaccatggattccgactgagggcaggatgctctcccacccggacccctccagccaagcagcccttcaagttcttttatttctgggtaacagaagtagacagacaggttacttggtgtatcttctgttaaagaggattgcacgagtgtgttttcctcacacactttgatttggagaattggtgctagttggcaatagataactcagcgtagatagtattgcaaaaaggggaggaaatacacaacaataataaatgtaaaaacctgctatttcacatgcagt

SEQ ID NO: 359818 - DNA, 521 bp, Homo Sapiens
  misc_feature (36)..(36): n is a, c, g, or t
  misc_feature (69)..(69): n is a, c, g, or t
  misc_feature (82)..(82): n is a, c, g, or t
  misc_feature (87)..(87): n is a, c, g, or t
  misc_feature (112)..(112): n is a, c, g, or t
aaatgttcaaaagagatcgcgtttgtaaaagcaggncgtaataccaagtttgggttgtggtgcaagggnaatttgtccaggncaggnagttgcatgatctcctaacatcatncgcaatcacttccttccaatgacattttaggtcttgtgcataatctggtagaggaacatcattagaactcagcgaacctctcaaggactgtgtggcttgttccagaactttgttgtgttttttagacagcaaagaaaataaactgatgatcctctgggcagcatactgatggagagaacgaaactgtgccgacatatttgctaaagctgccaaacaatttgtgtgaaggtacttgtctcgtgtcctagtcatgttgtattgaatggttcttattaccaccaggatcaggagactccccaaggagatttcagttaaaactcgttctgaataccaagtaatattttttagtatcacttcatgaatggatctgttgaagccatcatcttccgtaaggatcaacaatattata

SEQ ID NO: 359819 - DNA, 968 bp, Homo Sapiens
  misc_feature (26)..(26): n is a, c, g, or t
  misc_feature (103)..(103): n is a, c, g, or t
  misc_feature (109)..(109): n is a, c, g, or t
  misc_feature (123)..(123): n is a, c, g, or t
cttcaggacatgtcatgctgtctccncaaaggagaaaagaaaaggtagtaaaagataaaaccagttcttaatgcagaaaggtcacctactaaaagaaaatgancataanaagataaaagcaanctaccatcattttgatgcctcccaaagagaaaaatctttagttatcttcaacataaactgccaaggagcacaggtacggtccagacatcacggtaaatatgcataaaatattgtctagctggataataaacaccagcagtaggaaaaaggaggggatgaaaatgtctcacacccagtaacttttagtgaacatagcaaaatgagcaggccatctgtcaactctaaaatgggaacagcaggcgcctctgagggagataggaacgtagctaaatgatggaaaatattaaacaagatagcttagaagattcatatttattccaaatgggaggctgaatctctcagatgtcgattttgacacattggcactatttttgtttctgatttattgccttggccgtaagttcaaaggcaacaataaagtgtactttcattaataccaccatggactttcgagtattaatatgacaagaaaagacaactattcattttttttaaggggactggacacacaaacttcaggagggaagaatcccctctcccattagaatccctctatcttgataaaatggttgctttattggtcagattttggacttggatcgtctgttataatattaatagtacacagcatgtaagattttctgcattcatttgaaattcctaataccaaccatcttttaatttataaaaaaagagggaaacttacaataaaacaaaaaatactaccctcacagatgattaatagcatgcaatctatgaaatattacatacattaaaagtctccaattactgtgtgcctgacccatcacacagtatccttccaagacaatctatagaattcaaaa

SEQ ID NO: 359820 - DNA, 639 bp, Homo Sapiens
  misc_feature (421)..(430): n is a, c, g, or t
cactgttggcctactggattaatttactcgcagttgctgctgctcaggaagagagacaaggaatattttaacagaatcaaggcatagaagaatcaccattttatttgagcctctaatcagagtcagaccagtagagaaattaaataagattagaaaactctgtactgaaagctgctgatgcttcaaaaatgaaaacaagatctcacaactctccctgttagttgaaaatatatcaatttgctctgaaaggattcagctgcctagtgttgccattactaacataaacatatggctcatatttccatccagagaaattaatgctaaattggtgcctcgctaacatcagatacactgtattatgcttaaatatattcagtaaaatgtggaaaggggtattaacaacgacaacaaaaagatggannnnnnnnnnctcacaatcacagttgctaatccagtgggagatgtttgagagagttttgttcaacatcacagtgagagtgcctagggaaatcagaaaattacaatggattcccctttgattgtaataagtgttgattttctccatgagttggttatcctgtctagtgatttgatggtgaacttttctaaataaatagccctttcccctccggtgtcggt

SEQ ID NO: 359821 - DNA, 1081 bp, Homo Sapiens
  misc_feature (46)..(78): n is a, c, g, or t
  misc_feature (973)..(1004): n is a, c, g, or t
gatgatcgatcactatggggactgagcttacgcggggcggcgcatnnnnnnnnnnnnnnnnnnnnnnnnnnnnnnnnnatcaggccaaatcggccgagctcgaattcgtcgagagcgaggcagcgagtttcgctgaaatgattaaagacaaatctttctgtgcagatagataatgcaaaacaacaattcctttgattttctactttaatttctcaaatgcgctagatactgtgcgtcaccatggcaacacagtttgcaaacaaaaagtaggaaatgtttgcttttcaagtacagcttctcacttgaatactcaaacattctcagtgccttattcaaggtttattaacgagttgaatatgctttctattcacttgtgtgtcacagacacattaaatgacaaatgcaggtctctgtggcccgcactctcagttaaattagcaaccttcagggaaggagacaactgcattcatgccattttaacagcactaaaaataaagctatgccaagtgccgacagaacagtgggtgatcctagctgccactggcaatgtacacaaacaggcaccgccggggagccccttcccagcaggtggcagtcaaacagtcaccgtgatcccgccaacggctgtgtttgtgtagactccctgtgtcaaattgaggcgtgggacaaatttctgatcgtaaatagtattatattcccttacatttttaccagctgtgaaagatcttaagtagtacgatagggaaggtaaaactacccatgtgcttgacctccagtttttattcttcaagttcatctagtttgacagtagaatccaatccatttttaaaacggaatacctgaaaaactgtatctctgttaacagttttataaagggtgaattagcactgcttctcagactcttacttttgttgctggagaagggaaattccggttcactgggaattttcttgttttgctttgcttgtttacnnnnnnnnnnnnnnnnnnnnnnnnnnnnnnnnaattttaaggaaaaggcagtttatgatagggatttcaggacttttaaaattgttttatcttgctatcttacgtggtg

SEQ ID NO: 359822 - DNA, 691 bp, Homo Sapiens
  misc_feature (19)..(19): n is a, c, g, or t
  misc_feature (49)..(49): n is a, c, g, or t
  misc_feature (52)..(52): n is a, c, g, or t
  misc_feature (55)..(55): n is a, c, g, or t
  misc_feature (105)..(105): n is a, c, g, or t
tgcaggtctgctgcccagncatattgagcgaggcaactttgaccccagnttnagnccgattttgtgaagcatctttcactctttctcttttctgggaatgtgtgncaggttgtgggtgggtagtgtgtgtgtatgctggacttctttgaaagatgtgggacccaagaagatcactgtgagagtttaaggagacagttaatgacatgtgtttacagccattgtcacacaacagcatctgtaagaagattggacgtgattatctggatctagcttgaagtagtcaaggcaaagatataattgtgtagtcttgaagcccaaataaatccccaaatgaacaaaacaacccacaatgaattatatcatgtactttgcaaaggtagctaagcttagggaagacccggcactgcactaacctcatctctcttggttattcacaaaaacaatttgagtctaagggcaaggcacctttgtcagttgcccattccattactaatgttggactttctttttcattcaagcctgacaaaatgctgcaacctgacatcccagcaggcagttttcactattgtactaactactccatctgttatgaaggtcacaagaatgtatcttgttttaaatttttctatggagtgatttattgtcttggctataaatttgtaaagaaataaaacgctatttcttcatcgtc

SEQ ID NO: 359823 - DNA, 1074 bp, Homo Sapiens
gctggaccggtccggaattcttcgatagatatttttacacatcagtgatgtatgtatagtaaaacttgggggaaaaagttccaaatacaagcctgaagaattgctgcagcctcagaataaagctaagcagcattctttaaggttgtgccacccatgtgtgggaggaggttgacatctttatggaaacatcatccactgtagtcatttgttcatactttcagaatcttaacagaaattgttggatgaacatgcttctgctttgtagattttgccttagtgtcatgcccatacattgagtttacacagctggtccttcataggattccaaagttcaagggagtttttagagttagttgagaaacttgatgatctttcacctgctgggaaaaactgactccttcttgcagcagattctttggctttacacacaagtctgaatgtccttattttaaagttttcctcaaaggtgcaacattcatggaatagcttgccaggaagatgtgaaacttttctacagacctttgaaatggatgagaaacattgtatgtagggatgtttagcaatcagtcttttaatagacagcccacattgtttcagcttatttcatgaagtgtctgaggcagaagctgatgataattttgggagcagtattcgtgtgtgatttaaaagactgcaggaatactgcaaaaatagaatccatttattttcaccacttaaggcagcttcatgtgatttcctcgtatcatagaaaatagagaaggaacatggatagcattagcactaataatacacacttgaagttctcagaatactgatgattgaaaactcaaacaactgctctgttgaagtcttcttttgatgagatgcctatgttagctgacgacattcactttaagggcttcttcactggattcttccctctcctgtttataatgcagcacagtgtttttatttttccctgtctgagaagcacagattatctgttaaatgctgacttctttcccctgctgtgtgtcttcatgtaacagtttctcacccacggataataaatttgctacatgctctgatgacggc

SEQ ID NO: 359824 - DNA, 1491 bp, Homo Sapiens
cccgtctcccatctgacccctagcactgtcgcgttctgcgcgtcccgtcccgcgatcccgcgtcccctctcaaggttagcactgcagtgccggttccactccatatttgggccttgtagaaatgttttgctctgtgagattcacgcggccgccttccgttgtagaagtggtcttcacagacaggtggccactggaacccctgcttccgctcagccagcctagcagtgccggtcgccacacaggtctgcatgttggtgggcaaggactttggaagcagtctcagagcgacactctgaaggttcagatctgttcattggaagcataaccatcgtccagatcaagaactcctttgggctcagatgacacagtgctccgtctgggaaccactcaccaggtccatgcagtggagaattttcagtatcttgcagaagcattctgggtgattttccttcatggccaacaataagaacttctctccccatgttgcacagcaagggtggcacgcccttctctccaagtccagaggctgctgctaagaacttttccaagagggcttccagtgttagtgagcgcacttcagggaaggcagattctaacagctgagagaaagagatggggacattcgtctcccgctctccactcttggctgccgcggcccacactgcagcaatggctagtctggtgaggctctggaggtactggggcaggcctggcaccttgaaggcccaagggaatcccgttatcagctctgatcctgagataatccctctgacttcctcccagaagccaagactctccagaactggctggttgtcctttgcagatctgttgaggcagcaagtcaataggaagagaatatcaatatatacagctctggtcaccaaacatggattttgcctcttggccagccagagtttggctttggtacaaacagtgatgtcagtcagctcgtgctggaagtctgaattcgttccgtgtttggagtctgagtaggctttgcaacaaatgaaaaacctgaagaagtgtcccatgaatgtggttttgccggaaacactggtcagtgcagctggggagtgtggacaacagagttcgaatggtattaggaatgtgatctatcataacaaatgggaccaaggcacgagctgccatttcacgggagtggtagacaggtgagtgaccacacctcataatgaagggaacaaaaggtcccatgctgagagcagaagaagtaccatccatcggggaagcgtagagtctctccaacaccaaaagtaagagaaacatgcttggatgacgatttggttctcccatatcactgtctactgtattggctacagtttccaactgtttgagaagaaaaggatagagttctgggaaacgagagaaaaactctctccctgtcattctatttgttttggaatgttcatcctttgcccttttaactccaaaaattcttgtgatcaaggcactaaagagaagtgtggatgaatt

SEQ ID NO: 359825 - DNA, 872 bp, Homo Sapiens
ggagaacttcgctacgccgttccacgggcacgtgggccgcggcgccttcagcgacgtgtacgagcccgcggaggacacgtttctgcttttggacgcgctcgaggcagcggctgccgaactggcaggagtggaaatatgcctggaagtagggtcagggtctggtgtagtatctgcattcctagcctctatgataggccctcaggctttgtacatgtgcactgatatcaaccctgaggcagcagcttgtaccctagagacagcacgctgtaacaaagttcacattcaaccagttattacagatttggtcaaaggcttgctaccaagattgaccgaaaaagttgatcttctggtgtttaatcccccctatgtagtgactccacctcaagaggtaggaagtcacggaatagaggcagcttgggctggtggcagaaatggtcgggaagtcatggacaggttttttcccctggttccagatctcctttcaccaagaggattattctatttagttaccattaaagaaaacaacccagaagaaattttgaaaataatgaagacaaaaggtctgcaaggaaccactgcactttccagacaagcaggccaagaaactctttcagtcctcaagttcaccaagtcttagcatacagtgtgtgcccagaactactggaaactgaatgcatttagcatattttgaaactgaagtcattcattaggtaacaaggaattttatcagaaatttgtcattaaaaaaaaggtagaaaggtggaacattccctttcagtcaggcctatagaattatttgcacaagtacaagtaaatatgtgtattatatttatagtttgcattttaaatataaaaattatgtatgaaatatt

SEQ ID NO: 359826 - DNA, 766 bp, Homo Sapiens
cctcttagaaactcactaggtgcacaaaggaacaattctgtctctgcaactaagtggggattctttcttgtatttcctaaaactctaaaagaactctaatttttaatatatttttggaacccatttgcttgaattttttcccttgaaaatgattgacaaattgaatgctgtgttatcttaacagtttccttacatcttctttaattgctgtgtcatgcacagtttttcttcacttatgttttgaagagaatatgttatccttcccccaccctaaatgttatccctttttgatttgaaaaggcacacaacttaaacacatgaaatgaagataatttccatgctatttaatgtaaatttggaatcttctaaagtaaaaatattaggggaccaagtagttaatgtctatattaataaaggaaaagtgaatacaccacctctgtaatgttagaagacagaagtactcgggaactgtaaccatgtgtacatttcaagtaagatgaaaattgagcataccacaaacaggaagacagaagtactcgggaactgtaaccctgtgtacatttcagtaagatcaaaattgagcataccaaaaaaatcatcgattaaataacattccaaatgtcctcagcaagtagactttgttatgcatgcttgggattcatattaagatatagccaaaagaattcatgattccgttacctccttcagaaattgaaaacaatgatcatcaaaggtcaaagataccttcttatgggacggaagatca

SEQ ID NO: 359827 - DNA, 643 bp, Homo Sapiens
  misc_feature (56)..(56): n is a, c, g, or t
  misc_feature (72)..(72): n is a, c, g, or t
  misc_feature (83)..(83): n is a, c, g, or t
  misc_feature (94)..(94): n is a, c, g, or t
  misc_feature (111)..(111): n is a, c, g, or t
  misc_feature (117)..(117): n is a, c, g, or t
  misc_feature (125)..(125): n is a, c, g, or t
  misc_feature (134)..(134): n is a, c, g, or t
tccatggtttggcccttgcccttgcccgtcctgtgtgatctgctccaaccagtggnaccagttggcccttgnactgcccatcntgttggaatgncttgttggaaaagagtnatgacntcgtggcntgtgtgaanagcatgcatcaggtgaaagaagactacctgtttgaaaaagcagaagtcaacttttggccgagaccctgatctttgtgaaatacctctgcaagcacctcttctgtctcctctcaaagtccggctggcgtcccccaagccctgagatgctctgtcaccttcaaaggatggtgtcagagcagtgccacctcctgtctcagttcttcagagagcttccaccagctgctgagtttgtgaagacagtggagttcacaagactacgcattcaagaggaaaggactttggcttgcttgaggctgctggcctttttggaaggaaaggaaggggaagacaccctagttctcagtgtttgggactcttatgcagaatcgaggcagttaactcttccaagaacagaagcggcatgttgaagaaaatctgggggattgggatgggggtatgtgtggatttttcctccactaaatctgcaggaaacatgttgaacataaattcaaaaattttatccaaaaagg

SEQ ID NO: 359828 - DNA, 699 bp, Homo Sapiens
  misc_feature (466)..(466): n is a, c, g, or t
  misc_feature (551)..(551): n is a, c, g, or t
  misc_feature (623)..(623): n is a, c, g, or t
  misc_feature (659)..(659): n is a, c, g, or t
  misc_feature (667)..(667): n is a, c, g, or t
tttcctttttttggagttttacaattttatttctgaaagtaaataaaaatccaaggacaacttttgagaatattatctaatatgtggcctgacttaaaataataaagaaaacacttagaaaatcttactgattgtgaacagaaatacaatcatatggaataacactgtatctaattgtggacatagaaacataaagaaaaactgtgcatttcaaatagattcacaaggctcattctgataacagaatcacagatatcttcagtgtatcatatagaaaactgtgtgtaaaataaagtattagattaataccagcagggcaaactgacagtaatagtttaacaagagattgaactagaagtttcacgaaagaaaaacaaactgtaagaagtctaacaccaatgagtgaaggaagaagcaaaaacctacttacattgtattgaatgtaatacattgaagtcatcattgnattgaataagaacataacttaggtttataacagagtttattatcaggttggaaaacaggcaatttctaattcatgtaagtattgnctttcaaatggttttttcctaaattggctacaaaactagggtaatgccaaaagcctatttaaaatataatgnatcttgaaatacagatgttcctcaactaacgatggnggtacatnctgataaacccactggaaattcaaaatccatt

SEQ ID NO: 359829 - DNA, 995 bp, Homo Sapiens
tatcccagtatcctgggctgaataacctataacttgcaggaccctgctagttctcgccaaccagccttaggactccagatgtggtacctgtgtttgccaagaatgtcttgagtcctggccagctacgttccccagtgtaaattggagaatttcagtccatttcctggagtgcatctttagtggcacatggacagttcatctagtaacaaatgttataacacttggtcccagtggatctttccagtggaataactctaaattaaagactggacaaccatccaaccatccgttcatctgtttctgccatttcgtgtaatgttatcattgaatagggaggttcctgatcattatctacaagagtccgtattactgccagtgtgtccaacactagcccatccacattttgtttctttctccttggctcatgaggtcctcggcccctccttggtggccgaacagggtcccgtggttggctccttgtgtcagcagtgggtactgcactgttctcggcctgttgctgttgggtgtcaacactgtcatctgttccactgtcatctcggcagatacaggaattacccatggtagtagcggcacctccagtccctaggaagtgggctatgtgctcttcgagagtcaacaacagaccctggccaaggcttctgctcgctaagaacacggcccaaccaaagacgatcatttaggtagttttcagttttccaagtactgttttcataacctggagttgaggaatttgcatcctatttgtttttaacaactgaatgccaaagaaagttgcagagcttattcccaacattatcaactacaggggattctggacatccaatggcagtttttctctacctcccgggcccaccggagggagggggcggcggcggcggcgcgactcctttgtgacaggtccgagagaacggcaaagattgacgcgaggccacggcgctgccattacgcgcagagcccacccccgcctccccgct

SEQ ID NO: 359830 - DNA, 514 bp, Homo Sapiens
ccgtgaaacggaagctgtctaaatcagatgactgaaatctgcctaaaacgttgaaggagaatcaattcttcaactcaagatgtctgatttactgtgaatttgcccaatctttgatgacattgaaaacgttttggggcatacacactcaaaaagcaggatccaatacccaaaagaaatggaacttaatgttgtgccaaagttaaactactgcagttggtggaagttctgcaatgtaaatagaacactaattaaaaaacaacttgtaaaaatgcaatttaaattttaatacagtacatttttcttctaatatgatggagacattctgaatcttagactttctgagggggtttaatgaccactagagcttgtcctcatattcagtccagtttaatactgtatgtctagtaagatgggctatatattgcctctattctttgagatgtgattaagcttagaactttgaccaaaaattttacagtaaaaattgttagaaatgggtaaaaacaaacaacat

SEQ ID NO: 359831 - DNA, 948 bp, Homo Sapiens
  misc_feature (509)..(509): n is a, c, g, or t
agagtatgatgatgttaatttgctgactgctgacttccagcttctttttaacaatgcaaagtcctattataagccagattctcctgaatataaagccgcttgcaaactctgggatttgtaccttcgaacaagaaatgagtttgttcagaaaggagaagcagatgacgaagatgatgatgaagatgggcaagacaatcagggcacagtgactgaaggatcttctccagcttacttgaaggagatcctggagcagcttcttgaagccatagttgtagctacaaatccatcaggacgtctcattagcgaactttttcagaaactgccttctaaagtgcaatatccagattattatgcaataattaaggagcctatagatctcaagaccattgcccagaggatacagaatggaagctacaaaagtattcatgcaatggccaaagatatagatctcctcgcaaaaaatgccaaaacttataatgagcctggctctcaagtattcaaggatgcanaattccaattaaaaaaatattttatatgaaaaaggctgaaattgaacatcatgaaatggctaagtcaagtcttccgaatgaggactcccatcccaaccttggctgcagccagactgacaggtccttcacacagtaaaggcagccttggtgaagagagaaatcccactagcaagtattaccgtaataaaagagcagtacaaggaggtcgtttatcagcaattacaatggcacttcaatatggctcagaaagtgaagaagatgctgctttagctgctgcacgctatgaagagggagagtcagaagcagaaagcatcacttcctttatggatgtttcaaatcctttttatcagctttatgacacagttatggagttgtcgaataaccaatgggcagctaatagctgaacctttttaccatttgccttcaaagaaaaaatacc

SEQ ID NO: 359832 - DNA, 618 bp, Homo Sapiens
ggattatttgtggccatagtgttaaagtaacatatatgaccatgaaccatacagtgaccaaggggacaaagtaatagaattgataaggtcgatccattactatacataacaccactaccaggaaattgagacgaaataaaacctgacatactctatagattccaaaatctccttttatccaaaagtatgagaaatgcccataccctgtctgaaataaatatgcagcaaccagaactcgaatgtgcatgtatacaggcaaaaatgtacttgctccagaaatgtgataaatcaaaatcacaagttgcatccagcctttccattcgtctgtttgttctctatttaatactttagtctctttagtattttcattataaaatactcccaaaaccaaaatgtagataattggaataaagaaagatgaatgtgtataaaatttgttttccttcatgaacagatttgcacggtcacacatatagaaatatgccataatcaggccaagtttgcagaaagattgtaaaagtatttctaatgaagacacaggggtattgataatatttttcttttcctctccactttccaaatcagtacacggcttattcttccgatgagcattacgat

SEQ ID NO: 359833 - DNA, 735 bp, Homo Sapiens
  misc_feature (606)..(606): n is a, c, g, or t
  misc_feature (615)..(615): n is a, c, g, or t
  misc_feature (635)..(635): n is a, c, g, or t
  misc_feature (638)..(638): n is a, c, g, or t
  misc_feature (656)..(656): n is a, c, g, or t
  misc_feature (683)..(683): n is a, c, g, or t
  misc_feature (705)..(705): n is a, c, g, or t
acaagggttgtgtagtgggggggtttttgtttgtggacaatcactttaatagatgtccataggtagttcatatgaatgcttaagttacaaaattagctgccatggtccaaatgtatgggactttaggaaagcttttcttactcaaaagataactaagactatcaactttgatttctaaaatgtaatttaaaggtttgtaaaacaaggccactactataattatataatattaaagtaattaagttttatgttagttattttaataacaacttcatgaactgttaaaaatattacatttgcatctctcagtttacatatttctgtattaacttggagaaaaacccatgtgaaaagtttccatgcagttacaaaggcagcagcacatgctgttttcacagcaacttgttattgcctcagaacaggcctgcactaaagcatcaacaaaaaatacccaccaccccactcccaccagaaaacccaacccttacccatccccggcaaaaattacctggtacaagcaatgacctaaaaatgctttcttggtaagaagcatttataaaatgcagagatctgaacaagctaaggctcgtgcagatcatgggcctntccttcaanaagttggttccgcaagaagnggnaaggactttcatagttangaaactcatttcaaaaggtttcttacncatattcatggcccttctttgnaagaacctacccaagcttaactggggacac

SEQ ID NO: 359834 - DNA, 451 bp, Homo Sapiens
  misc_feature (15)..(15): n is a, c, g, or t
  misc_feature (28)..(28): n is a, c, g, or t
taaatttagggtgtnccataatgtgganccccgggtccttatttgaacagttatgcccaaagaacaaacagttcctgcagctctcatgttgtattcaccacaaattcaggaagtggctgaagaaggggattacatgcctgcacaaatctttagtgctatcgagagtgtcaagctttgaaaccctttgaatacttctgaagagcaagcgcccactgatgctgaggtcaacaaaatcagagaagctgacatttccattttttgccaatacttcaggtgacctcataatgaaacccttgctgctctacagaaaattgtgcccaaaccctctcaggggaaataaatgagccaagtttccagtgtactagcaagcaaacagaaaagcccagatgaatcttcctctccttaagggatggtttgaacagtactttcttgtggatgttcaagactactt

SEQ ID NO: 359835 - DNA, 1013 bp, Homo Sapiens
  misc_feature (17)..(17): n is a, c, g, or t
  misc_feature (35)..(35): n is a, c, g, or t
  misc_feature (40)..(40): n is a, c, g, or t
  misc_feature (52)..(52): n is a, c, g, or t
  misc_feature (60)..(60): n is a, c, g, or t
  misc_feature (180)..(239): n is a, c, g, or t
  misc_feature (718)..(728): n is a, c, g, or t
  misc_feature (792)..(819): n is a, c, g, or t
  misc_feature (963)..(963): n is a, c, g, or t
acacagacgtcaacacngaaacacggtcaccctcnaaaanggcagccctcgncagccctnaaccctggcttcctttcccaatatgttccttcccaagccttcaagtcccttaacattggattaattcttggaggcactatgcaattttccagagtccctggctgcattcatttgccctcnnnnnnnnnnnnnnnnnnnnnnnnnnnnnnnnnnnnnnnnnnnnnnnnnnnnnnnnnnnngtgtttattccccaccatgttccaagatggatgtcaggtggcttacaagaatacacaaaatacaacatgatagcataaattcaaagtagataagaaagtaaaaggaaaaaacaaaaacaataaagataggaacacgaaatggagcctggcagaaagctaatacaaagtgcatacataccgtagagtcccattacaagtgctatgcattgaccacacatttgactccaagctttctagtagccaacaaaagagaaacctgatcagtccccagacttccacagggtcccataaaataaaatcaacccatatggttaggatgtctctttccctggtctaaatcctgaaaacttttctacagtaaagtatcataaaatggtggcaaactgtccctcctgaattgctctaacaccaaaattcagcttctggaacagtcactaacaaaataaatcctcaatcttgaaattacatctactggttcnnnnnnnnnnncttctacctgtctcttgaaagttccacttagtcaatgaaatgtagctattaaaaggacttcttnnnnnnnnnnnnnnnnnnnnnnnnnnnntcctctgctttcaccaaagcaaatattttcagttaggtaatgaaaaagacattgtgaaattacaatggccaaatttggaaagaccctcaaatatccaacaaaagaaaatggttaactaaaccatgatgtcatcctatgatgaantattatacaccattgaaaatgatatttacaaatactttgcataaatgtag

SEQ ID NO: 359836 - DNA, 906 bp, Homo Sapiens
  misc_feature (25)..(25): n is a, c, g, or t
ctggccaggcaaatgccccttcccngttgggcctaacagggaaagttccttttctcaattaggttgaatcccttggccttcccctattaaagtggggagctgttgaaaaagaaagaatggaaaacgaggtaatgatcctggagcctaatggaaagggccgcagccagttttcccctgttgaaaggacacaggacttcccgaagagttttcatggcaaaaacgtccaaccagctactaaggaaacaggatggactcatgcgtgcaggagagaaatcactaaaggacacaagacttcccaaagagttttcatggcaaaacgtccatccagctactaaggaaacaggatggactcatgcgtgcaggagagaaatcacttggccgtcactggaagagcaggctgtgatgggaacggtaaggacagagaagggaaggttcacaggatagaaattcacagggcaagtagggttccaagtcagaagcaaaacactttacacaacattacagacaggctccactgcaactgggcaggtcaggactgggctcagtcggccacattctgctcccacgcgttgcttccttagactgtcagggaagggagaagggcagccaccaggagcggccagggtcacggacttgctacttctttcctagagtctgttctgttttctgtcagcagtaaggaaatacattctagcaaatgacatccagtaatgctttaattaactgcagtattttgtgctccaacatgcaggcagaaatcacttccagatggagaaaatgaaagctatttacacaaagaagcaatccctttattttaaggaaatttatatctcccaaaggtgtagaacttcgagggtccaagaggctattctgatgaatactaaaacaggactgggaatttttatt

SEQ ID NO: 359837 - DNA, 906 bp, Homo Sapiens
  misc_feature (358)..(358): n is a, c, g, or t
  misc_feature (674)..(799): n is a, c, g, or t
  misc_feature (807)..(821): n is a, c, g, or t
taactttttaatcaaatgtttattttggcttgtggatcttggtgttatttaaaaaattgaggtgatggtcattgcaagctcatctattaagtactatatggtacacagtctatgagtcattagtcttcattttaatatgtaaaaaatcttgatgctgtattgatttgtttgcatttaagatgacagtgagaaaatgataagcataaagagaagtatcaggttatttgctttttccaaacttttcagatgaactattgtttagtacagagactgagcaaatactacaaaattcaacttaaccttcatttcattggtttaaatgcgttattaaccatcttaagtgcaaactaatcattgnaaattatattttagcatggtctgcctcaaatagtaatgtatttttctgcattcacttggatatatttagaatcacttttttcctcctgtatcaaggaagaagtatgtgctgatttgtttggatatttgacaaggcactctgatgtgacttccctgactactaccttcatatttcatttcaaattcaaacttctgaggttgcagcatatatgaattgcattttcaaaagaagatttgtaagaattaaactatatttatgagtaaacttttgaggtttctgctgtattgtttcaaatgtaataaactttacttctgtnnnnnnnnnnnnnnnnnnnnnnnnnnnnnnnnnnnnnnnnnnnnnnnnnnnnnnnnnnnnnnnnnnnnnnnnnnnnnnnnnnnnnnnnnnnnnnnnnnnnnnnnnnnnnnnnnnnnnnnnnnnnnnctggccgnnnnnnnnnnnnnnnaaaaattttttaaaacctttttttgggcgcccggccccaaaaggaaaggaaacagggcaaaattttttccaaaaaaaacccgggc

SEQ ID NO: 359838 - DNA, 1544 bp, Homo Sapiens
  misc_feature (487)..(487): n is a, c, g, or t
ggcctgttggcctactggacaataatctaaacaatatattccttaaattaagaggaaagacaagtgtcgtatttcgatcctgtttattcaaatgtgtgattttgctgaaatgaaagggataaaatgaatacttagagaataatacttcatttttgcagtactttttaattttgataaaaaagatacaaagttcataatatcaaaatatgtgttcaaaattggtattttaattttaatatttttgtaagttgatttaaattttgctcttttttcaggtgtgcttggtttattatatttagtcaagttaatttagtcgaatgtggtaacatttttctgatttatctttagttggagcacacccttgaactgaacagtggccaaaggaaagctttctgggctttggaaagtagttgtttaactttgttttaagccgttttcttagtgattctgtatcaagtagaggataagtgtagtttaacttaagttnttaatataacccataatcaagaacatgagccgaaaagcagacataaatcgatatggatggtttgtggtgtgtgtgggatgtggggggaattaagaaaatgccatttacctaagcacagtttgcctgaatttctgcttggttggggtggttaccgtaagtactgagggtagtttccctaagtctgtcctgagaaaaagcatacttagtactcctgtatttgttcttatgaaatgactatctgccttcttgtatctagtaagattggctggctcaattttcttctgtcaaattatatggttattttttatattaccacatcagcattatattaaaagtgtttttaatagttgattgtattttgccaactactagtatagactcaaatttgctatttaatttttaaaatacaatttattttgtaaatcctttaaaaaatatttggttagttttggattagaaatgatttatgttagccatgtgttgaagatgaaattggcatcagtgtagacggtgctgattgggaaaagttcatgattaggaaattcatgtaagactttttaagagtattttttaggttttcactcaatctttcctgtcacagtaacgtgaaaactgattattctttactccaagagaatgttttaacccaagcaagtatctaatactagagcattggttctgacattcattgtaaatcagtgaactgtaagatactgtctaaaaaatgtaccatttgtaattaggtgcctttattcatattttgaaataagttcttagttttatattatacctgttctttagaagtcatgttagcagctaattatttcagtgatgaaataatttgtgtttcatatcccccttcacctccatgtattggttagcacagtttatagtaagtgaaaagcaagggacccacctacattaccttcaggagactgttctaccttttaatttgaaaacaaggaaattaaattttaacagaaatcttttaagtatgttataaccaaagtgttcaattatccttgcaagttcaaatacagcatttttcttaattttg

SEQ ID NO: 359839 - DNA, 677 bp, Homo Sapiens
  misc_feature (28)..(28): n is a, c, g, or t
  misc_feature (80)..(80): n is a, c, g, or t
  misc_feature (156)..(156): n is a, c, g, or t
tgaattgagagagggcttatcactatanccagttaggatttgtatttgaatcatcttgtaaagtcgcactcttacaacangcttttgggttttaaatacctccgtacagcaagtaaacgttccccgctttcttgttctcagtgtcctcggtcatgntgcttttcgttgcattaaaagtgccggtcaaactttgatagtatttttttatagttggtgcagagtggaataactcatgggattatttcaatatttcttgtaataaaaaatatagggtatacacataggcatcatcacattttttatagacctggaatcgtttaaaatactttaagcatcataattacttgggatgtcagaaactggtccacaaattccatcagcctgcctcagcagattgaaaacatttgtctcttgcaagatcaccctactttgcaagttggtgcccccaggaacctggccaggggtgctatcagaatatcaggtgaagagagaatcagcttaaatagaaagggcttgtcaagactggccaatgtttcccaggaaatcaaagatgtaaatgattactttcatccatccattataacaaacctgaccacagtggaagctgtcttaaacttccttccctggttttatattaacccaactgatagattaagtattagtcaaaccactaaaaa

SEQ ID NO: 359840 - DNA, 473 bp, Homo Sapiens
  misc_feature (37)..(37): n is a, c, g, or t
  misc_feature (52)..(52): n is a, c, g, or t
  misc_feature (85)..(85): n is a, c, g, or t
  misc_feature (259)..(259): n is a, c, g, or t
ggattatttccaaaattttgtaaatgaagaaaatatngggtataacaccatnggccatccatccacattttttaataagcccccnggaacccgtttaaaaatactttaaagccatcaataaattaccttgggatgtcaagaaactggtcccacaaattcccatcaggcctgcctcagcaagattgaaaacatttgtctcttgcaagatcacccctactttgcaagttggtgccccccaggaaccatggcccaggggtgnctatcagaatatcaggtgaagagagaatcagcttaaatagaaagggcttgtcaagactggccaatgtttcccaggaaatcaaagatgtaaatgattactttcatccatccattataacaaacctgaccacagtggaagctgtcttaaacttccttccctggttttatattaacccaactgatagattaagtattagtcaaaccactaaaaaaaa

SEQ ID NO: 359841 - DNA, 567 bp, Homo Sapiens
cagcatacagagagtgcaagcagaatgagatctgtagctgcttaagagtggctgataattaacccttctctctcttccccaatcccagtgggtccatgacttttggacaataaagcacccaacctgtgacagcactaagtgattcctgtgccacaggcgggaagcctctcagtgaggctgtgcacttaacagtcatcccaatgacagggaggacagtcttatacacaggaagtttataatgaactgaatttgacaatggcagcctgttcatgtgcagaaactaagatcagtgcctggggacaggcagtcaacttttaaatattaaacagcatataaatatgtatagccttgacctgaacacttgagttatacgttctgaataattatcatttctgaaagactaagggatagatttaccaaattaaaatacagaatctataggatcatgatgttctgcatttatagcattacacgatcaaagccccatctggataaaaggcaaaggcaacttcaaaaaagtccttagagataagatccttgaatctcatctgaagtacactggttaca

SEQ ID NO: 359842 - DNA, 664 bp, Homo Sapiens
  misc_feature (113)..(113): n is a, c, g, or t
tgtctcaatagggtcagatattttgcacatattcttgtgaattaaaagttatgtgattggtgccaaacttaaggagattcaggacttggcagaaaatgtaagaggatttttgntgcttttggggtgcatgggaatctcccctgtaaactttcctttgcccaattatatgtacatgtccattcttaagttggtgtttggaggtggggaggatgctactttactggagttgagacaccccctaaaattctcaccctcagctattttgtgggcagtattcaggaagagctacttcaaacctttctttaaatggctttttggaaatacagaagtcgtttcctcaagtttgactgttttaatggggtttcacccaaattgtttaatgcttctgctgtaaatgtcatactgtgtattcattatgaaaatatgtacagcttaaggaagatgttaacacctgtaatccactaaggaactgaatggcaatttgctcaatattcagtattttcttttcagcggcaacttgtttttgatttttttaaaaaaccatttcagtgtacattgtgtactaattccctactagccagtttgggacattggctgagcactgcctgacagaaagcccgtatttgtaagatgcttaccaccaaataaatgtacatagactgtg

SEQ ID NO: 359843 - DNA, 669 bp, Homo Sapiens
  misc_feature (56)..(56): n is a, c, g, or t
  misc_feature (60)..(60): n is a, c, g, or t
  misc_feature (72)..(72): n is a, c, g, or t
  misc_feature (76)..(76): n is a, c, g, or t
  misc_feature (107)..(107): n is a, c, g, or t
tccctttgagcattgaaacaatttgtgattgaacacaaagtccatgaatttaaccnttanccgtttgttganccangcatgtgcatcttccagtggttggcccaggntggcagcacagataccaccatttcccttttctttgctcagggcatgccttgtttatctcgttgcaccagatgagggttggaaggatgatggtggtggttgtttcagatctactgacagcaatgagaaatcaatgacagttgacaggaagagaggacgcatacaacaggcaaaagaggaatgcccagcagtcttggtccttgcggtgcaatactggccttgaggccaagtcagcaggggattcgtagtcactaacttctaactgaggcagggaagtaacatgttctggaaaaggtccaaagaaacaggaatagaggcagtgtagcaagaggcagatttttggtgccaaatagatttgaatcctggttctgcttcttcctttgtagagtatgatattggttctttcctcccaaagctattataaagactaaatatgtacacaaatctttgggatgtctgacatataaatgcttaacaataggtatttgctggtattattacaaatgaatttgcttatttttgagccacttctatgtctgtccattaaaccaaaatgtgttctgc

SEQ ID NO: 359844 - DNA, 1570 bp, Homo Sapiens
aggctggaccggtccggatttccgggataagagaaatcagcccttcaggcactggagatggaccggaaaagtgtagaagggaggccaatgtttgtttccccctgtgtggataagagcaaaaaccccgattttaaggtgttcaggtacagcacttccctagagaaacacaagctgttcatctcaggcctgcctttctcctgtactaaagaggaactagaagaaatctgtaaggctcatggcaccgtgaaggacctcaggctggtcaccaaccgggctggcaaaccaaagggcctggcctacgtggagtatgaaaatgaatcccaggcgtcgcaggctgtgatgaagatggacggcatgactatcaaagagaacatcatcaaagtggcaatcagcaaccctcctcagaggaaagttccagagaagccagagaccaggaaggcaccaggtggccccatgcttttgccgcagacatacggagcgagggggaagggaaggacgcagctgtctctactgcctcgtgccctgcagcgcccaagtgctgcagctcctcaggctgagaacggccctgccgcggctcctgcagttgccgccccagcagccaccgaggcacccaagatgtccaatgccgattttgccaagctgtttctgagaaagtgaacgggacgctgggagacaggaaatgccttacttcactctggcccggcggacctcccaccacccagcagtgcactggggatggacaggcctggtgtgctgcgtgctcgcaaccacagatggctcctcggctttagacagaaaggggaaggggttctaagtcaagagcctttcagtgctccctcatattgagggcagtggcagaaaagtgaccactctgcaggctgggcccaggatgtggtgtcctgagatagttttgtatcttaaagactgaggcacagaagcgaaacgagaacacactgtttttgagacacagttgtccaaatgtttctggccagctccggcccctttttgtatgacacttctcttccaccctgcacagcacatgtgcccgtcattcttttaattttaaaagatgaaatggcagatgctagtaattcacagaatggcctcttgtgggggtgggtctgagggaagtcagctataaaacatttgctggagttttgttcaatggggctgtgcatttttatattatgtgtttgtaaatgacatgtcagcccttgtttcatgtttcctaaaagcagaatatttgcaacatttgttttgtataggaattatttgtgccacctgctgtggactgttttctttgcctagtgactagtgacctgtgttgtctaaacatgagtttcagccctttggttttgtttaataccatgtcaaatgcaaacttcaattctccccatttagctttattaaactgacgttctcttcaaaacttcttgctgaatggtactcagatgtgcattcacatacagatgtgttttgaagtgggtgtaccttgctttacctaatagatgtgtaaatagaacttttgtaagtcaaatcccattgtcactttgatttaaattaaaaaaaa

SEQ ID NO: 359845 - DNA, 777 bp, Homo Sapiens
gagacctctagaaaaagaggctgtaggccaacttaagcctacaggaaaagaggacacacagacattgcaatccctgcaaaaggagaatcaagaactaatgaaatctcttgaaggtaatctagagacatttttatttccaggaacggaaaatcaagaattagtaagttctctgcaagagaacttagagtcattgacagctctggaaaaggagaatcaagagccactgagatctccagaagtaggggatgaggaggcactgagacctctgacaaaggagaatcaggaacccctgaggtctcttgaagatgagaacaaagaggcctttagatctctagaaaaagagaaccaggagccactgaagactctagaagaagaggaccagagtattgtgagacctctagaaacagagaatcacaaatcacagaggtctttagaagaacaggaccaagagacaaggagaactccttgaaaaagagactcaacagcgacggaggtatctaggcgaacaggatcagaagacattaagacacccagaaaaagtggatctagaaccagcagaagtctccttgaccaaggagatagctagacctccttgaaaatgagaagtcaagagttcttaaagtcactcaaagaagcagagcattagaggcagtaaaatcttttagcatacagagagtctctacgaagtcactagaagttttgcgggatcaagaggacctggaaaccctgaaatctccagaacgtcaagcaccagcatgtgactccagaaggtccagg

SEQ ID NO: 359846 - DNA, 403 bp, Homo Sapiens
  misc_feature (116)..(154): n is a, c, g, or t
gcacggggcgcctactgggaagtgcagaatgagacatagattttgaggcccgtcaaaatgaaaagatgcaagttagggaacaagtgatcaaaagggagaagggaaaggtttttttnnnnnnnnnnnnnnnnnnnnnnnnnnnnnnnnnnnnnnncagactagaggatgagtaatgagtaactctgtaaggaggaccatgtcagactattgtaagctaagcattaggactgatacaaataatatatgctcctggcatagaaaaataaaccacagagaacgagttcaaagaatagcaaagaaagaaagaggacccagtgggcgaaagatgagagtgtacttttaccaaaagttatctaagcctgagcacttgaagtctgcacataaataaataaatgacaaaaga

SEQ ID NO: 359847 - DNA, 1089 bp, Homo Sapiens
taacatgtatctatttggtgtttcaacacttcttggtggtaattcaaaagggggaaacttggtgatttctgctttgtcaggcaatatctatggttcgtatcacagatcttaactatgacttaagtaagatgaagtgtcctctttctataggaatctaacttgagccctcactggagtcaaatgttttggccattcaatttgctaaatgtatgggtaaactctccaatgaatagtccaaatgttactgtgcacatattccgatattcattagcactgcaattatgctaattttgtgaatttaaacaatgtattctttttggcaagaagcactagatgtagaactattcaaacacgcatgaatgataccatgataccacgaacatgcacgataccatgaacttgcatcacggtgccgggctacgtatgtgtagctcatggattaccatggcatgaaaatgctagaagttatatggatacaatgatagtggaagttcaaatgtgagaaaagtcaggtatgtcaagaacaatccctggttagttcactgaaaagccccactctcgtatcagacagcaagacagaacaacagccactgacttggaaaggctgggtgatccataacgaccaatctttcaaggaccaataaaatacctgagtacacagtcagctatacagtaaaatgacagatatcacagtcttaaaattttcaggaaaagtagaaaagctgtcagacttttcaagctgtcgccagccttggacttctgtttctctaattgtagcactacatacagcctagaagatagtatttcagtactgcaaaccagccattctgatgagttcactatgaatgtatctgcgatcacaaagcctacttcgtggacacattttaatttggtaagcagtcgggggaggtcaatgtaatcatctttaggtgcgaactaaaaaaattactactgatccttagaagcatccttaaaacatttaaaatatacctcaaaaaagctggactttcaacaacaacaattatacaaatgtatacatactgtatctgttagagacacaccaagaatgaacaggaatctcaaataatg

SEQ ID NO: 359848 - DNA, 380 bp, Homo Sapiens
tcagtcactcacaggatcccggtgtttatcgatgccacactgtgccatttgtggcatcgtttgtttattgggagttcgctaagggcagtattttgctgtcaagactattcaagaaggcattattggagattccggttcattcttggtgtgtctctaacagatacagtatgtatacatttgtataattgttgttgttgaaagtccagcttttttgaggtatatttgaaatgttttaaggatgcttctaaggatcagtagtaatttttttagttcgcacctaaagatgattacattgacctcccccgagtgcttaccaaattaaaatgtgtccacgaagtggcatcgataaacaccgttgggtagaggtggcatcgataaac

SEQ ID NO: 359849 - DNA, 1463 bp, Homo Sapiens
  misc_feature (33)..(33): n is a, c, g, or t
  misc_feature (111)..(111): n is a, c, g, or t
  misc_feature (862)..(889): n is a, c, g, or t
cattggattgctttgcacccaaggaaggcattntggattgaaaaaactcattcacttttgtcttattttcttttaaggtgtattggcatgtaatttgcatagagaaggtcntctggttagtctctcaaattgagctgtttagggaatccttattcagttggtggcagtggttggtttaaagtagaaggaaataagatcgccttaataccagaaatgattagaagtgctgatttagattcaacaaataccatatgtccttatcattttttgtaagaagaaattggttaagtcctaactttcaatgtgtacccaaatacttgtatttatgcttttgataaaatgtattttcagcattaatacacatccgattatgccttatttatatatgaagaataaagttaccatgttatactgttatgtcctaaaattcaaatcactatttgagaaaccctcaaattggtgctttcattatataatgatacatttagacaaaaccccaaactaagccatttgaaacaagattctctccattgcagtttgtagcaatgttatttctgtgtatgtcatgagaaggctaaatatcagtgttaatttcttgtttgaatccgtgaaatcatgcctgtaaagcccaaacatttgtaacaaactccctaataaatttagagaaagtcactctgttaccatttcatttattttagttttatttgagaaattaagaccagaagttttgctcatgtctttttcacttggaaatctgacttagtacctagttaatttgtctctctcccatcattttaaggcgttcgcttctgttaatcacagatgatctgtccttgtgttgtgctgcttgactaaaagcacnnnnnnnnnnnnnnnnnnnnnnnnnnnnaatgataggatacagggtggcttttcagtctagtaaacatgaggaggggagagattgtgggtgggtgtgggtgtgtccgcatgtcccaaatacagcacatgcccatttttttatggtacgaggttagggcttattaataaatgtatactagatcttgaagtgtaagtctaagtctgaacattttaaacaagttggactttatggctttttcaagttccatcaagtagatactagtcttaggctggtaggtgattaacaacatcatttggagtacagtgtttgtaccactagcattcttatgtctgtacttgaacgtgtagttagcatttaagttatgttcactcttgtagcattcaggtcttaccatctggtttcaaatgcgagagcttatatgaacatgtttgaaagcatgactgactcatggcaatatttcaggtcttgataaggagaagttcgtgacatatacaaatctgctgtgatgatgaacgtttacaggtggatcccgagtatgcttggacctcagtgtgcataaaactttcagtcagtgaatttccactgaacgtcctatactact

SEQ ID NO: 359850 - DNA, 1193 bp, Homo Sapiens
cccccggcgggttaatgtccccggacatgaacgtgcagagaaacgagacaagagtaggcgaaaccccgccaacggcgcgggagcacaggagaagatggatatggacaatcaggcggaccaacctggggccagacgaagaggagggttccgccaagagaaatggcaactccaggaatggccagtggagctggaaggtccaactaatacaagcaataaagcagttgccatgacacccagaatatctgtagtcagagcacgctatcagttgcaaaagccatgcttgcaaccgatggaaaatgtaagagggagttcttaaggttcttggtgcatcacccaaggcattctggaaaacctagggcctggccccaaaacttccctactctgtggctagtcctgctgccaacaaaatcgtagcgacctgacttttcacagctttgcttttatttccaagtcaaggacaagccgcttcattcactcctgggcatttactcttcttgtgggtctgtgatattccttgctttccagggagaatgtgcttggcaaggtctggagaactaattcagaatcttaggggaaggggagagatggaaatacaaacctgcttactggaaaggtgcaaatatatgggttgagctggaggtaggaatacaggtaattaaggtttctagtttaagggaaaacagatctattgccatttaaataaggtaactgggatttggttaagttcacaaagatagcagaagatttatttacaggcttcacctgtactgtcagggcaagagaaagcctggtaaaccagctacagcagtttaccagtgtgatggctgtgacacagctccactccacgggtggacacagcagagggcaactgggctggcctggttcagtgtgaatcaaaccgcttaacccacacatggtacatgtgattttcttttgtgagccttacaccaagccaaactattgtcaaagcatcatttctatagaaataaagccttatcttgacctgttctattaaaacctgccacacccgccctttcctacctagatttaatgagcccaagtttttaaaatggaagaaatgactctggggcaaagacccctaatgaactagtggcagagccaggaataaaacttgagtaactaatgagtcacttatgggcagagtatgcaaaaaccttaagtggaaacgcaaa

SEQ ID NO: 359851 - DNA, 987 bp, Homo Sapiens
tgaggaaccgggggtctgggctccaagcagatccgcccagactcagagcctccgttggccacataggacaggggtgctgactttggcctcgggattcccctggcagctgtgagccttcaagccggggttttcaatcccttgaatgttgctgtccatccgcaccagctcctgggcacgcggttggagcctgcctgcctttgcttgtagaccaggagcaggatgagggggagccagaggattcctacgatgcaggcacccgtagccagggctgcagccgtgatgttttcactctcctgggaggaggatgggtacaccacacagttggatggtgcatctttgcctgtctgcacctgcagctccatggcaccatggaccctgtgctccgagtggtggtgcctgatctccaccaccaggcagcagtagaggccgctatccagcagggtcaggttgcgcatggtgatggagaagttgccatggtggtcggaggccgactccagcccgtggcgctgagccaggtcgtggctggtgttggcagcctggtggcctccatggtgcaggtgaaggtcctggaacgtgaggttgcggatgggccggcgctctgagcaggtctgcacctcgcccctcgagctgcggtaccacgtcttgtagaaggtcacatcgtgccctttgtccacagggcccaagagcctgcaggtgagggtgacgttctgcccctcgggacagacatacagggaatacggcgtggcgaccttgaaggctgccaccggacctagggacgcagccaggaagagagcgaagagcagggatccccagcgccagctgccggcctccagggccgtggggacgcccatgtcgccgtcggacgcgcagaggaacttctggtgccggggagcgggcgggacgcggccggcgcggggaagcctcccgcgactgagtgcgagcgagtgagcgctgcgggcggccccagcgccgtgctccaggcccgct

SEQ ID NO: 359852 - DNA, 996 bp, Homo Sapiens
cgggaggcttccccgcgccggccgtcgtccgcccgctccccggcaccagaagttcctctgcgctgtccgacggcgacatgggcgtccccacggccctggaggccggcagctggcgctggggatccctgctcttcgctctcttcctggctgcgtccctaggtccggtggcagccttcaaggtcgccacgccgtattccctgtatgtctgtcccgaggggcagaacgtcaccctcacctgcaggctcttgggccctgtggacaaagggcacgatgtgaccttctacaagacgtggtaccgcagctcgaggggcgaggtgcagacctgctcagagcgccggcccatccgcaacctcacgttccaggaccttcacctgcaccatggaggccaccaggctgccaacaccagccacgacctggctcagcgccacgggctggagtcggcctccgaccaccatggcaacttctccatcaccatgcgcaacctgaccctgctggatagcggcctctactgctgcctggtggtggagatcaggcaccaccactcggagcacagggtccatggtgccatggagctgcaggtgcagacaggcaaagatgcaccatccaactgtgtggtgtacccatcctcctcccaggagagtgaaaacatcacggctgcagccctggctacgggtgcctgcatcgtaggaatcctctgcctccccctcatcctgctcctggtctacaagcaaaggcaggcagcctccaaccgccgtgcccaggagctggtgcggatggacagcaacattcaagggattgaaaaccccggctttgaagcctcaccacctgcccaggggatacccgaggccaaagtcaggcaccccctgtcctatgtgggccagcgggcagccttctgagtctgggcggcatcttgctttcggagcccagcacccccctgtctcctccaggccccggagaccgtcttcttcccatccttggaccctgtccctgaatctc

SEQ ID NO: 359853 - DNA, 278 bp, Homo Sapiens
cgacctctactgctgcctgctggtggagatcaggcaccaccactcgtagcacagggtccatggagccatggagctgcaggtgcagacaggcaaagatgcaccatccaactgtgtggcgtacccatctctcctcccaggagagtgaaagtatagggaccaacctcttgcaccttatgttgtctctgagatcttctgcactgatcctgcactcagaccctgtttggaactctgtcctcatcaccccaagccctcagaacctacttggtgcctctggtgag

SEQ ID NO: 359854 - DNA, 903 bp, Homo Sapiens
  misc_feature (827)..(827): n is a, c, g, or t
  misc_feature (846)..(846): n is a, c, g, or t
  misc_feature (872)..(872): n is a, c, g, or t
cgcgcggccaggcctgggccccccgctgctccaggccgcgctggtgccttgtggcgggctgggtggcactggcctgctgggccgggctggcgagctggggggctgcgggcgtggcctggctgcagcccacgggccgggagacgggtgtgcaggtgtacaacagcctcaccgggaggaaggaacccctaatcgtggcgcacgccgaagccgcctcctggtatagctgtggaccaactgtatatgatcatgcgcaccttggccatgcttgctcatatgttagatttgatatcattcgaaggatcctaaccaaggtttttggatgcagcatagtcatggtgatgggtattacagatgtagatgataaaatcatcaaaagagccaatgagatgaatatttcccccgcttccctcgccagtctttatgaggaagacttcaagcaggacatggcagccctgaaggttctcccacccacggtgtacctgagggtaaccgaaaatattcctcagataatttctttcattgaaggaatcattgctcgtgggaacgcttattcaacggcaaaaggcaatgtctacttcgatctgaagtctagaggagacaagtatggcaaattggtcggcgtggtccctggtccagtcggagagccagcggactctgacaagcgtcatgccagtgacttcgccctgtggaaggcggccaaaccccaggaggtgttctgggcctctccctggggacccggaaggccgggctggcacatcgagtgctctgccatcgctaatatggtattggaatcaactgggtatccaatcaagtgggatagattaacntttccacatcatgagaacnaaattgcacaatgcgaaatccttcancaatgcgaacaatggggaaattatttccgca

SEQ ID NO: 359855 - DNA, 942 bp, Homo Sapiens
  misc_feature (384)..(384): n is a, c, g, or t
aaatcttaggcattattgccagaataatgctaattgctgtatatacagcctttaatctttgagatcagtgagaaaactttataataaattgcttactaaaatgaaagccataaaatttaataacagaagacatgaaatttagcaatcttgtggaattcattacacagtattaactgtcacgcagggtaccccacacagtgtcccagtgttgaacacaaaatgcaaatctggaagggataaatatcttcaattcagaaacagcattaagtatacctgtataatactgtcaccattatcttccatctgcaattcaccgcatcatcccccaaatgcccacagatctattgcaggaaacctactaatcccaacatctaaagcatgtangaataagatgtgatattccttttgtgtgtggggagagtgtcaatctaaacgtttaacaaaaggcaaaagaatgttcacatttcacatcacaaaagagatttcaaaggactcctttaacccgacagcgcttatgtcagtgtctttgtcatgtttcataagaattgttagactttaaaagaacctccctgaaagtctgcctctgaacatttgtatggttctgccaatgtctgatgagaaagaatgcttccctgtttgaggagtgtgttcactggatgagaaggggacgggagaaacctgggttgtgatttcaggaataattctcaaaggagattatactcttattgcaaaatggggtctgctatatattgttcatgtcactttattgcaagtgacatgaattatatgacattaaaaataatatgccttgaatcacactgattagacccagaaggatcattgagtttttggtggttttaaagatccaagaaagagctatctagcccaagtgtatgaatgagaagactgaagcccacagaagtgaactcagcaccagtgtct

SEQ ID NO: 359856 - DNA, 730 bp, Homo Sapiens
  misc_feature (49)..(49): n is a, c, g, or t
ttcctatagaatccccaaggtggttctcagctcaacatgggaaagaccntttaaaaacaggtgatgaaggaaatgctgacactgtccacgacaaggatgaggcttgaagactccattaggagaattaagctcggaacgagaggacaaataccgcatgagccacttacgtgagggaccaagagtatctaatcattcaaagtactcaaattcacagagacagagggtaaaatggcagttgcttgggactggggaagggggaattcgtgttgggtggggacagggtttcagtttgaggaagatgaaagagttcttggagatggaaggtggtaatggttgcacagcaatatgaatgtgcttaatgccactgaactgtgcacctaaaatggttaaaacggtattttatatttgtatattttatcgtaataaaaaaatagtgctgagcccactgtcactggaaggatacaagcagaggagagacactcatcagccggcactgctgaggcaggatttctggaccacaaggaaggtggccactaagggttgccctctggccccctgtgactcttctcatcagcatggcccaggatgcagcatcctggcatccaaggaggtgccactaagtagctacaagatgtggggcctggcgagaggaaccacaaaagaacgcaaaataaaaagcatcaataagccagtgacaaatctgcgtggatggcggaaggcaagcaggagt

SEQ ID NO: 359857 - DNA, 358 bp, Homo Sapiens
gacaaaaaatagatctattttccttatatattgatttagaatcttaagttagaattttatagaagaaatgtctgagcagttctatgtatggaggagcaattcagcttttcagcagcaactttatcttttgccactagagggagatctgtggttgctttctcctttggagaatagctgctttgcttttatttttaatttctaaggttggaatagaacttattctcaaaattcctttagtgttattaaatattttcatttattagtcaaaggtaagttaattaagcttgtttaatgatgcccaatcttatgcttttctgtaatcttcaatttttaataaatgtgagttagatactaagtg

SEQ ID NO: 359858 - DNA, 1076 bp, Homo Sapiens
  misc_feature (380)..(380): n is a, c, g, or t
  misc_feature (394)..(414): n is a, c, g, or t
  misc_feature (739)..(739): n is a, c, g, or t
  misc_feature (1038)..(1038): n is a, c, g, or t
acatggttaagggatgagattgtacggggtctgttctcagctgtaactattaatcaattagaaagcagatagtattacctttcttcctttaaaacatagtgctgagtgatatgatgcctatgagaatagaggcaaaattcacagatagtttcatagctgatggtgtcatttgaacaaataagatagattgtactggaggaatcatttaatattgcacaaatttggtactaggaaagcagtattctaaagaaccaccagattgcttgaaaaaacaaatctccagtttaaaatcaagttatgccacgcccacccagtactttgttaaatatataaagtaacttggtttcagagaccattttatgtccttggttttgctctanggattaagtagtgnnnnnnnnnnnnnnnnnnnnnaaacatttcaagggtttgtagatttttggaaataatttcagttaatctcaaggcttcccaaaccttgaaatgggtaaacaccaaccactgcttaacttgggtgttgtaaacaaagcccgaaatgaaacccctgtgtatttgctgcagattcccaagtgccccttaaatgtgaggataagctcagaaaaggcttaataggtttattaagttgtcatccattaaaaggttcacatgctccttgtgtgttgcataaggacaggtgtctgccacctcattgcatttctcactgagcattgcctaggagagggtaagccctaggatttanatccctctcagatgttcaggcagaataattttgtcaggacaaaagtaaggtcacggaactatatgaaaatggattatgaatcctaagacatcagcctattctcccctatgtctaagaagaatattcctcagcttatgactggaatgtcttgctaggggtgctgggtaagttttgtggaggtcccaccagcagaaaaaaatcattgaagaggaacacttaattcacaatggctgctgattaaaaagaaagcctcaatattcacctataccctaacatccttaacagcttaacagtgtggnactggcacaaactatggcgtctggtcaaatccaacctc

SEQ ID NO: 359859 - DNA, 1194 bp, Homo Sapiens
  misc_feature (31)..(31): n is a, c, g, or t
gctggaccggtccggaattctcggatgcttncatggggttctataaggaggcatgccctgatatcaaacattccataggccgatgtcacgcagaagacaacgcgagtcacatgtgaactgtaattggtacagaaatacctgggtatttctgtactgtgtgtactgtagcaaactagttggaatgtgcctcttataaaagtacatttacaaatcttcccgtgactgtggctttgagcagtcataggacctagaaatctgtgtatgtccaatagctgaggttattttcagcaaaaataattaaagggttttattttttaattcttgttggttttctaggttgttcacctcaagtgcattgctgtagaggcagaaaaaggaggataaagataacagaagtcctataggccagggatgtattgatagctcttgtgattcccaccagtgttgctgttgtctcaaattgccacagccttcattgcttgccaacatttcctgcatggagggactcatggttgcccttccccaggcctgaagaaagaatgcagtcaacatgagatcgctaagcattcttgctttctgaaaagtgggtgatcagaaactccattgtgcatcctcaagaaaaatcgacacacacatcttacgctcccccttcacctaaacagcctagacaaactcaacttattctcctgtacgccaaagtaaattgcaacggcattctcaagagcccggcaaaaattcacctctcagactccaaattacctcaccgccgcgccatccacggatgtgcgcccacgatcgctttctccgggccatccaatggcgtcctatgacagaactctcccgcagtccctactcccgcatccatgggcctgtatccaaccccagatccatcactcatatctatccgtcacaccacaatctacccgccattaacctcaatagcaccgatctacatcgcacgcctaacccgccctcaccacccttcacttccacaactactcaacgtcaacttcctgcaccttgcgctaaccaccggcgcgcctcacctctcccagatgctcgctcgaagaggcactcagtacaggatgccctcgagcccatacgtcacatatactcgtctactgtgcgttagctcctcactcctcgccgcttctacctacaacagactgaatgagaatactaataacaataatg

SEQ ID NO: 359860 - DNA, 1108 bp, Homo Sapiens
  misc_feature (53)..(54): n is a, c, g, or t
  misc_feature (59)..(59): n is a, c, g, or t
  misc_feature (62)..(71): n is a, c, g, or t
  misc_feature (73)..(74): n is a, c, g, or t
  misc_feature (76)..(86): n is a, c, g, or t
  misc_feature (89)..(91): n is a, c, g, or t
  misc_feature (93)..(143): n is a, c, g, or t
  misc_feature (145)..(152): n is a, c, g, or t
  misc_feature (311)..(323): n is a, c, g, or t
cacaccaattttaaattacttttttggaaagctttcccaaagagaatggtttnnaaacnttnnnnnnnnnncnnannnnnnnnnnncannntnnnnnnnnnnnnnnnnnnnnnnnnnnnnnnnnnnnnnnnnnnnnnnnnnnncnnnnnnnnttgaaattaaatacccaactttataaatacggtctgatacaaaccagaaaatgaccctttgattatgaagctacttggtgttcaggcaaaaccagaaagaatcaagaagtcaatccatccaaagccagaaggttctcacttcctactttgtgttccacnnnnnnnnnnnnncaaaggaaatgaactggcatatacgaatacaaacacgaaaacatcctgctagggaatggtaattttctgatgatatctgtgttcagaagggactgaaatttatacatttacctctttgaactcagaaagtatcagaggactgcaacataaaaccgccccatacaagagggccccggcctcgaagacaagggtcttgccccacgctcgcctccctcccagctttgccgggaacgccgtcccactcaggggttcaatgcacaaacaccctcctaagggaaaacgggacgccactccctacccaggagacgcccccacagggctggagcttctattcgaagcccatttctaaggacaccacacgcaggcctcagccaacctaagaggcaggatgatgccctccgtcctgagagaccactgaacacggcccaggggtcttctcatcaaaattcatttttttgcctctgattttccactagtcaagtctccaaatcccagtttctccaatggttcttgtagcatcaattttctctccatcctgcattctaaatattcttttgattcctttctgcacaaagcattttcaaaattattgttatgaagacacttcatgaatttctctttaaagcttttacattcacctaagtgatccagcgggaagctgcccttgtccgggggccgcggctggaagctcttggtcccgaaattcatggcggtcgacatgttggcgactccggagtctgcgagcgccttgcgagcgtacgcagggcggccggcggagcgccccc

SEQ ID NO: 359861 - DNA, 1158 bp, Homo Sapiens
gagcgaggcctgggtggcgaatccggcacgaggagaaagataaattgataccacatgttgcttccagacaaaaacctctctgtgttccaggggaagcacatgcagctggtgtctgggtgagtggacagtctccacaagaactccatccggcacaacctgtcactgcatagtcgattcatgcgggtccagaatgagggaactggcaagagctcttggtggatcatcaaccctgatggggggaagagcggaaaagccccccggcggcgggctgtctccatggacaatagcaacaagtataccaagagccgtggccgcgcagccaagaagaaggcagccctgcagacagcccccgaatcagctgacgacagtccctcccagctctccaagtggcctggcagccccacgtcacgcagcagtgatgagctggatgcgtggacggacttccgttcacgcaccaattctaacgccagcacagtcagtggccgcctgtcgcccatcatggcaagcacagagttggatgaagtccaggacgatgatgcgcctctctcgcccatgctctacagcagctcagccagcctgtcaccttcagtaagcaagccgtgcacggtggaactgccacggctgactgatatggcaggcaccatgaatctgaatgatgggctgactgaaaacctcatggacgacctgctggataacatcacgctcccgccatcccagccatcgcccactgggggactcatgcagcggagctctagcttcccgtataccaccaagggctcgggcctgggctccccaaccagctcctttaacagcacggtgttcggaccttcatctctgaactccctacgccaagtctcccatgcagaccatccaagagaacaagccagctaccttctcttccatgtcacactatgggtaaccagacacttccaggacctgctcactttcggactcacttagccacagccgatgtcatgatgacacagtcggaccccttgatgtctcaagccagcaccgctgtgtctgcccagaattcccgccggaacgtgatgcttcgcaatgatccgatgatgtcctttgctgcccagcctaaccaagggaaatgtggtcaatcagaacttgctccaccaccagcaccaaacccagggcgctcttggt

SEQ ID NO: 359862 - DNA, 839 bp, Homo Sapiens
agcttaacacctttgtgaatcccacgccattttcctaacccagcagagactgttaatggccccttaccctgggtgaagcacttacccttggaacagaactctaaaaagtatgcaaaatcttccttgtacagggtggtgagccgcctgccagtggaggacagcacccctcagcaccacccaccctcattcagagcacaccgtgagcccccgtcggccattctgtggtgttttaatattgcgatggtttatgggacgttttaagtgttgttcttgtgtttgttttcctttgactttctgagtttttcacatgcattaacttgcggtatttttctgttaaaatgttaaccgtccttcccctagcaaatttaaaaacagaaagaaaatgttgtaccagttaccattccgggttcgagcatcacaagcttttgagcgcatggaactccataaactaacaaattacataaactaaagggggattttctttcttcttttgtttggtagaaaattatccttttctaaaaactgaacaatggcacaattgtttgctatgtgcacccgtccaggacagaaccgtgcataggcaaaaggagtggagcacagcgtccggcccagtgtgtttccggttctgagtcagggtgatctgtggacgggaccccagcaccaagtctacgggtgccagatcagtagggcctgtgatttcctgtcagtgtcctcagctaatgtgaacagtgttggtctgctggttagaaactagaatattgatattttcaggaaagaaatcagctcagctctccactcattgccaaatgtcactaaagggtttagttttaaggagaaag

SEQ ID NO: 359863 - DNA, 673 bp, Homo Sapiens
  misc_feature (465)..(500): n is a, c, g, or t
agcggggggaggcggcaagaggacctgcggcaggccctcttcggcagtctctccggcccggtttccctcggcgtgctactgtgcgctcgatccagcaccatggggaagcgggacaatcgggtggtactgccaaaattatgacatgataccaaggaaattagaatgtgatcaatattgttgaaaacaaaaacaaaaacctgagaccagttaaatttaacaaaggcctatatgaacccaatagcaatggcgagatcaaaggggtccaatccagtcttcagggccaacaatacaggattatctgaatcgaccaaggcctacctgggaagaagtaaaagagcaactagaaaagaaaaagaaaggctccaaggctttggctgaatttgaagaaaaaatgaatgagaactggaagaaagaactggaaaaacacagggagaacattgttaagtggaagtgagagctcatccnnnnnnnnnnnnnnnnnnnnnnnnnnnnnnnnnnnntctggtaggtattcatcttcttcttcatcaagctctgattcttccagcagttcttctgattctgaagatgaggataagaaacaaggaaaacggagaaagaaaaagaagaaccgttcacataaatcttctgaaagctccatgtcagaaactgaatcagacagtaaggatagttt

SEQ ID NO: 359864 - DNA, 577 bp, Homo Sapiens; identical to SEQ ID NO: 800
  misc_feature (367)..(402): n is a, c, g, or t

SEQ ID NO: 359865 - DNA, 1306 bp, Homo Sapiens
  misc_feature (889)..(900): n is a, c, g, or t
  misc_feature (980)..(1037): n is a, c, g, or t
  misc_feature (1095)..(1103): n is a, c, g, or t
  misc_feature (1241)..(1251): n is a, c, g, or t
aagcctgggtggcgaattcggcacgaggcagtggtgcggggtttgatcccgagagcggtggactcaaagctgcccgccgggactcgggctgccggccgacaaaggacggtcctcgggggttctgaagtctgacccggccagtgggaaagccacctgcatcacaaagcgaggggcacacctgaaccggggctggcgggaagagaaacagggaaaattgaccaagagattcacaaatacaacaccccaggattcactggttgcctctccagagtccagttcaaccagatcgcccctctcaaggccgccttgaggcagacaaacgcctcggctcacgtccacatccagggcgagctggtggagtccaactgcgggccctcgccgctgaccctctcccccatgtcgtccgccaccgacccctggcacctggatcacctggattcagcccagtgcagattttccatataatccaggacaaggccaagctataagaaatggagtcaacagaaactcggctatcattggaggcgtcattgctgtggtgattttcaccatcctgtgcaccctggtcttcctgatccggtacatgttccgccacaagggcacctaccataccaacgaagcaaagggggcggagtcggcagagagcgcggacgccgccatcatgaacaacgaccccaacttcacagagaccattgatgaaagcaaaaaggaatggctcatttgaggggtggctacttggctatgggatagggaggagggaattactagggaggagagaaagggacaaaagcaccctgcttcatactcttgagcacatccttaaaatatcagcacaagttgggggaggcaggcaatggaatataatggaatattcttgagactgatcacnnnnnnnnnnnncctttttaatatttctttatagctgagttttcccttctgtatcaaaacaaaataatacaaaaaatgcttttagagtttannnnnnnnnnnnnnnnnnnnnnnnnnnnnnnnnnnnnnnnnnnnnnnnnnnnnnnnnnggggcggccgcctcaaaaaattcccctcaggggggcccaagttttacccgtaccccannnnnnnnngaaaaaaggggcccccctaataggaagcccaaattaaaacttagggccctgggccctttctttttaaaaaccccctggactggggaaaaactggtaacccttgggaaatcttttggggaaaggaacctttaaccttcnnnnnnnnnnnaacataattgggacacaaccttcctccacagaagattttataggccttttagggg

SEQ ID NO: 359866 - DNA, 849 bp, Homo Sapiens
ttcccttagatcccccaaagggaacccggggcattaccgtgggccaatgcctttgttgccaaacccattgggccggtcggcaaactgacccttcttcttaaaaaactgcctttcccgctggttgacaaaaccaaaacgttttttcctttagtaggaacagtatagggtttctcttaagtgaccccggctgataaaatcctttcccacacagattacaaaaatgctttcggtctgtgatctctttcattttcttcccatgatggcactcttaaacatatcttgatctaagcagctagacatatgttcaaccactagattttcagtttcaaaacgctggccacaattaggacatcgaaaagggcaggcagaatgtttaaataactgctttttttggatactgtttatcttggtaatgattgtccctaaaatcatccagcatttcaacaaacatatctcttatttcggactgctcatcaggattctcttccaagtccattttctcctcagtatttcctaacccattcatggtcagatcttggggctcgccacatcgttgagcatgttcctgaagctgcctaccctttacaagtatttgtccacatttaccacatgcacagatattttcaatgtgtttggctaagtaatgagatgacaggtcctcctcggttattgtaagtccacacagctcacaagatgcattttcagcatcctcttgtactggactgctgttgttagggggcctcatattctctaaaccacctctttcatcagcacttactgacattcgaggttttagagttttcctaccacttttttttatgctgacatcttcttcaacatagtatctat

SEQ ID NO: 359867 - DNA, 1535 bp, Homo Sapiens
  misc_feature (1065)..(1065): n is a, c, g, or t
tacttttccacagggcagggactttggtgactaatcaaccatctggcaatgttgaattcatttctgtgcaaagcccacctacagtgagtggtcttaccaaaaatccagtatccttgccatccttgccaaatcccactaaaccaaacaacgttccttctgtgcccagtcctagtattcaaaggaaccctactgccagtgctgcaccattgggaacaacacttgctgtgcaggctgttccaacagcacactctattgtacaagccacaaggacttctttacccacagtgggcccatcaggactctatagtccatcaactaatcgaggtcctatacagatgaaaattccaatttctgcatttagtacttcgtctgctgcagaacagaacagcaataccaccccaagaattgaaaaccagacaaacaaaacaatagatgcttctgtcagtaagaaagcagctgatagcacatcacagcatccacccaacccaccagtatcaccaggaaaaactgtaaatgatgtcaacagcaataataacatgtcttacagaaatgcaggcacagtgagacagatgctggagtccaaaagaaatgtaagcgagagtgcaccaccatcctttcaaactcctgtgaatacagtatcttcaaccaatcttgtcactcctccagcagttgtcagtagtcaacctaaattgcagactccagtgacttcgggttccctcacagcaacgtcagttcttcctgcacccaatacagctactgtagttgctactactcaggtgcctagtggaaatccccagcctacaatctctttacagcctttgccagtgattttgcatgtacctgttgcagtatcctcccagcctcagcttctacagagccatccagggactttggtgactaatcaaccatctggcaatgttgaattcatttctgtgcaaagcccacctacagtgagtggtcttaccaaaaatccagtatccttgccatccttgccaaatcccactaaaccaaacaacgttccttctgtgcccagtcctaagtattcaaaggaaccctactgccaantgctgcaccattgggaacaacacttgctgtgcaggctgttccaacagcacactctatagtacaagccacaaggacttctttacccacagtgggcccatcaggactctatagtccatcaactaatcgaaggtcctatacagatgaacaattccaaatttctgcatttagtacttcgtctgctgcagaacagaacagcaataccaccccaagaattgaaaaccagacaaacaaaacaatagatgcttctgtcagtaagaaagcagctgatagcacatcacagtgtggaaaagccactggcagtgattcaagtggtgtcattgatctcacaatggatgatgaagagagtggagcttcacaagaccccaaaaaactaaatcacactcctgtatcaaccatgagttcttctcagcctgtgtcacgaccattgcaacccatacaaccagcaccgcctcttcaaccatcttgggggt

SEQ ID NO: 359868 - DNA, 649 bp, Homo Sapiens
  misc_feature (67)..(67): n is a, c, g, or t
  misc_feature (76)..(76): n is a, c, g, or t
  misc_feature (78)..(78): n is a, c, g, or t
  misc_feature (84)..(84): n is a, c, g, or t
  misc_feature (92)..(92): n is a, c, g, or t
  misc_feature (99)..(99): n is a, c, g, or t
  misc_feature (126)..(126): n is a, c, g, or t
  misc_feature (163)..(163): n is a, c, g, or t
  misc_feature (176)..(176): n is a, c, g, or t
  misc_feature (180)..(180): n is a, c, g, or t
ccttgctcaagttttgaaatccaggcggggttaattggcccgccccatcaaccaacacagtgggacncctttgttncnttaacntttcaccnttttgancctttcgttatttcttgtgcggaggantaatgctgagtatgttgtcaacttccatatgcgacantgttgcacgtagntgcntcaccagagccagattatcttggtcttccaagactttgccacccacttatctcagtggactccaaagcaaaagctcccgactactagctctgttagttcccagcctgcctaatacctcagatgggagagagcccagagagaggagtgagggtggctcaacctaatggaatttttaaattgtatacaatactgctactgattgttataatatcctcttgcgttttccctgtgggaatgcccagcattaattaagtcccatttcatttttgctttactttgcatttgattgctgtgaagatgaaagcattagacttttatccccttcatgtcacttcttcggcattatggtttgcatctgaaagcagttaaatcttgtttactgatgagaatgacatacatcctttccatttagctcataagcacggctatctttttaagagaaaaataaagccatggtattttcatattt

SEQ ID NO: 359869 - DNA, 810 bp, Homo Sapiens
  misc_feature (782)..(782): n is a, c, g, or t
agtatggtgaatactttaaaggtaaccagtagtcaacactaactttgtttccaactagaattaaattcatgctgtgcaaggagtcagacaatgagcaattctcatcttactatttatacctctgtggcttagggtaagatgctctgagggacaaatgtgaataagatttccttagatcttgtgctttggctccccaaggacaaggaaacctgaaatagaatggttatgtcaattgcccattcattttggttagtacgacttcttccctcatcagtttctagaacaatctcagatgacaagtgaattgtaaaaggccgtaataaattaacatatagcagtatgcagacagatcaaaacaggttatgaaatagatttaaaattacttcctacaataagtcttaaatataatgacaacattaacaaaataaccaaaggtccataggcaaatgtagtttatgactaagcttaaagcattctgaatgaatacagttgagatttcttatcagtgaggtaacagggcaatagtccttcacagtaacaaaatgtgcaagggtgcctaggaaaagtgggaggtagagagaaaaaggcataaaattaaatgtatccaagtgaagtttggatttttcaagcatcacaaatatcaatggaaaatgtggaaaaaaatactgatagcagcagctcatagaacaacttatccattaaactacagctaatatccctgttgcatcaattccagaagcaacttgcttaagaaatgggaggtcaatttcctatataaaganattccaaagtatccaatctcttagaacc

SEQ ID NO: 359870 - DNA, 661 bp, Homo Sapiens
  misc_feature (20)..(20): n is a, c, g, or t
  misc_feature (59)..(59): n is a, c, g, or t
  misc_feature (67)..(67): n is a, c, g, or t
ttatctaattaaaatatttntctcggtagttaccacaaaaaagtaacatgggggaattntatttacnttttgggaccaaaatacaaatgaagagcaggatgacaccttgctcctttccctcccgcttcccagaaagaaaaagccccaaagaaactgctcagtacaccaaggatcacaaaagggtaatttgtaatttggtgatttgtatgtagtgtagcacagaaaaaaaattgcacaagtttttccataaatgaaaccaaaggttcaaattcatcctgtgtcaggttcaaattcatcctgtgtctgctctgcagccattttagtaagctgggcaaggaggtcatttaaaaattgggtttttcctctttcccctgactcttcgcaccaaagtcacatccctgatgtagatacttcttgggggaggggaaaacatctggctctatgcaaacagggctcatcaaaaatctttatgtgccaaaatggatactgacattgctatgaacaaatctgttttttcttccctccctgcctaaagactcctaataagggacattaaatcatacacaactgaatctaagatatgaaaaactagtttcaatgacaaagacttgaacacacagttaagagataaattcaaggtggtagacacctagaaaaagct

SEQ ID NO: 359871 - DNA, 1384 bp, Homo Sapiens
gaggatcacgatgtccggtaccgtgtctttaaaacaaaggtacggaccatgtgctatatataaatcgaatggcttaaactaattgctatgatcctctaacaccgaaatttcccataaacttaagtgcctacacttaggacttttgaactttcagtcatctttttcgtggtgtctcactgaacgatgtgttagaacatgtgttccatttggagttttgggcctgtgcacggtcaaccccaattaccaatttagttgaggctggattcgattgctcagttcacctgccacgttctctccaaggagtggggtctacgtgacctttagtcctctacctcagagccccgagtcatttctgaccaccccgttctgtgtcctcactcttgtccctgaatgggtccctgtgtggatctcagtgtgtgtgtggtttctccactcctccccgctcatgtcccacacctgccatattgaaccgtttctgcactaatcttctccacgggcacggagtggagggaacgtcttgggaaaggggagagcttgacctccatctaggtttcttttatctggagaaaaagaacacttttgaactatgtaatgcttcgccctgaaaggcaagctaacgctaacttcccaggtgacagtagcaggaacaaggaagggtaatgtttccatgacagacacttgcttcccttgggacaagtcccagaagaactacctgaagcaccaaagctccccaccccagcctggtggcagaggaagcaggtggcaccaactcaccaaagggacttgggagccaccttctcactctgtggaagtactttagtgagagctgactggcaagataaaaaccctgaaattcccagaagttacagatgccttaaagactttctttggaagatcattgcctgtactattccttttttgtgtggcataaataatatattaacctgttacaactgacaacattggttttctgcagctagggagtcttgagtcgagactgctcgccttgatgacttgctcttttttggcagatgtgtggagttggctgttacgacatccctgtgtgatcccagaggaggggcagtagctgggcagaaactgcaggcacacatttgggtggatcacctggcttccagccccttcggggtggtgctcagtgtggggtgatggtatcatagaggaccacggcgcttatcagcattgtttctttggagtctgtgtaatggaatgtatttttcaaatactgatatttgcattttctgtaacaattccttataataaaatgaagtaaaattgtgcatttaaagtggaaactttaataagacatttgtagttacttctaatgcagaagtaccaataagcattaaaaacaaattttagaaaa

SEQ ID NO: 359872 - DNA, 1017 bp, Homo Sapiens
  misc_feature (957)..(957): n is a, c, g, or t
  misc_feature (962)..(962): n is a, c, g, or t
  misc_feature (972)..(972): n is a, c, g, or t
gaatcatggttcggatatgaattgaagtggttggtacatggatacctgttctttaaaaggaatgtgggagatgagtcaagggtgaggccgattgttctgcccatgccctaccataccaatttcaataacaatcttgcctgtcattgcactcaggatcttaagatcatgtttcaaatatgttgattcaaacttgcttctaagcctgagtccagggatagcaatggtactgaccagctatggactgggagaacattgagtcctgttttccattggcttcagggcgcatccatgtggatataggaaaagcctctttccacagacttaggaagccccccgaccacgcggacgctcgctgggctgcactcagcaggctgcttgagtgggagctgactccaacatgccctgccctggctgggactaggcatgcttccagcccttcccgtgctctccctgctgtcaacacttgcgtacaaacctgcctagctgttgtaagttttcatcagtagcttaagtactagtagcaaaaacttaaattcattcagaaagttgccacttctgaatgagtagagcaggaaaagtaaactttactgaaacataatttgctgcaacagtcaacattgttatgctgaatgtgctctcaactgccctttgctcatcgccagatttattatccagtgtattcctaacagtcttttgttgtcgttgtttttaaaacaaaggtacggaccatgtgctatatataaatcgaatggcttaaactaatttgctatgatcctctaacaccgaaatttcccataaacttaagtgcctacacttagggacttttggaactttcagtcatctttttcgtgggtgtcttcactggaacgatgtgttaggaacatgtgtttccatttgggagttttggggcctgtggcacgggtccaaccccaatttacccaatttaggttgagggcnggggnttcgattggntcagtttcacctggccacgtttctctccagggagtggggggtcta

SEQ ID NO: 359873 - DNA, 539 bp, Homo Sapiens
  misc_feature (36)..(36): n is a, c, g, or t
  misc_feature (56)..(56): n is a, c, g, or t
  misc_feature (67)..(67): n is a, c, g, or t
  misc_feature (83)..(83): n is a, c, g, or t
  misc_feature (236)..(236): n is a, c, g, or t
  misc_feature (285)..(285): n is a, c, g, or t
ctaaaaaacccttccttgggaaaaaccatccccggnaccaaaccccttttttgtgnggccaaaaaanaaatatattaaccctnttaacaactgaacaaacaatggttttcctgcaacctagggaaaccttgaaaccgaaaacctgcctccgcccttgaatgaacttgccacttttttggccaaatgtgtggagttggcctgttacgacatccctgtgtgatccccagaggaggggncagtagctgggcagaaactgcaggcacacatttgggtggatcaccctgncttcccagcttcggggtggtgcctcagtgtggggtgatggtatccatagaggacccacggcgcttatcagcattgtttcctttggagtctgtgtaatggaatgtatttttcaaatactgatatttgcattttctgtaacaattccttataataaaatgaagtaaaattgtgcatttaaagtggaaactttaataagacatttgtagttacttctaatgcagaagtacccaataagcattaaaaacaaattttag

SEQ ID NO: 359874 - DNA, 1094 bp, Homo Sapiens
  misc_feature (76)..(207): n is a, c, g, or t
tgtgaacggtcaaggtttaagggtagattcgggaagttatcaagtttatcacttgcactcaagaatgattatccannnnnnnnnnnnnnnnnnnnnnnnnnnnnnnnnnnnnnnnnnnnnnnnnnnnnnnnnnnnnnnnnnnnnnnnnnnnnnnnnnnnnnnnnnnnnnnnnnnnnnnnnnnnnnnnnnnnnnnnnnnnnnnnnnnnacaaggacatttacctatggtcatattattactccagcatggtgcagaccccactcttattgatggagagggattcagcagcatccacctggcagtattgtttcaacacatgcctattatagcatatctcatctcaaagggacagagtgtgaatatgacagatgtaaatgggcagacacctctcatgttatcagctcacaaagtaattgggccagaaccaactggatttcttttaaagtttaatccttctctcaatgtggttgataaaatacaccaaaacactccacttcactgggcagttgcagcaggaaatgttaatgcagttgataagcttttggaagctggttctagcctggatatccagaatgttaagggagaaacacctcttgatatggctctaccaaaacaaaaaatcagctcattattccatatgctaaaaacagaagccaaaatgagagcccaaccaaaaggtcagactttggaggtggctgcagaaatgcgagctcttcctgctgctgatgctttctgtgattaccatgtgggccaattggataaatattggaacttcaattcaaattcttggcttttaaaagaatggcttctaataacactggttttttcttgacatctttggtttcccacggttcttgggtcggggattaaaaaacctgtggatacttacccaacagccttttcgggtaaagttctggtttttgggaaaatttaatgaccttgggttcaaccttaattttttccccggattaaacaggaacccccctttccattttccgggttccctttttcccacataattaccctcttcctaaactttttcccataagaattatgggggcaatgagatccaggcttccccataaggcttcttg

SEQ ID NO: 359875 - DNA, 626 bp, Homo Sapiens
  misc_feature (111)..(227): n is a, c, g, or t
gtaataaaacctgactttattgccacctgatgtgatacaataaatacacatcatcacccacaccaaatacttcagcacaaaaaggaatatcataatacctacaactttcannnnnnnnnnnnnnnnnnnnnnnnnnnnnnnnnnnnnnnnnnnnnnnnnnnnnnnnnnnnnnnnnnnnnnnnnnnnnnnnnnnnnnnnnnnnnnnnnnnnnnnnnnnnnnnnnnnnngagttggggaagaaaacgtgtgtaggatgatttgaggcagaattgactgggtgatagttattaaagattccaccattttaatttcaccatataaaaattatgccacactactaaaacaactaaacctgattaaatttttaccttcaactgagactactaaatgtgacaatgccaccccaaaagcggaaggcatagtaattaagccgaagttctagcaataaattttagtgggtcttagtcactctggtaagaaatgtaatacattaatctacttaaacattttctgagtgcttgctacatttcagccagaggtatagagatcagtaagttctgccagtttactgggtaaggtacctgagtcaattttccggagtatgaacaaggtccatccataaaatg

SEQ ID NO: 359876 - DNA, 689 bp, Homo Sapiens
  misc_feature (22)..(22): n is a, c, g, or t
  misc_feature (39)..(39): n is a, c, g, or t
  misc_feature (49)..(49): n is a, c, g, or t
  misc_feature (55)..(55): n is a, c, g, or t
  misc_feature (62)..(62): n is a, c, g, or t
  misc_feature (71)..(71): n is a, c, g, or t
  misc_feature (213)..(213): n is a, c, g, or t
  misc_feature (448)..(460): n is a, c, g, or t
aaatggaaagttaagatccaancagtcatatttttaganccaggaatcntttaangttcttntacagcccnttaaaattagaacttgaaaactttgagtaaccttactacaatctcatcccaacaaactttaatggagcatgtttggcctatttcattgtggcctgactaggattagaaaatttggtcgtggtataccaaagaagtgtatttncaataggatttaatttgttgttaatatgtatttgttgaaattaaaattgccagattaaatgaatatactgtcgcatctttttaacatagtaacgtgttactggaaaaattaagttgttgaaagtaagttgttttcccatttaaaaatatctgaatatatgatttgcatgtgtaaatctgaaaaactaaactacagaaacctagggttttctatttcttttttaagtcaaatgcannnnnnnnnnnnngttatacagatgaaccaagtgtctaaaatacttgagaaatttgtggttgcatgtctgttttaaaaaaaaggctttttgttttttagcataagccagaatattctaacctactaagtctgtgtcctttgctccttttgcagtatactttcatctaaattactgatccccaatatgttgatacacaggtgagaaagggaagaattcctaataaactgctattacttttaaa

SEQ ID NO: 359877 - DNA, 340 bp, Homo Sapiens
  misc_feature (57)..(79): n is a, c, g, or t
  misc_feature (85)..(85): n is a, c, g, or t
  misc_feature (87)..(87): n is a, c, g, or t
cggcctactgttgaagtgtagattctagtgaaaattacatagtcataagagaaatgnnnnnnnnnnnnnnnnnnnnnnncatttngntaaagttgtggtattattggttctatgctccctggaatattactgctttgtgaaagtccagactgaacgcagcaccctctgtgtacctagtacagttataaacctgggtctctcactacttgatatttttgcattagttaagacagaaatttgatagctcggttagaggggaggggaaatctgctgctagaaatgtctgaactaagtgccatactcgtctgggtaagatttgggaaacataacctctgtacat

SEQ ID NO: 359878 - DNA, 800 bp, Homo Sapiens
  misc_feature (123)..(123): n is a, c, g, or t
  misc_feature (535)..(544): n is a, c, g, or t
gcaacatacaaaataagttaaatgattcagaaggttttgagccatgaagttccccaataactatgttcctggctgttcatgcagccatgacgtgccaagctcgctggtctatgaccagaactncaataaatacagatcaaacaaaaccgcaaaacacttaaattagatttctttagaaactgatgaaagtcaagaaaatatatacttaggattaacaattccattcttaacttacatcatccagtggcaaaaagcacgaggcaagtattcagtccttagcacactttctaacttgtaccggtttggcccaaaaaggaaaaaaccaaattcctttaaaaatgtttttttctcattcaaaatatccaagaaattttataaatttctactcatctattgttatgccctcttatataacttatgtataggatagtcatattttaaagttattaaaataacatcttcactaactgaaaccattatgatgtgccagaattgggtttactgaattttccaaagtggtataaatatgaaaggnnnnnnnnnnttgtgctcaggtgtccaaaaggaggaaaaaaggtccacaaattggatcctcttctaatcgacttccaggagggtttgcatgaatgaatacaaaaagtggtgagtgtataatctaaagtggttatatactaagctcattacattttggcttatgactgcttgcttggcaattactctcttcaacatattacagttacttagcaattcttcgacgcgtggtcgacgatatcccgtacctccgggccggtaccagcctg

SEQ ID NO: 359879 - DNA, 709 bp, Homo Sapiens
  misc_feature (67)..(67): n is a, c, g, or t
  misc_feature (643)..(643): n is a, c, g, or t
cagaattgactttcctcatcaggttaaatacatcctttgtttgccagtgaagtccacgtgcttaagngagaaagaggtcccttagaagaaatgcagaaagaatgggtcttcccaacatatgagaaaaaataacatcttgtatttcctatagtcctcaaccaacaaacaaaaaagtagttaccatatatcacagattagataaaagattcacagacaaaaagattatataactaattgaaggtcatagagaaaatcagctttctcaagatcagagcccagtcctctgactcattgtttgaaacttcccattatgccatttatctaatggaaggctgtggggttaatctacaattacactttgccaaaatcctttccaaaaatctttagcttgacattgatctaggataacagatgatgcctgaatcataaggaggatttcagactctttatctctttgtgtgataacaaagatctgaaagctttgttaagaaaactggtgatgagccagtttctgaacaaacctctggtaaaagttctgagaaatagggacccatagagttaaaaggagctggtagatttctaatggaacactatcctcttcagaagacctctaattggatattttatagctacttgagactgngttccacagcatttcttttagtcctgagagctttggcaggggttaattgaccaggaaaagcattca

SEQ ID NO: 359880 - DNA, 730 bp, Homo Sapiens
  misc_feature (534)..(571): n is a, c, g, or t
agcctattgaaacttttattgtctagcacttcaaacatacatccaactaagttagataatttaaaagaaaacacacacaaaccttgaagagatttatggaaaaattaaaggtattgaatatacctcaggaaacggtgattttacagagcaaacttcagccacatatcacattacagatcaaattagtacttagtactacaactgaagacaatttaagaacaagaagagatcacggagaagcaagcagcatcccaggatgataacaggcaagcagtagctaaaacagatatgctaccccatggctcatctatttagctattcattcaactaatacttattttgggtttgctggctgccagatgaacaacctagacagagttcctgccctcaccaagactttcagtcttgtggaatgtattaaacaaatacacaaacatgtaaactatgaaaaaatacttgcaaataatgtgagaatagctttggggagttagaatgtaatattttcagctgagatataaagatacaaagccttcnnnnnnnnnnnnnnnnnnnnnnnnnnnnnnnnnnnnnnctggaaatttacctgttgcagagaggggagagtttatttagtcaaaagggggaaaacaacatacccatatgtactataatacactctagcccattgatatattcagtatctgataaaacaatttgtgtagatcttctgtttgatgtacataatatttct

SEQ ID NO: 359881 - DNA, 867 bp, Homo Sapiens
  misc_feature (40)..(40): n is a, c, g, or t
  misc_feature (206)..(388): n is a, c, g, or t
cattggcctcagttccgctttctgcttcagttcagccagngccgccgctgttcttcaatcacttgttgtccttctgctgcagagtagttggcgcttggtctcgatgtcctgcagtgtggctgcaggttgcgaggaaggctgccgtgccattctgggtgagtagagcgctctttgggaggggctacgccccagggtagccacgctgnnnnnnnnnnnnnnnnnnnnnnnnnnnnnnnnnnnnnnnnnnnnnnnnnnnnnnnnnnnnnnnnnnnnnnnnnnnnnnnnnnnnnnnnnnnnnnnnnnnnnnnnnnnnnnnnnnnnnnnnnnnnnnnnnnnnnnnnnnnnnnnnnnnnnnnnnnnnnnnnnnnnnnnnnnnnnnnnnnnnnnntaagcctcagttgcctcatctgtgaaatgaagttaagaatgcccattcctggaattatagtgaaaatgaaattagatcatgtagataaatgcccatcactgattccagttggaaagcactcaaaaaataaatggggctcttacaattgtatctgaatcctcgcaacatgggttatctagacaactttttttgacagctaatatatagtcctttcccaatcactaactgaaggccttctgaaacttcaaattagaaacatttgctattgaacttcaaactttatgggaaaaaagtgactagagactaaggtcagaactgaacttataaaagccactataaaaggattttagaagtcattaaaacaaataattaaatacagagcatgtcagtgatgctttatatgtcttaattactaataaagacctcctataccattaactcccatttactatttcttcccagctcaaaacttagcagaa

SEQ ID NO: 359882 - DNA, 670 bp, Homo Sapiens
  misc_feature (48)..(48): n is a, c, g, or t
  misc_feature (73)..(73): n is a, c, g, or t
  misc_feature (87)..(87): n is a, c, g, or t
  misc_feature (123)..(123): n is a, c, g, or t
ctttaaattggattccaattcagaagataaaaccccttttgcgtgacncgatatgggaaaattaacctatttncagaggagccaagnaagaagtttttcgatccaatctcttctatcaaaagncaatggaatatttacctaaagcatctgggattcattttttacctttcctaatatgtgggtttagtgggagaattgattatgtcatttcttctgtaaaggtgaaaatcgtttttataaacaacaaagtaacttgtgaatgaaagaagtaatttactagaacaacgcttgttgatgataattgacatttaggtataacgtcatatatgaatgattgtatttatgtatttatttgtcaaaattgtacatactgtttcgccaaaagtaattgtctgtaaaagtgcactctccaggtttgtagtactatttagggttacatgggttgccaatcaagctgctaatcagaatactatttttttgtatcaatgttataaaactaaaaatgacagacactgaagatatcattacactttcttcaccttcctcttgaaatgtaaactgttgactgaaagcgcaatgcttatgtacaggcccatctgtcatgaggaagattatggttccataaagctgatttttttaaaccattgggacaaataaacagaaggagaac

SEQ ID NO: 359883 - DNA, 640 bp, Homo Sapiens
aattgaaaaagatataaccagcacaaatgtccatgcataagaaacctctatacacggcagaaagaaatccaaaactcttgagaactcccttttaaaaaatcattgcttatatattttcttactattaaatacaattactacagtacattgaacaataagtgctaaaactctaatttgttcgagacaaacaagttggaaagaatatggaatgaagacttctggatacttatttggattaaagtgggcagattttatgatgacccacactattaagaggtttttctgccactaggcagagttgggagtctaaaacaaaccaccaaaaaactagatttctttacactgtgtttatgaagaataagcactagtacaagaaaatctttagttttatgtatataaccttctaatttgaataacaattatagcagtactctaaagtatttcacacaaaaggaaaacactgatcacaaatctaattctaagcactctgtctgaagaacaatttatctttcacaagctgagctgtttcagtattagtgaatcgagtaacacctagaagcatgtggaccacaaattctctagtgcatgagcaagtcaagttctgagaaaggaactgatgctttttaaaattttctgtctg

SEQ ID NO: 359884 - DNA, 807 bp, Homo Sapiens
  misc_feature (23)..(23): n is a, c, g, or t
  misc_feature (51)..(51): n is a, c, g, or t
  misc_feature (254)..(254): n is a, c, g, or t
ggacttaaaaaaggaaaaagaanaccaaaatctccgcaagtgtccaaaacntagtttcccatgagttgcgacttgaaaatgtgaaacggcactgtattgctgatactgcacctttaaccataatgagcccttctgaggtcattattgaggttcatataatgcccgaagatgcagcatttggtgctttgttttcctttccgtttcaagacctttttcttttattgcaaggggaaaaaaaatgtcatctccccccnacctcatccctctttgtgacagcagacctggctgtgttgcccctctcctcctcactattctcaccaggccatgggactttgggggcagtgagagagagctggaaaggggcaaccctgagcagcaggtgtgccccatgccctgtgggtttcccctatgtccagtgactgtagacgggctgtcttgccaggcctcagccccgtctaccctaagcctggccccaaaggtttctctttcttcctccttgattttccatcttgacgaaggcattatatagaatcattttaatcactttcagatgttagagcagcgtattttacaggcatttatatccattgctttcctcagcaaggcatgttactacttttatcatctaaggaaaaaagacaagggaattccagtcaggcattattttcctattactagtgtttgcagaataggtgtaggactatttaagtttagaccttggtttggtagttcttgtttttaataaggggaaaaagataaaataacccctatttttcctgttattgtatttaactaatatattatttc

SEQ ID NO: 359885 - DNA, 665 bp, Homo Sapiens
tcctcgggcctgttggcctactgggtgttttacaatcagtggcttagattcagtgaaatacagtaattcattcaattatgatagtatctttacagacattttaaaaataagttatttttatatgctaatattctatgttcaagtggaatttggagacactgtgttctaattttaagaactgtttcagtgttattagattagtagtagggctgtagatggggtctttcgaggtcctttgcctacctcagtaacagaggctgggtctgagccttgctcgagattagctcttcaccaggtctgtgtggtaatcatatcgtagttaccgtaggtcacgctgcaagtgtaatttacagtgaggcatagtcttttccagtgattggaatacttgtgtcaccgatccagggtttctctttcctgagtctgaaatacctgggaaaccagttagaaggtgactgggtagcctaggagtcaaggatcagaaagggtacttcatatatatatggcagaattggtgcaggtgatcctttgaaaaatgacaagaattgatgaaattttggttacttcctccaattttttgctgaataacatctcctttctacctgattggagtaggcttgctttctcttacttaatttctataaatttgccattgttttgtctcaagt

SEQ ID NO: 359886 - DNA, 684 bp, Homo Sapiens
  misc_feature (455)..(455): n is a, c, g, or t
gaattacacatcctcttgttcttaaaaaagcaagtgtctttcgtgttggaggacaaaatcccctaccattttcacgttgtgctactaagagatctcaaatattagtctttgtccggacccttccatagtacaccttagcgctgagactgagccagcttgggggtcaggtaggtagaccctgttagggacagagcctagtggtaaatccaagagaaatgatcctatccaaagctgattcacaaacccacgctcacctgacagccgagggacacgagcatcactctgctggacggaccattaggggccttgccaaggtctaccttagagcaaacccagtacctcagacaggaaagtcggggctttgaccactaccatatctggtagcccattttctaggcattgtgaataggtaggtagctagtcacactttttcagaccaattcaaactgtctatngcacaaaattccgtgggcctagatggagataattttttttcttctcagctttatgaagagaagggaaactgtctaggattcagctgaaccaccaggaacctggcaacatcacgatttaagctaagggtgggaggctaacgaagtctacctccctctttgtaaatcaaagaattggttaaaatgggattggcaatcctttaaataaagatgaacttggtttcaaaaaaaa

SEQ ID NO: 359887 - DNA, 977 bp, Homo Sapiens
  misc_feature (848)..(848): n is a, c, g, or t
gcagctatattagatttactagaggtgctaagttagaacactaggcttttattgaggcaggttttaatattgatagatgctttttgtttggtttgtttcttctgggagagaatggaggacttaagtagaagtagctactgataacagactttctagtagcagtttccactccacggttacctttttagtttcatagtatcttttcacaaagtattacaaataagctagattctcccagtttgggaatgcaagtttgctacatttttagcctggcaatatttgtgtaggtattgccttattggaaattctggaaacctgatactgcaacctgcaatgtaggatgtttgtatggcatttaaaggtaatggtgatgtttattattctatactttgcattctgtgagagtaattttcactctgtcttaagtgtgagtaagcctcttctaaaaatcttgttcttgccaagaaatttataaatcacatacgaagacgtctgttgctaacagttaactttatgaggtaactatatccttctatttctctggactcatttttaaaaaatatgccgaatactgcatactgtttaaggtagtatataagtttatgagagaagtggagagctttcttccttgaaaagtcggtatttggtgagataccatttgcctcacagagaagtgttccccactcccatccccctttgccagattaataaatattttgagaaaagtgacctaaaaccgctgaaatcttaggtgcatctgtctgcagacctccttaagccggctgtatcttaccattcccttactgcactgggtaagtgttaacttagtttttgttgtttgctctttntgctttaaatattctcccaattaccatttatgcacatggttagggttaatactgcatggtattcatttatcttgtttcatgaactttccagtactgtacaggtcacaagtaatgcctgtggcatcgatg

SEQ ID NO: 359888 - DNA, 655 bp, Homo Sapiens
  misc_feature (29)..(29): n is a, c, g, or t
  misc_feature (53)..(53): n is a, c, g, or t
  misc_feature (69)..(69): n is a, c, g, or t
taaatgtagaaagcttcttgcaaaattgnaaaagaccgaaaaagtaagagttnagtagaccagaagctncagttattagaagaaaaaacagatgaagatgaaaaaaccatataaatttggagaattccaacaaaagcctctctggtgaactcagagaagttaaaaaggaccttagtcagttacaagaaaacttaaagatttcggaaaacatgaatttacaatttgaaaaccaaatgaataagacaatcagaaacttatctacggtaatggatgaaatccacactgttctcaagaaggataatgtaaagaatgaagacaaagatcaaaaatccaaggagaatggtgccagtgtatgataaaatccatgtagtgatgaggaatggtgttaaataatgtaatatataaaaatcatgatataagaatgtttgaaggtgatgcatgtttgattttagtagtataaatgtattttagttcaaatgatgtataaagttttatgaatgtgagtttctgcttttgaaaattgcttgtaattcctagccttcaaattattaaacactccttgagtgaaataattttgcattgcaaagtgttttaggatgaactttgttatagttttaactccaataaagttcatcagtttaattgactgtaaaaa

SEQ ID NO: 359889 - DNA, 986 bp, Homo Sapiens
  misc_feature (385)..(385): n is a, c, g, or t
  misc_feature (667)..(667): n is a, c, g, or t
tttgctgatggaaactaatgaggtagtggtagtcacataagaaattcacttttttgagtatacctatgactctatatgtaattccatctcttccttaccagggaaaatataaaaacacaaatacatgacaatgctataaatactgtaataacctggaatcacatctaatctacaaaataatttttaattaaaaagtaaatcatctgaaaacatgagtactttgactattttttagcaacaaattacttttgacacacagcacaattgatttaacacttccaattttggaactattggataaataatgatgggatttaaataaagcaatccgattctgctattacagcatagggtctcttgtagtcctcttagtaaaaactattgngacatttccttctttctccaaatattcggcctggaaagacctaaatacaatgcagggattgaatcaaattcacacattttttttcctacggaaacaacaacctttcttgcttatatttaacaaaaactagtatagattccctttatattaatagttatatggtatttttttctcagagtagaaatcaggtttataggctaagaatataggctaatttggagcataacactaaccagcatgaacctaagtgagtacaaacttttagaaaaagaatatagtaangacttctgggagaacattttcagataaaagcccctttgagggattgaaaagaacaatcaccatcagcacattgcttcgtcatgctgtggtagggagagaaatgactgtgatacatggcagtaaggtagattagaaagggtgtggattttgaatctgaatgaactgggtttgagtcccagcaacccagttggtgaccttagccaaatttcaaaactcttggagggcaggtacctggcagatagaaaaaaaatgagaactgaaaggaaacaacatgagatattacatatacattttattttacacacataatatatatata

SEQ ID NO: 359890 - DNA, 1418 bp, Homo Sapiens
  misc_feature (22)..(22): n is a, c, g, or t
  misc_feature (302)..(302): n is a, c, g, or t
  misc_feature (359)..(359): n is a, c, g, or t
  misc_feature (1006)..(1019): n is a, c, g, or t
aaggactggtgaaaacaaaatntcctactaatctctcctaagtaagccaacatggggcccttagtattctcaatctagtaaaaatcagtagaagaatagtaagcattaatactattaatctagtatgcagccttcatgagtatatccagttacaagatgctgcctctatgaatttcatttttcttagcatttatgaacatatagaaatttatttaaatttaaatagccctatgtggctatcatgactaagtacagccttagtcattcataacagatattggtgaatggacttaagctagaanagatggtttttcagatgccaccttgtagtgccatgaaccttttaagatagcttgctnttccggacaggaatttactttgtctttcttctgtcagcagtagtcaaatatttcactgtttagtttgaagcttgatcccaggagattttcccaaaagtcacatcttcagcatcaaaacagacatacaactcagcaaagaccagcaaaaggaacaagagatatgcaggtaaaagcccacattagtgccagggtcatttggggacttcccttggtgacaaattttctagaggaatgaaagttccagggctcagtacgtttccaggtctggttgtcatgctcagtgctccttggtgtctcccgatacctgggtataaagcaagaatcccataggaaatttcctagtgcaatcattgtaactggacaacctggaatggcctggcctgacccaacagtggttgagatggttctttagaagaatggctgtttcgtgaggctcccgtgctgctgtgaggtagaaatagtcaacacttttggtgctcacgcataaacaaaattagtagagcataaatgaagagaaatttcaaagcagttactgatctaaacaagtaaaggcaaaattaaaatgcacttatatggcagttaagatagctgttgacatgctcatctgtcaattagaaaggtccttctgtgtctctactgcctaattnnnnnnnnnnnnnnggtcctaagttcctattatactataaatgaaatgtgtaccatttaagaccggccagaaaccaccttactttcgggggttttacagttgcgtggtttctcatcagtggtctatcctactcacccacacattttgggtaaaaccccaggtcttatccctttggtttaaacgggaagaaaattcagccattttaacttgtggggtattgggcttaataatttggaaaattggtccttaacccccgaaaaacacatttaaaccttggccttcaatgggggggaaaaattcttggttccaaaaatgaggtggaatttccttaatttcctcgggctttttggggtttcccctccggggataaaaaatgagtttcaccattaaaggtgttggaaatttcctcgggg

SEQ ID NO: 359891 - DNA, 732 bp, Homo Sapiens
atgcagcaaaaaatcacaccagtctccctgtggctccccccaaatcatctcgacagaaaagaagagagaagttggcagttttcagcatattaatagcaaacgacaaattagtaactatgtactttaatcttcaacattcataattgcacaaagcatcactggtcatttaaataatacatgtcaattaatctaatgaagaaactggcaaagtagaatgttaaaagcaatacctcgagcacgtaaagaatgtttgatattaacacttaacatgcaaaacgcagattagaacagctcttttgagcatggttatttaaaatccttaccaacagggcaaagcaagcactgtggagaaatacacataaatatatccaacctgccagatctctcaggtgagtgcacaccaattctaacaggtctggctgacctggctttccacatatatacagtggtttctaatactccaaagttgtctgacgatgggaacgcagaatcggaacaaggagggaagaccatttactttcaaaatagaatccggcagggaagtctcaactcctgacaagtcacctttaaaacagcataaccagaactttcttacagagaaaaatattttttccttaaaaatgtatatgtggcaaaaatggctgaaaatcttgtccatgctaggggaaagctgagtgtggaaaaatgtgcatttttctatctatgctgtaaagaaaatacaaagccagagcc

SEQ ID NO: 359892 - DNA, 696 bp, Homo Sapiens
aaaaggaaaatgttttgaagcctcgaggacagagatagacatgagctttgacaacaatctgaaggctctcctgctttagaataagcatgtaccattcttaatccattccccttattcctacatcaatggtttttacttttcttgggtgtgagactgagtgagacacacacaaaatgtgttgacactgtgatgccggcaggcagagcagctactgactttgaacatgggcagagaggcccctggatctcatccagcccactccttttccccttccagtacagtgacactctggtgcccattggcagatggcgacttccctgcacccataactgatgctttgtgaattcttcctccttttcagaactactctgtgctaattgttctgccagtatgggcgcatcagctccatcctgacaaacaagacatttaggtaaaactttgtaggcaccttctgcttctctgcttcattgttcctgtgatagtcctgttgttattacagcatgtacccaaaacagcctcacattgttacaggaggcaggccaggacatcaaagtcatcatctttatgtggcatgactcttaagaggccattactgtatctcatggcctcttgatgtggaaagaagttgacagagggttgcagggtttaaaaacatccattaacatgaaagctaataaacctgtcagagaacaaagg

SEQ ID NO: 359893 - DNA, 701 bp, Homo Sapiens
  misc_feature (52)..(52): n is a, c, g, or t
  misc_feature (80)..(80): n is a, c, g, or t
  misc_feature (82)..(82): n is a, c, g, or t
  misc_feature (85)..(85): n is a, c, g, or t
  misc_feature (100)..(101): n is a, c, g, or t
  misc_feature (117)..(117): n is a, c, g, or t
  misc_feature (122)..(122): n is a, c, g, or t
  misc_feature (128)..(128): n is a, c, g, or t
  misc_feature (195)..(195): n is a, c, g, or t
  misc_feature (197)..(197): n is a, c, g, or t
  misc_feature (227)..(227): n is a, c, g, or t
  misc_feature (230)..(230): n is a, c, g, or t
tgttgaaatgcttacaaaatgaatggttaaaggccctggtaaacaagaaggnatttttttaagccttaagggaccaaatntnaanaagatactccaaccnnttcagggtccccgatntggtnatgtcncttgcagtggaatttcatatgattccagtgtgcagaaggttgcctagtcaagttgtaagtcctcttntntgggtcaaatgttcaaatacttttaggagncangataatgcaatatttaagatacaggaagtgatgaagactgtggcacactggagagtttggactccaagagtaattaattcagttgaaaaaatcaacagcactctgttgatcaagcaaactttctaggggccctaatccacctgggcctgcagtatgtaattccataactcatgggatgccatcaagagagacaatctacttgattgctaaagggcctttgttttctttggagttccccaggaaggagaaatgtatgtgtgtgcaggggtgaggagggggggagagtgaagaaacaatactatgcccttaaaaatgtttgtcagttttcattatgaaagaagatcaaacgtgcccactccagaaatcttggcatatgcagttattttgaagccattcagcgttcttcaagatgtcacaatgaaaagagtgatgattttttaaataaaaaattaacatgtttatccaaaggga

SEQ ID NO: 359894 - DNA, 328 bp, Homo Sapiens
  misc_feature (315)..(315): n is a, c, g, or t
ctttcagtttttaatgcttatctattgatcatctgagctggaattactgattattactctgtcctctgtgaactagtggcattctgaatttggtaaaataaccattgatagttttaggatagtaaatcatttctgttatatgagacacccactgtacagttctcagggctctaaaacccaaccatatttctgtaaccattcaaataactccttgaaacagttatacttgctagttcggtctaaaattttccaaatacattagataggtgaaaatttgcatatattcaagaaaaatcaaaataaagtctattttanaaaatcaaagggt

SEQ ID NO: 359895 - DNA, 437 bp, Homo Sapiens
ttaaattgaggtccgggtggaactataaaaaggaaaggaaagagaagtaatcaagggaggccaaagtgggaagctgtattgctgatctaacgtgctgttccagttccttcttttggctctaagtgggactactctggatacagtcaggggagaagagggtcctggatgtctaacaagcttttcccatcattgcatggagtcctccaaacataatctccttcagagactggcaaaggctcccaagctaactcccagatggacacatggacttcttgagtaatcattttaacaattcctaagctcgactttgttgttgctacatcatactcatcgcgtttttgtgtgatgatggcagtggcagggggctgtattacatccaaagaggaagggctacctgtatacttttagtggtaacctcttttctagttcgtgcagat

SEQ ID NO: 359896 - DNA, 705 bp, Homo Sapiens
  misc_feature (124)..(124): n is a, c, g, or t
  misc_feature (687)..(687): n is a, c, g, or t
cttaccatgagagccactcccatcggaacataaattagtcttagtatattccaggttctcccacatgttcacattcccaactgggtgcaccagttgacttttgtctttaactttccttggcaanccgatagcatcagaggaagagataagctgccccttaggaagctgattgtaatgcgttccagacgtctgcacggcccctggtgcaagcaccagctttctgttaaagactcagggttatgttgtttggatgttttgttgtttgctttttgaaaaagccagatcagatttttgtcattgtataaactccagtaggagaagagggatgcgtttttaaggtgatttctagaatgctctggccgacttagctgcagaaggaaaaggagaaaggaagagacagtgtatattttggcactgaaacttctttagtaacaatgcattcattcacaaatctggagagaactgaatgtctgctttttaaagtctgaattgaattctcgactagactttgagaccctgagaaggttttcaatccaaaccatgcttaatattcacgttttatcattattgatggaaagtgaaagaaaatttgaattcttggtagccagatttgacattagacttttacatttataacctcacttaaactttacaagaaatctcattacaggtattattatccccatnattaaaaaaggaaaatcc

SEQ ID NO: 359897 - DNA, 646 bp, Homo Sapiens
  misc_feature (27)..(27): n is a, c, g, or t
  misc_feature (36)..(36): n is a, c, g, or t
  misc_feature (68)..(68): n is a, c, g, or t
aaaggaccccatttgttgtaagccccncaaccccancagaattaaaccctggagcaggttgacagcanaggcttccctcagatcaaggagccaggagcagatgatctatctctgtggccacacagagagatgtcaccttatgcaatttgcatatcatattcaattcccccaactgctctttctaatttattcaactggggaccaggctggtctcatgccaacctaggagatgtaccatagcagtatgagcagaattcctcaggaggaacaattagcaaaaactgcagttgcctctcgataggcctgagcagagagaggaacaatagctctcacgtctctcctcatcagattctaactaagcagatgttctcatgcttttttcttcttcctatgttctgtatactgacacctcttctcagtggcatatgaaatatgaaatgtcatgtgttgtgagtttgtataaatataaaggaatatatatacacagtagcaaaagagaagatctcatttacaaatatctatggtgtttccttgttctgtgttgatctgttttattgatacaaactgaattttcttaatgtatcttctatctctattatagtggcaatgatggtatatgcattaaagttcttctgaattgtgtatc

SEQ ID NO: 359898 - DNA, 941 bp, Homo Sapiens
agattttcttccagtacatgggtgtaatttaaaaagcagtcctttttaagacttttgccatagtgtttcccagtttaaagcaatacctttcatagtttctttcaaagtttaatacatccaatatgtcaagttaaaccattctgggatttgcaaagtttaatacatccaatatgtcaagttaaaccattctgggatttgcaaagtttaatacatccaatatgtcaagttaaaccattctgggatttgggaacttctttaaaggaaaattgtagtagaggtcatcttgatggaattgtgttttaaagttttgtgaatgagttaaatatcattgatagtcttgtgtgtctcacatatcagctttttcataaggaaaatactttatttgcttttatctgagaatttctcagtatgaaaatgattgtttaaaatttcccctctttttgtcagtgcattgggaatagggatagactttacagatttatggaaattaaatttatggggaaaagtttttatttttaatattacttatagctgagtcagaattaaaggagggaattgtattgatactccaatacctaaatttcacaataccacttaggaaagctatttcaacaaattacagttttattgttaaaacagagtcttatttgagatgtattgctttatttttcaattaaaagtggttttctcctaaaagaaaaaaagcaagaaagacggagagagggcgagaggtctggcacccgaagaagaagccgagaggacatagattcgaaaattggcggggccgcccttcggccttagaaaagctttctcaaacacttttcgtttgggcgccgcggggcccaagaaaggaaaaggggacagtggggccctaaactctgttttccccaagagaaaacccgcggccactagaaacaaaggggctgggggattcgcccacc

SEQ ID NO: 359899 - DNA, 667 bp, Homo Sapiens
  misc_feature (34)..(34): n is a, c, g, or t
  misc_feature (37)..(37): n is a, c, g, or t
  misc_feature (48)..(48): n is a, c, g, or t
  misc_feature (106)..(106): n is a, c, g, or t
  misc_feature (330)..(330): n is a, c, g, or t
  misc_feature (344)..(344): n is a, c, g, or t
  misc_feature (346)..(346): n is a, c, g, or t
  misc_feature (403)..(403): n is a, c, g, or t
  misc_feature (458)..(458): n is a, c, g, or t
  misc_feature (496)..(524): n is a, c, g, or t
tttgtcccctaaaagggggttcccaggtcaagtncancaaggtgctcnctgttgccttttaaaagtggaaggtgcctgtatcggaagtgtgctcaccctacttttncccttgccccgaagggcagttcttttcctctctgttgccggatgctgtttagggcctgttagttgctatttccttgcctccgctccccttcccactagccttctaactaccttttattctcggctccaactctttcaatgatgaggtgaatgctttttctgttccacgtcactgcaaagtcaaggtgtccagcatgctctcacttataactgcctcacccgatntcacgcacagtgcnanagctgaaggtaagccccggatgttgccagattacggtggacaaataaaaaacaactntccaacagcaactcacaaatgcatgaaatgttttaacctctagacagactgccanaatttctctcttctaattcctacttgtagtgataacannnnnnnnnnnnnnnnnnnnnnnnnnnnnaaataatagtgtagtaccttgaaacaactgcagttctaactcattgtcaccatttctgtttgacacgttccacttcctttgcaattattgtatttagttgtgcactagtgtcaataaaattgacatttgtgaagcaaaaaaaa

SEQ ID NO: 359900 - DNA, 975 bp, Homo Sapiens
  misc_feature (50)..(87): n is a, c, g, or t
ggaaaatgatcgactcactatggggaactggagctcatcgcggtggcggnnnnnnnnnnnnnnnnnnnnnnnnnnnnnnnnnnnnnnatcaggccaaatcggccgagctcgaattcgtcgagagcgggggtggaggcgggcagcggagccaagctgacccggcgagcggagccggggctggagagcggcgaccactgcggatctcggaaggaagaaatgatgtaaatcactcatccaaaccttaaggtcaaaggtgagaaggaaggtcaggaagaacatggcctggccaaatgtttttcaaagagggtctctgctgtcccagttcagccatcatcatgttgtagtgttcctgctcactttcttcagttattcgttgctccatgcttcacgaaaaacatttagcaatgtcaaagtcagtatctctgagcagtggaccccaagtgcttttaacacgtcagttgagctgcctgtggagatctggagcagcaaccatttgttccccagtgcagagaaagcgactcttttcctcggcacactggataccattttcctcttctcctatgctgtgggcctattcatcagtggcatcgttggggatcggttgaatttgcgatgggtactgtctttaggcatgtgctcttctgcattagtggtgttgtctttggtgcgctcacagaatggctgcgtttctacaacaaatggctgtactgctgcctgtggattgtgaacgggctgctgcagtccactggttggcctgtgtggttgctgttatgggcaactggtgagggaaaaccggaccgaagagttgtaaaaggtctctggagtgcctgtgccttcggtggggcaacatcttgggagcgtgcatagcttcttcttggtcttcagtatggttatgagtatgctttctggtgacgggatcggtgcagatggtggtgggatcgtaacatcttggaacctggtgcacaaaaaaatggg

SEQ ID NO: 359901 - DNA, 672 bp, Homo Sapiens
  misc_feature (16)..(16): n is a, c, g, or t
  misc_feature (29)..(29): n is a, c, g, or t
  misc_feature (32)..(32): n is a, c, g, or t
  misc_feature (83)..(83): n is a, c, g, or t
  misc_feature (128)..(128): n is a, c, g, or t
  misc_feature (135)..(135): n is a, c, g, or t
  misc_feature (140)..(140): n is a, c, g, or t
  misc_feature (149)..(149): n is a, c, g, or t
  misc_feature (184)..(184): n is a, c, g, or t
cgaagtgaaggtatanaccgaggataaanggnttttcttttgcattatccggattccaaaaccagggtagtatattaagcttnccaaattgatggtgatttatcagattaacctttttgtggtgcaanatggttntaagnatcaggtgncagggtattctacttctttcctagtcaattaaaantgataatgcagcatgattcataacctaaccagctgtgcctcctttttattttgaggaccctgtagtcactataataaatttttaagccaaatttttcaaccaagatagttcttatagaaggagaaataataaatatgtgtgtgttgatgcatgcacacagaatgacctgtgaaaggaaacttaaattttgccggtaaaacaaacatatctctacagactgtgattatacttcataagcatttaaatacagttttatttatttccttaaatatattacttgggtaattaattttagatttgattgcaaagagcactgtatagcagttgggaccagctcttggcttggcatggcttggcttattgttaacagtttattggatcaagactaacaaataactttgtgatgaaaattcttcaaacaatatagctactcttttcaagtataccatttaaaatatttcatcaggcagagccctgaccaggaaaaa

SEQ ID NO: 359902 - DNA, 699 bp, Homo Sapiens
  misc_feature (52)..(52): n is a, c, g, or t
  misc_feature (54)..(54): n is a, c, g, or t
  misc_feature (65)..(65): n is a, c, g, or t
  misc_feature (76)..(76): n is a, c, g, or t
tcggcccacttttttaataagtagattatttccaaagaattttgaccaattnanttgatcttccngttaagctgcntttaagacttttcttagtaaagctcccaaaacttctcagcaaataaatctcccttaagtaggaaaactagatttcatattggcttactttgaattaacagcaactttccacaggtaaatctgttcttgcaaagatgtgagcagaatagttaaaaataatatttttatgtttcatggttctaaatggaagccataaatgcagtaaatactatctgttgtttaactactttaatcgtcattttttacattttcaagtttattaggttaagaaaaacagggcagccttggaaggcagctactacagaaaactgcagttttgcgttaaagataaagtagtattttcagctccctgaaaaaccattcctgctgaaactgctgtagaaattgtgaagctgcatgagtggagagtattgaatctgtggttatagtagttttctcaggtttgtttatcttgatgtttgatgcactgtgttttatagttattaaaattgagtaatattatttctatgcagtgttatgtgtcattggccttttgtgaatgtgcatgttttaaactgcaaattttaaacattttgtcctctaattgttattaaaaatgaaataaactttaccattacttaaaaa

SEQ ID NO: 359903 - DNA, 237 bp, Homo Sapiens
  misc_feature (225)..(225): n is a, c, g, or t
tttatttctgccttgtaaagttctatcacggcctacctggaatttaaaattcagtagacaaattaattggtcctctgcacaacttttttaataagtagattattttacaaagaaatttgaacaaatttaattgaatcttttgtttagcttgcctctaagaacttttcttaataaagctcccaaaacttctcagcaaataaatctcccttaagtaggaaaactagntttcatatttgc

SEQ ID NO: 359904 - DNA, 638 bp, Homo Sapiens
  misc_feature (509)..(509): n is a, c, g, or t
  misc_feature (572)..(572): n is a, c, g, or t
  misc_feature (607)..(607): n is a, c, g, or t
acaaacttgctggtaacaacagtagcagcagtagcaattctggagctgttgccggcagtggcaacactgaaggacatagcactttaaacaccatgttccctcctactgccaacatgcttctcccaacaggtgaagggcaaagtggtcgagcagcactaagagataagctgatgtctcagcaaaaagacgcattgcggaaaagaaaacaaccacctacgacagtgttgagtttgctcagacagtctcaaatggatagttctgcagttcctaaacctggacctgacttgctaaggaagcagggtcagggttcatttcccatcagttcaatgtctcagttactacagtctatgagttgtcaaagctctcacttgagtagcaatagtaccccgggttgtggggcctcaaatactgctttgccttgctctgctaaccagctgcattttacagatcccagtatgaactctagtgttcttcagaacatacctttaagaggggaagccgtgcactgncacaatgcaaacactaactttggtcacaagtaacagtccaagtccccaaccaccatcttgcangtttaataaatcagattcaagctaccgggaactgngggatgctcaatcaagtcgggcatggcttta

SEQ ID NO: 359905 - DNA, 504 bp, Homo Sapiens
  misc_feature (360)..(360): n is a, c, g, or t
  misc_feature (417)..(417): n is a, c, g, or t
  misc_feature (476)..(476): n is a, c, g, or t
caaggtcaacaatagggtccccaaggccatcaatgccatcaagcccttctaccaagtccgatggacatcatcagtacaaggatatccctaacccattaattgctggaataagtaatgtactaaataccccaagcagtgcagcttttcctactgcatctgccggaagtagttctgtaaagagtcagcctggtttgctgggaatgcctttaaatcagatcttgaaccagcacaatgctgcctcctttccagcaagtagtttactctcagcagcagccaaagcacagctaggcaaatcaaaacaaacttgctggtaacaacagtaggcagcagtagcaattctgggagctgttgccggcagtngcaacactggaagggacataggcactttgaaacaccatgtttcccttccttactggncaatatggcttcttcccaacaggttgaaggggcaaagtgggtcgaggcggcattaaggngtttaggttgatgttttcaggcaaaaag

SEQ ID NO: 359906 - DNA, 873 bp, Homo Sapiens
  misc_feature (120)..(120): n is a, c, g, or t
agcgggggcaccacgggggccgccgtcctggcaccaacttgaggggctgtgcggcggagggcggctgcggagcgcccgcgcgggctgcacctgctcagggagctgcccctctgttgtgtngttattttccttcttggcgtgccatcgaggcttttaggggaaaaaaagacccttcatgtggcctttataaatatgcgtttgagacagagttatatgcagaagttgaaaatgcctggaagatttctggtttctttcactacttatcctgcctttttgcatcgctgccagatttggatgatatgatattcagaggggcaccttaatcaaagccattcttcaacaagacccacctggcataagattgcacacataattcaagatggccagtcaacctcctgaagacactgcggagtctcaggcctctgatgagctggagtgcaaaatctgttacaatcgatacaatctgaaacagaggaaacccaaagtgctggagtgttgtcatagggtttgtgccaaatgcctctacaagatcatagactttggggactccccacaaggtgtcattgtctgtcctttctgcaggtttgagacgtgcctgccagatgatgaagttagtagcctgcccgatgacaacaacatccttgtaaacttgacttgtggaggcaaacgggacagaagtgcctgccggagaaccctactgagctgctgctcacccccaagaggctggcctctctggtcagtccttctcacacgtcctccaaactgcctggtcataaccatcatggaggtgccgcagagagagctccccgtccctgagctccactcctgtgggtagacttttataggcctgcgaagtttcgactctgtcaccag

SEQ ID NO: 359907 - DNA, 875 bp, Homo Sapiens
gcattcttctctccacatccctctctgtacttacagcccccaatggcccccaaaaagccagagcccaagaaggatgatgccaaggcagcccccaaggcagctccagctcccgcacctccccctgagcctgagcgccctaaggaggtcgagtttgatgcttccaagatcaagattgagttcacacctgagcagattgaagagttcaaggaagccttcatgctgttcgaccgcacacccaagtgtgagatgaagatcacctacgggcagtgtggggatgtcctgcgggcgctgggccagaaccccacacaggcagaagtgctccgtgtcctggggaagccaagacaggaagagctcaataccaagatgatggactttgaaactttcctgcctatgctccagcacatttccaagaacaaggacacaggcacctatgaggacttcgtggaggggctgcgggtcttcgacaaggagggcaatggcactgtcatgggtgctgagcttcgccacgtgctggccacgctgggtgagaggctgacagaagacgaagtggagaagttgatggctgggcaagaggactccaatggctgcatcaactatgaagcatttgtgaagcacatcatgtccagctaaacctcgtgcccaggaagcccagggaaggctgtgcagggacgtctcatctcccatgtgtgatgctgacaccagcggcctggagtcgtgggaaggaggggagccttaccaagactcctgcaaaaacccttggacctctccacgtggttggccgtcctctggcccctctcaggctgtgcttacctgtgacagcagctctgtccccaccccatgggcctcatgaataaatggcttcttgccagccttcg

SEQ ID NO: 359908 - DNA, 1809 bp, Homo Sapiens
  misc_feature (936)..(936): n is a, c, g, or t
  misc_feature (1014)..(1014): n is a, c, g, or t
atatgtcgacccgcgcctccggaatttccgctgtccattgtttctgtcttctctgatggcttcgagcagtgtttgtaattcttctagagatctcctagagatctttcacctccctggttagctctattcctaggtatcttattttttctgtgtgtagcaattatgaatgggattgtgttcttcatttgactctctgcttgacttgatgtataggactgctagtaatttttgcacattgattttgtatgctaagactttgctaaagtttatcagcagaagaagctttggggccaagactatggggctttctagatatagaaacatgtcatctgtaaacagagacagtttgacttcctgtctattcctctcttccctcctctgtttggatgcccttccagttttgcacattcagtgtaatgttggctgtgggtttgtcatggctagctctcatcattttggcacttctgactagaagggcaagaggggccagtgttgttgttacctgaaaggtaagtgcagcccacaaaaatgcagtgaagaagaagatgtattatgcatatgtttaagttaatacaattgagatatatttagcagacagaatcaatagagttgatgagtgactgactggatgtgtggggagtttatatcactcccaggtttttgacttgggcaaccgggcactcatgaaggaaaaagaggatccagggagaggaacttttctgaggactggggtagggctgaacagctgcattcgaggctggtggagggtgggctgggcatgggatgcacaaatggaaattccactgggtctgcagctcacacataggcatgaccagcatagagatagagaggccccagtgctgctgagtaactggtgattccccaggtgatggcatcagctgagaaagggaaggaaacccatggagaggacactgnaagaaggagtgagcagaccaataagaagcccacagaagacagagaaggaacaactagaggggagaagccaaagcaggncgtgtgttggtaacaccataggaactggaaggagaggacaattttcaagatggtggggatgccatacaacaggactatgtgatgatttttggctgtgtccataggaagtcacaacaggcaagggaaagaaaccagaacccagtcatggagctaagaagtgagtcagagagtagaggggtagggacagtgaggtaagtcctctttctaaggaagtttggctgaaggatagactagctggacacatgctggctgtgtggggtagagggaggaatgatggagggtaggagagccttgagcctgcgagaagagtctcttagaatagagaagctgaagttaaagttgtggaagagagtggggataactgagtgacagataatcaggagaagaaaaggagatccagactcatgacagagagatgacctttgccaagagtacagccgtctttcacggtcacagagaggtaggacaaaatgagtggtgttcaagaattggtttgtagcacaatatttcaactatgtcctttaaaaagtttctccacagacactacccaaagcagtgcttcactacagtggcagacagacctgaaaattttcatctgaagcagcagagtgaactgcagaggcaggtcaccaacccagtggggaggcctaaaagcggggcctcttttggggattcccgggtgggaagtgttggaacatcctgtagtattccctgggtctcgaaatcatccctgaatattccttcccatttttggttaattcaccatttggaacctaaggccagggaaaccaaagc

SEQ ID NO: 359909 - DNA, 443 bp, Homo Sapiens
  misc_feature (51)..(51): n is a, c, g, or t
  misc_feature (216)..(216): n is a, c, g, or t
  misc_feature (229)..(229): n is a, c, g, or t
aaaaacaccatccagttaaaagacccgggggttggtggcaagggccagggncctttccctaccaaaggaacacccccagtcctccccttaaataaaaccatggagatgcctcctctttccccagaaatttcctccttgccctgacaccagccataggaagatgcctgaacggcccacacagtgatcccattgagatagaatcctcacctatgttgncccaggtctggtncttgaacttcttggcacccaagcgatccttttgccctggaatcccaaagtgtcagatttactgaagaatatttcattgtaattactttttatactttataggtcaagagctctgttttaaagacaaaatttattgaatatactttttcaaacaaagtttcatgttctaatcattgtctgatttcagcattaaatgaaacacagtaaagaaagtt

SEQ ID NO: 359910 - DNA, 499 bp, Homo Sapiens
tgtttctctcctgtcactttgctcctatttctttcatgtgaaagaatgttcattttctttgaaaatgagctcatttcctcattttctttccatatttcagcaggaacaaagatcaccacaactggctcgccttcaactatgttagatggcaacttgccttcagtatggtgaaacacatcagttaagaccggggttgtgcatggcaggactttctacaaggacacccagtctccttaataaacatgagatgctctctttccagaatttctcttgcctgacacagcataggaagatgctgaacggccacacagtgatccattggtcagtggtgacataaggaggtcagaaggggaggagtgaggagaagtagggaagactaggtggttgtaggcctccttcatctgttcattggctgtggcattaggccagctactctttgcacttctgtaaagtgagacggtcgatcttgtctgcctctctagtcgacctgcaggcatgc

SEQ ID NO: 359911 - DNA, 140 bp, Homo Sapiens
ctttctagctctttctagctctttctagcccacaccttggaaactgaatccctttccttcatcgagagtttccaaagactttacactttggatatattatgcctgatctaacaataaaacaatgcatagatatctcccca

SEQ ID NO: 359912 - DNA, 501 bp, Homo Sapiens
  misc_feature (14)..(14): n is a, c, g, or t
gagctcggtacacntgggaggtcacccatttccagagttaaaccaaatgcaatatcgagtaaaacaaagtcatgtgggtatgtctggggtagagagaggggtagcaagttcatgtgtcctccttggtcacatatctcccaaagctctgatccctgccatgggaagtggacaggaaacatgaggtcatgacctgcaggcatctttactgcagctctgccggcctggagggggagagggggaggaagaagtatgcgctgcacatttctgaggctactgcatttgctttcaaggcagaaatcttgctctgagcagtcagcggctccagtttgggcccgataaggaagttctccgtggcctccctcaggcagagcagggaggaggctgacattgccagtctcttctggggcccaaggcaggttgcaggagatccaatcccatagacagctctgggcctcttgcatttgagtttttcagaattaaactgcagtattttggaaagca

SEQ ID NO: 359913 - DNA, 587 bp, Homo Sapiens
atatccgtggggtcatccaggtgctgcctctggcacgaggacatgtgctggagctctcttccagctgttgcgtagttcgttcctttttatttctgagttgtttttcctagggtgtgagccacgtctctttgcccatctgcccatttgttttgggctgaatcatgtccccccaacaatgtcacaggctgaagccatcatccccagggactcggaatgtaactgtgtttgtagatacgatgttcacaaacgttgattaagttaaaatggggtcatatgggagggccctaatttaatctgactgtgtcctgataaaaagaagaaatctggacacacaaaaagaccccccggggtgcacacagggagtaaaggccaagtgagggcacagggagaaggcaggggctgccagctgcggagagaggcctcggaggaaccagtcctgcccccttgatctcggactcctgcctccaggactgtgggaaaatcagtgtgctggtggctcaagccggtcgaggcagcactgaagacacgtgggttgtttgcaattgttgctgttacacctaaaactgccataaatattcatggtcaaa

SEQ ID NO: 359914 - DNA, 1302 bp, Homo Sapiens
  misc_feature (127)..(127): n is a, c, g, or t
  misc_feature (371)..(371): n is a, c, g, or t
  misc_feature (385)..(385): n is a, c, g, or t
  misc_feature (452)..(452): n is a, c, g, or t
  misc_feature (1149)..(1173): n is a, c, g, or t
  misc_feature (1227)..(1227): n is a, c, g, or t
tgttcattcaatgcaggttctccagcaagatagataacaagtttattgcctgtttgatgagcactaagactgaagagaatggcgaggcaggtgggaacctgctcgtgctggtggatcagcacgctgnccatgagcgtatacgtctggagcagcttatcattgattcctacgagaagcaacaggcacaaggctctggtcggaaaaaattactgtcttctactctaattcctccgctagagataacagtgacagaggaacaaaggagactcttatggtgttaccacaaaaatctggaagatctgggccttgaatttgtatttccagacactagtgattctctggtccttgtgggaaaagtaccactatgttgngtggaaagagaagncaatgaacttcggagaggaagatctactgtgaccaagagtattgtggaggaatttatccgagaacanctggagctactccagaccaccggaggcatccaagggacattgccactgactgtccagaaaggtgttggcatccaaagcctgccatggggacattaagtttaatgatggcccgagcttacaggaaagttgccgccttattgaagctctgtcctcatgccagctgacattccagtgtgctcacgggagcaccttctatgctgccgttagctgacatagcaccacttggaacaggaaaaacagattaaacccaacctcactaaacttcgcaaaatggcccaggcctggcgtctctgtggaaaagcagagtgtgatacaaggcagagcctgcagcagtccatgcctccctgtgagccaccatgagaacagaatccactggtctaaaaggaacaaagggatgttcactgtatgccctctgagcagagagcagcagcagcaggtaccaggcacggccctgactgaatcagcccagtgtccctgagcagcttagacagcagggctctctgtatcagtctttcttgagcagatgattcccctagttgagtagccagatgaaattcaagcctaaagacaattcattcatttgcatccatgggcacagaaggttgctatatagtatctaccttttgctacttatttaatgataaaatttaatgacagtttgattggttgctctggtttgttatttgaagggtgtgannnnnnnnnnnnnnnnnnnnnnnnncaagcttcacatttgcgtgtatctaattcagctgatgctcaagtccaaggggtngtctgccttcccaggctgcccccagggtttctgcactggtcccctcttttcccttcagtcttcttcacttccctt

SEQ ID NO: 359915 - DNA, 809 bp, Homo Sapiens
  misc_feature (677)..(677): n is a, c, g, or t
ggctgggatgtgtacttgagaatgggtctcagtacaggtgtcaaccttttagaagcgaccttgttcttcctttccttccgagagctcgagcagagaggactgtgatgagacaggataacagagatactgtggatgatactgttagtagcgaatcgcttcagtctttgttctcagaatgggacaatccagtatttgcccgttatccagaggttgctgttgatgtaagcagtggccaggctgagagcttagcagttaaaattcacaacatcttgtatccctatcgtttcaccaaaggaatgattcattcaatgcaggttctccagcaagtagataacaagtttattgcctgttggatgagcactaagactgaagagaatggcgaggcagattcctacgagaagcaacaggcacaaggctctggtcggaacaaaattactgtcttctactctaattcctccgctagagataacagtgacagaggaacaaaggagactcttatggtgttaccacaaaaatctggaagatctgggccttgaattcgtatttccagacactagtgattctctggtccttgtgggaaaagcaccactatgttttgtggaaagagaagccaattgacttcggagaggaagatctactgtgaccaagagtattgtggaagaatttatccgagaacnactggagctactccagaccaccgggagcatccaagggaacattgccccctgactgtcccaaaaagggggttggaattcccaagccctgccctgggggcccatttaacgctcaattgaatgggcctggaactt

SEQ ID NO: 359916 - DNA, 1099 bp, Homo Sapiens
taggtagcgaggcctgggtggcgaattcggcacgaggtgttcttatcagagcctcagaacaacagataggaagtcttgactctcccagtggaatgttaatgaatccggtagaagatgccacaggtgaccaaaatggaatttgttttcagagtgaggaatctaaagcaagagcttgttctgaaactgaagagtcaaacacgtgttgttcagattggcagcggcatttcgatgtagccctgggaagaatggtttatgtcaacaaaatgactggactcagcacattcattgccccaactgaggacattcaggctgcttgtactaaagacctgacaactgtggctgtggatgttgtacttgagaatgggtctcagtacaggtgtcaaccttttagaagcgaccttgttcttcctttccttccgagagctcgagcagagaggactgtgatgagacaggataacagagatactgtggatgatactgttagtagcgaatcgcttcagtctttgttctcagaatgggacaatccagtatttgcccgttatccagaggttgctgttgatgtaagcagtggccaggctgagagcttagcagttaaaattcacaacatcttgtatccctatcgtttcaccaaaggaatgattcattcaatggcaggttctccagcaagtagataacaagttttattgcctgttttgatgagcactaagactgaagagaatgggcgaggcaggtgggaacctgctcgtgctggtggatcagcacgctgcccatgagcgtatacgtctggagcagcttatcattgattcctacgagaagcaacaggcacaaggctctggtcggaaaaaattactgtcttctactctaattcctccgctagagatacagtgacagaggaacaaagagacctctatggttatctctttaggtgttacacataaaatctggaagatctggggcttggaattgtatttcagaccctagggattctctggtccttgttgggaaaagtccccctatgttttggtgggaagaaaacccatggacttcccgaaaggaagatctactgggacccaaaatatttgggggaggaattttttcc

SEQ ID NO: 359917 - DNA, 1878 bp, Homo Sapiens
  misc_feature (494)..(552): n is a, c, g, or t
aaagtccaaatctcaagcggtgcttgaaggggagggaaagggggaaagcggctttctctacagtggctttgccttctaatgccgcccactgggcctcaaaggggtccaactctggaagctggggcagggcgctgcctcagggggccaaggggggccccatttggggcgagggcgggcctggctccccagggccactgggtatggcagggggcgggaaggcccccagctttcccaaagcagagtggcaggctgaggctggagctgggcggctgagcagaaggcgtttgccaccatctgtgagggtgtgatgcccaccacgggcacccggggcatcggtgggtagcccaagcccgggtaggcgggcacaaaagggggctgcatgtgtgggggtggcaggaacacggccacttgggcaggtgcagcgtcaaagggccccacgggggcggggaaaggctgcagggcaggaggcatggtgggcactggggccactgagnnnnnnnnnnnnnnnnnnnnnnnnnnnnnnnnnnnnnnnnnnnnnnnnnnnnnnnnnnngggccttggccacctgtgacacctcctccagccatcgctcagcctctgaaggtgtccgcttgtgcccaggctggaaggcagctgcagggggcacggagggctcaccccaggcagaagtccctgttgtggcaggtggtggccctggtgctggcgctccagcactggcaaaagatgaactgatctgtgtgcacagagcgttgatgctgtcactgtcgccggcaccaggaggctccatctcaggcactgtgcccttcacctggaagtcagtgcggcgctgcagcgtggatggcagctcattcagccgtaggctcagctgccgtttgaaaggcgagttcttctggctgagtgctgggaacccacggaaggagccctggcgaaccagctgctccaggggtgcatggcgccgggggatggcggccgcagtggtgcctgcagccacaggggtgcctgcctcacccttctcaccaggggatgtggtggctggtgtcggggacacgtgcccaggctgggcagggccaggagccacagtgggggcagctgctgcctctgctttcttcttgtccggggcctctcgctcagcaggccgcccacccccagacaggcggaaggagccctcgcgggcgaagctggtgcggctggcatcgaaggcggccgtgaccccacattccttctcccgtcgctgttttcgctccaggcaggcggcaaaagcacagcccacagcgtggctcagcctctcgccggagtccttcagtgccagaaaacagtggcagatccagcggcgggtagtcccgtcacgacagatataggagaaagccttgtccaggttgcggtcaggagcacaaaaggagaccttttcgatggtctggtcgaccagaagatccttggttttgtcgtccaccactcggagcccatcggctgacacccacaggacagacttcacggactttcggcccatcgccttcagcttcttcaccgcatcttcacacacgtgcattccccgggactcctctacctccacgtgacccaggtacctgaccgggaagctgcacgtgcccttccgcaccgcgtcctcgtctgcctgccactggtgcgggcgcgacgcctcgggcacgtaggctggcttcctccgccgcaggctctgccgtaacttgttcatggtgcccgccccgtctggctccgtcctgcaggtttctgggggccccggggccccacagggggctgggggcaggtgccgctcaggcctccggggtccgcccacacacaaagccgccgtcaccgtcaacgcccgctctcgacgaattcgagcttcggccgatttggcctgat

SEQ ID NO: 359918 - DNA, 314 bp, Homo Sapiens
  misc_feature (128)..(128): n is a, c, g, or t
  misc_feature (197)..(197): n is a, c, g, or t
  misc_feature (212)..(212): n is a, c, g, or t
  misc_feature (219)..(219): n is a, c, g, or t
  misc_feature (262)..(262): n is a, c, g, or t
agcgggaatcctcccgggagccgaggaagctcgcgcgcgtgcatcccgcaccatcccccggccccgggccctggccggcgtcagaccgagctgccgccgccaccaccgcagcagcagcagtcgggganccaggcccagccagggccgcgggaagcgggggcgcccgggccctggatgtcccgcagcgcggcggccancggcggaccccggangcctgancggcacctgcccccagccccctgtggggccccggggcccccanaaacctgcaggacggagccagacggggcgggcaccatgaacaagttacggca

SEQ ID NO: 359919 - DNA, 494 bp, Homo Sapiens
  misc_feature (42)..(42): n is a, c, g, or t
  misc_feature (432)..(433): n is a, c, g, or t
  misc_feature (435)..(435): n is a, c, g, or t
  misc_feature (442)..(442): n is a, c, g, or t
  misc_feature (468)..(468): n is a, c, g, or t
taaaacccgtaaagtgccaagtgaaatccaaagatttatagnccattgtataatttggcctggaggcctatgaaatgtccttttttcctttttggtattttacattattcacattttagaataacaagaacacccaagaattacccctaaaacagagaccctgtatttaatcctactttgatcagagaagtagaatttataacaggttagctaaaattgggagcatgccttaaaacttaaagattgtatgcatatatgtgtatatgttataaacgtgaaatatatttgacacacacattcacatataaattgttaaaaactgaaggcagaatggaactaatatatgtaacagagaaaaacaataaattttatgaacttgttttatatttgcatatcaagagtcaagtatgatgtttctttaagttgactttnntnacttcantatttttaggaataaatgtaagattntacaaatctttttatttccccacaag

SEQ ID NO: 359920 - DNA, 791 bp, Homo Sapiens
  misc_feature (12)..(12): n is a, c, g, or t
  misc_feature (54)..(54): n is a, c, g, or t
  misc_feature (106)..(106): n is a, c, g, or t
  misc_feature (149)..(149): n is a, c, g, or t
  misc_feature (291)..(291): n is a, c, g, or t
  misc_feature (305)..(322): n is a, c, g, or t
  misc_feature (343)..(343): n is a, c, g, or t
  misc_feature (385)..(385): n is a, c, g, or t
  misc_feature (407)..(407): n is a, c, g, or t
  misc_feature (444)..(444): n is a, c, g, or t
  misc_feature (618)..(618): n is a, c, g, or t
gacatgggtttnttgccactgtcctcctttgccttccttccttcttctacaggnttgaggttcaacagtggagtcacttcagcattgccataaccagcaaaggtgnttgcagcggtgccattttcttcatctatctcctcaatctccgnttcataacactgtccatcttcactccagactgccatacacttgtcgctctatttccatgaatgagtaggttgagtagaagcaaaactgtctgaacttgcaagcgtctcagaaggttgagttgacagaaggtctttggttagntctataacttcctnnnnnnnnnnnnnnnnnncattaattacttttcctcccncaagtctgagttctgaaactgctccttcatcgacagatgggnaggagttacagtaatcggcaantccaggaagcatcaggtgttgtgatctacatatcagnaggtcaaatggggtgcactcaagcactctgcttactgaaggaaggcgtttcggggatgcagagagccattgtaaatctttcttcaattttagcaaatcttcattttctccatttccagataatgcagcttcaacttgctggagctgagctttgtagcttgccagctgctttgcntaaatcctctgacatcttgtgtggggctggggccggggcggcgggaaggggtcggggcaaatgagcccagtggtagtggcaggtggcagcagcagcagtagcagtagcaggaaaatcaccgcgacgacagcaaggcgacccggtctgaaaaggaagaactcggtcggcggcga

SEQ ID NO: 359921 - DNA, 919 bp, Homo Sapiens
  misc_feature (176)..(211): n is a, c, g, or t
  misc_feature (790)..(790): n is a, c, g, or t
ggggctggaccggtccggaattctcgggatcttccagtgcccggcgttcctcccttccccctcgccgccgaccgagttcttccttttcagaccgggtcgccttgctgtcgtcgcggtgattttcctgctactgctactgctgctgctgccaccgccactaccactgggctcatttnnnnnnnnnnnnnnnnnnnnnnnnnnnnnnnnnnnnacacaagatgtcagaggatttagcaaagcagctggcaagctacaaagctcagctccagcaagttgaagctgcattatctggaaatggagaaaatgaagatttgctaaaattgaagaaagatttacaagaagttatagaactaaccaaagaccttctgtcaactcaaccttctgagacgcttgcaagttcagacagttttgcttctactcaacctactcattcatggaaagtaggagacaagtgtatggcagtctggagtgaagatggacagtgttatgaagcggagattgaggagatagatgaagaaaatggcaccgctgcaatcacctttgctggttatggcaatgctgaagtgactccactgttgaacctcaagcctgtagaagaaggaaggaaggcaaaggaggacagtggcaacaaacccatgtcaaaaaaagaaatgattgcccagcagcgtgaatataaaaagaagaaagctttgaaaaaagctcagagaataaaagaacttgagcaggaaagagaggaccagaaagtgaaatggcaacaattcaacaacagagcctattctaaaaacaaaanaggccaggtaaagaggagtatttttgcttcacctgagagtgtgactggtaaagttggagtaagaacctgtgggaatgctgataacctatgacacaatatcaagatacctctaatacaatgtcaggcatt

SEQ ID NO: 359922 - DNA, 1154 bp, Homo Sapiens
agaccaagggcatcaagttcgaagtggttcacaagggggggctgttcaagactgaccgggtgctggggacagcccagctgaagctggatgcactggagatagcatgtgaggtccgggagatccttgaggtcctggatggtcgccggcccacaggggggcgactggaggtaatggtccggattcgggagccactgacagcccagcagttggagatgacgacagagaggtggctggtcattgaccctgtgccggcagctgtgcccacacaggttgctgggcccaaagggaaggcccctcctgtgcctgcccctgcaagggagtcagggaacagatcagcccggcccctgcatagcctcagtgtgctggcgtttgaccaagagcgtctggagcggaagatcctggccctcaggcaggcgcggcggccggtgcccccagaagtggcccagcagtaccaggacatcatgcaacgcagccagtggcagagggcacagctggagcaggggggtgtgggcatccgacgggaatacgcagcccagctggagcggcagctgcagttctacacggaggctgcccggcgcctgggcaacgatggcagcagggatgctgcaaaggaggcgctctataggcggaatctggtagagagtgagctgcagcggctccgcaggtgaggagcccatggggcgggcagcccccagaaagcgggcagcaggccccgataccgggaagagccgacacagccacgaaccagacaagcagacaatcagcggacaatcggttctggactcacccctcatccgggcccccagccccgccagagcctccgtggctgcgggtgttgggaaccatgcctgccagccagtatgtgcccctcacccaggcctggctgggccctggagagtcctgtttgcacagcccaggggtgtccggcctctggcccgccccggagcagggagggtggctggggccaagccccgagggcccctgcaagcactttacttcctgttcctccccagccttaaccccaaagccctcctgcaccccaaagaagccactgaggctggccgagccacactgtctccccaggggcgtcgacctggcccagctgggtccccagggccagcacatggaataaaatagccagggccacactcaga

SEQ ID NO: 359923 - DNA, 2255 bp, Homo Sapiens
  misc_feature (14)..(14): n is a, c, g, or t
  misc_feature (29)..(29): n is a, c, g, or t
  misc_feature (70)..(70): n is a, c, g, or t
  misc_feature (935)..(935): n is a, c, g, or t
  misc_feature (944)..(944): n is a, c, g, or t
  misc_feature (951)..(951): n is a, c, g, or t
  misc_feature (963)..(963): n is a, c, g, or t
  misc_feature (988)..(988): n is a, c, g, or t
  misc_feature (991)..(991): n is a, c, g, or t
  misc_feature (1001)..(1001): n is a, c, g, or t
  misc_feature (1016)..(1016): n is a, c, g, or t
  misc_feature (1031)..(1031): n is a, c, g, or t
  misc_feature (1313)..(1313): n is a, c, g, or t
  misc_feature (1408)..(1408): n is a, c, g, or t
  misc_feature (1617)..(1617): n is a, c, g, or t
  misc_feature (1755)..(1756): n is a, c, g, or t
  misc_feature (1777)..(1777): n is a, c, g, or t
ccctaccccacacngaactgccccgcccnttccatcccctaggcattcctgtgaaaggagattggttagncccaaacttgcctaacatacgaaaattccaccttggaacatgatgagagatttccttattgaggcccaagagatgtttccctgtccccagaggaacccattaggagtcgcttttagggtattcagctttgttcatgaaataaggcatctctgagaaagtggccccagggagagaatggaggactgggaagagaagcattaactgagctccaagggtgtgtgggcagagagcttgctatgtgaaaacactccttaagaaaatggaagagaaaaagagagtgctagttaaaaaatcgggatgttttagtttggatttagggttttgatacttatgttgaaatactaatgtttctgatcaataaaatcaaactcttaatataccgagtaatgaaaccatagtgtgattgcctcagaataaattgagaagtccaacttcctagttttgtttaattagtttcactttttctactctccccagtatgctagaaatgggaatcgtggcctggaggataagggaaaaaaattggtttaaggaaaggtggaatttttggattaggaaatggtccaggaggggggaaaaaggaggaaattaggaaaaaggtttggcaaggtaaagggttttagatattatggaaacaagaaatggaaaacaggatgatctccatgagaggccttgatcctgagagtaaaaggcttgtgtagataggttagacaatgtcctctagaaaagagaccagggataagtccaggtttccaggaaaaccaagaagcctgcgggtagctgaaggtagagtgctagttgttcatcttaacttacccaatgagctacagagaggacttagcatctgatgtcatcagctttgccnggagagtgntcacggngggtaaagctcnggtaaaggtgtgccttctcagagantgnctccaagcancagagaccacctcancagagaccacctcancagactcagcccagccatacaaggtgccaaagctcctccagagggctgtcttgggcctttgaggcaattgatctccagaaagagtcagaagtcattccagtccaggcccaggtattcagatggtgacccagcaagataatagtatcttgagcaaataatagtatcttgagtgcaaataagcaggaagactgtccttcacaaaaagtggggttacatgattttcagagcctttttttcagagttgagcatcttttcttttaaaagaaataaggggcaagaggnccaattttattccttgaggaaaaatgacacacccttctcccaaaagaaagaaaactctctggccccccaacttcaacactaatttggctccctgnagaagagagaaaatattatttctgtctttattgaagagaaatgggcaatgccaatgtgaaggttactagtcttttttattttctattggtgaagactaatagtgcttatatagaggagattatatatttagagggcacaagaataaaaggggagggataaggaagacagcagtgtgatgataaatggtaattaataaactttgtctgtntcaacaatagggaatggtggggactgtggcaacctgaagcgcccctgttccacccacagtgggtaattttccagtcgactgtggccatgaagtacttcctgatcttcccatttttcaagaaaagctgacaatctgganntttatatgatgaattctgatnttaaaaaatattggcaacaagaacgaaactccgtctcaacaacaacaacaaaaagtttggtatgtttctctcaagaaaaaagcatggtgagtccagacagcagcaaaagcttttgtgaaaaaccaattgtgttcatctagatagtaagtaactcctatttttactgttaattttttaaaagagaatttttccctgtggaaactccctgttagtacgtcctaggggagaaagcctgtggaatatggtggttattgatggcgttgcctttgtttcatctttgagtttgccctttgtgggatctagtgggataatgagcactgacagaactcttaacagcgtgctgtatttttgacattgaaaatgttaatgacttgatttgtacataactctgtaactaggtgaaagtagatcacagctgacatttacaaaatgtttttgtaccttagaatttctgcattaaataaaatgttttgtttta

SEQ ID NO: 359924 - DNA, 1069 bp, Homo Sapiens
  misc_feature (234)..(301): n is a, c, g, or t
  misc_feature (481)..(539): n is a, c, g, or t
  misc_feature (716)..(742): n is a, c, g, or t
  misc_feature (834)..(855): n is a, c, g, or t
ggaagagagaagagaggcagaaatgagggcaaaacgggaagaggaagagcgaaagaggcaggaagaactccgaagacaacaggaggaaattcttcggcgacagcaggaagaagaaaggaaaaggcgagaggaagaagaacttgcccgaaggaaacaggaagaggctctgcgtcgccagcgggagcaagaaattgcattaaggcgacagcgagaagaggaagaaagacagcagcnnnnnnnnnnnnnnnnnnnnnnnnnnnnnnnnnnnnnnnnnnnnnnnnnnnnnnnnnnnnnnnnnnnnttgttacgcaaacaggaagaggaggctgcaaaatgggcccgggaagaagaagaagcccagcgtcgattagaggagaaccggctgcggatggaagaggaggcagccagactccggcatgaggaagaagaacggaagagaaaggagctggaggtccagcggcagaaggagttaatgcgccannnnnnnnnnnnnnnnnnnnnnnnnnnnnnnnnnnnnnnnnnnnnnnnnnnnnnnnnnntggcgcagatgaagcttccttcttcttcaacgtggggccagcagtccaatacaacagcatgtcagtcccaggccacgctgtcgttggctgaaatccaaaacactagaggaagaacgagaacggcagcttcgagaacgagcaacaggcgccagcagagggagttgatgaaagctcttnnnnnnnnnnnnnnnnnnnnnnnnnnnaaactctcaggttgggggaatgtcagcaaaccttcaggtaccacgaaatctcttctggagatccagcaggaagaggccaggcaaatgcaaannnnnnnnnnnnnnnnnnnnnnacaccagcaaccaaacagagctcgtaacaatacgcattccaacctgcacaccagcattgggaattctgtttggggctctataaatactggtcctcctaaccagtgggcatctgacctagtcagtagtatttggagtaatgctgacactaaaaactccaacatgggattctgggatgatgcagtgaaagaggtgggacctaggaattcaacaaaa

SEQ ID NO: 359925 - DNA, 296 bp, Homo Sapiens
aacccttcacactcctaacccagtattatatatttcagcctaccctaagataatgcaattaatcatatatccaacctaagcttctgccaataaggatttcagataagcttttaaatttatggaggattttctttgtgtctttggaagttcacttaccataaagtattttatagtctactttaaataacagattttgttacacagggtaagccaaaggctgtacaagatttagtgtcattgggtctcatatttgtgttagaccatgaaatattccattaaaatttatctgtaaatac

SEQ ID NO: 359926 - DNA, 455 bp, Homo Sapiens
  misc_feature (319)..(319): n is a, c, g, or t
  misc_feature (356)..(356): n is a, c, g, or t
  misc_feature (362)..(362): n is a, c, g, or t
  misc_feature (395)..(395): n is a, c, g, or t
  misc_feature (402)..(402): n is a, c, g, or t
  misc_feature (423)..(423): n is a, c, g, or t
gaataagccactgtgcccggccctttttctcttctgtaacagagtttattactgcctagctagcaggttatttggccctcacatgtgttgaggcaaactctatactatattcttactctccagagttccaaaatcctttatttttaaagaaaaataaacaaacatacttcattctgcccagtatattctcttgatctgtacaagctacgattttaattctctttggagaggaggcatctgttaagttcgaatgggggatatttcctcataacggtcatggctgagaggccaggacaattatcacttaacggaggtcctnttggtgctccctgtgcatcagcttcattcactggggncaggtncttaaggggtctcttccaccagtgtgctagggnagggctnccatccacctctgtttaacanatagctactttcttaaacacaataagcttaaa

SEQ ID NO: 359927 - DNA, 1438 bp, Homo Sapiens
aaaaaccctatgtttgtaatgagtgcggcaaagcctttcgtcggagttccactcttgttcagcatcgaagagttcacactggggagaagccctaccagtgcgttgaatgtgggaaagctttcagccagagctcccagctcaccctacatcagcgagttcacactggagagaagccctatgactgtggtgactgtgggaaggccttcagccggaggtcaaccctcattcagcatcagaaagttcacagcggagagactcgtaagtgcagaaaacatggtccagcctttgttcatggctccagcctcacagcagatggacagattcccactggagagaagcacggcagagcctttaaccatggtgcaaatctcattctgcgctggacagttcacactggtgagaaatcctttggatgtaatgaatatggaaaagctttcagtcccacctcacgacccaatgaagatcagataatgcatgctggggaaaagccctataaatgtcaagaatgtggaaacgccttcagtggaaagtcaacccttattcaacatcaggtaactcacactggtcagaaaccatgtcattgcagtgtgtatgggaaagccttcagccagagttcacagctcacaccacctcagcagactcgtgttggagagaaacctgctttaaatgatggctctaaaagatactttattcatatcaagaagattttccaagaaagacatttttaatgtgataaatgcagaagacagtttagcaactgttcacttgacattagaagataagatggcataatgaaagatatataaggtctaaatattactggcaaagtaaaataaatagttcagatgactactaaagtcaaagtcattaaatctggaagtaaacacgagaattcattctgggaaatcaggctgtctgtgtaaaggttactgctgtgctcaggagttgaaccgtgtggtgctgtatccggatactcatgacgaatggatggagggcgtgaaaagtgagcccagctggtgctctgggtctaccctacctgacatccttccagtcttatcctttgtttcctatccaggcccaagcttgtggctgagaacatccactttcagtcccatatacctgcctccaagtgtggtacagagaacttgggcctgctgggggcgcttagccttactctctccaccacctctcccaccaacccccagatgaactgcaggtagacgtttcttccttgcttggagccccagtttttgcatttcattttcattaaaatgaaaggtggtttggttttggttctaaggagctctacagtttaacagagagagggaccttaggggccaagaaagcaggggcctaccaagtatctccacttttgaaaattgtaattactgataaaaaattttttaaaggcaggtttattgaagcataatttataaac

SEQ ID NO: 359928 - DNA, 432 bp, Homo Sapiens
agagtgttgaactgaagaccaaaatgccctcaaggtgtaaaataatccgagggggaatatttgctgggcgtcaggaaagactcagatgaaatttcaaccctgatggttttcggtgatccaggaagtcagtgagacaatctctctatatgcagagccctttcatgataattagaatggtatggacaaaccaatgaaaacaagagggaaagtgagaaagatcacccatgattctgtttcactgtttgctttctcctgtcatggttaagagaaatgtgcaattcgatcctcaatcagtgggtggaggataacagggtagattcacttgtgtgcacttgtacagttgtagctgcgagtccagaagtcctctagagcatgtgtactggcactgagttggtgagacagttgtggagtatcccattctgatgagtacag

SEQ ID NO: 359929 - DNA, 750 bp, Homo Sapiens
  misc_feature (36)..(36): n is a, c, g, or t
  misc_feature (66)..(66): n is a, c, g, or t
  misc_feature (82)..(82): n is a, c, g, or t
  misc_feature (198)..(198): n is a, c, g, or t
  misc_feature (221)..(221): n is a, c, g, or t
  misc_feature (483)..(505): n is a, c, g, or t
cgtgaaaaaaaccacccccaccctaacctgaagccngttgccaaagggtggtgaacacaagttaantggaacaaaactaccngcccaaaggtgccacaaaatttgtaaaaaaagtacccccagtagccccccattccatacaatgtccccctaaattatgccagtaaacctggccatccaccgttccccccctgttgnctgtgtaattagtccagtgttgncacagtgtgtggcgcctgatggagatgtcagaaccgagaacacttaaccttctttgattgtttttccaagttttaagacttcgatcccacccctatgagagcaagtaattgtggaaatatttttggtgtaaaatcattccagagtatgtaatatttaactgatagctgcatgaaagtgagattcgtgttactttggcttttctgtctctgttgacacggttgcacattccaaagttactacagcgtgaaaactgtgtgtttnnnnnnnnnnnnnnnnnnnnnnngagattgtggcctggttttgtaaaagttttaggtaaaattacaattgattgttttaggaatcattattaaaaattttctgcaaatcataaagctatatcgaggtgttgagcttagccactatgcacattgtaattattcattgtggctgtccagttctatgatgcattctggcattttgtaagctgctctgactagcaatatatagattcatttaatgtgttaacattggttaataaatgtattt

SEQ ID NO: 359930 - DNA, 938 bp, Homo Sapiens
  misc_feature (138)..(138): n is a, c, g, or t
  misc_feature (668)..(690): n is a, c, g, or t
aagactgatcttagaccaagtcaaattcccatttatcatttagttattttttgaggttagagaataatttgtacatatttatttagacctttgatatttattaaagcaattactcacaatggaagtgaaagaatcacnggagaaaagccttttaaaaagtattctccaggtttgtcagggtcactctaaagataaaaatgtaactaagtcttctgtgaaatatcatccatctaatcttgatgctgttgcagatggtggtgacacaagttaattgacaaactactgccaaatggtgcacaatattttgtaaaaagtacccagtagccccatttcatacaatgtacctaaattatgcagtaacttggcatcatcgttccctccttgttgctgtgtaattagtcagtgttgccacagtgtgtggcgctgatggagatgtcagaaccgagaacacttaaccttctttgattgtttttcaagttttaagacttcgatccacccctatgagagcaagtaattgtggaaatatttttggtgtaaaatcattccagagtatgtaatatttaactgatagctgcatgaaagtgagattcgtgttactttggcttttctgtctctgttgacacggttgcacatttccaagttactacagcgtgaaaactgtgtgtttnnnnnnnnnnnnnnnnnnnnnnngagattgtggcctggttttgtaaaagttttaggtaaaattacaattgattgttttaggaatcattattaaaaattttctgcaaatcataaagctatatcgaggtgttgagcttagccactatgcacattgtaattattcattgtggctgtccagttctatgatgcattctggcattttgtaagctgctctgactagcaatatatagattcatttaatgtgttaacattggttaataaatgtatttaaa

SEQ ID NO: 359931 - DNA, 461 bp, Homo Sapiens
tacttgaaatagtaatttgttaaaagatatgacaaaatgaaaatgcttaaactacagaaatttaaaaatgccataacaatcttgcaagactaacaaaaaaatatactttaaatgattattatgattttggtggtaacgatcccccacacacaaccactatgaagaaataatgccgcatttttcccccattgtaccaaaaagataaaaaaatggtaaacactgatcaaggtattttgtattgtcaaggcatgcatattctaaagaattaaatgctaacttaacagcactggctttctggctggtcaactatatgaaaccttgttcattcctccgagtactgtaatgttcacacttgtacaatcttccctgtcatgactttaagttctacttttcattaaccatggcctgatattagttcttagagcttcttgtggcaaaaataaaatgatttaattctgaaa

SEQ ID NO: 359932 - DNA, 535 bp, Homo Sapiens
gactatattcccaaccccaccccttactagagggcaaaggtctttactttcctgagatcccatttctcttccagcaaaagaggcctaaaagccctctttgcttctccccaaagctggtttgttgcactaagtttgcttccaccttagggcctttgcactttctattttctcagcctggaatgctcttccccagatttttgcagactggcttcttcttgtcatttagatctcagttcaaatgcctcctcttcactatcacattacttgtttgtcttattttccactcaatacttaccagtatctgaattttttaatttacttagcctggcaccagactgactaggttgctatcagttttgttgcttaatagttgtgtaaatgtggcaagttacttttctgtgtctcagcttttttttctgttgtaggaatctacttaatagggctatcatggggataaaatgagtgcatatatttaaggtaattttttaacgggtctggcacatagtaagtgctcaataaagattagctttttctt

SEQ ID NO: 359933 - DNA, 272 bp, Homo Sapiens
  misc_feature (8)..(9): n is a, c, g, or t
  misc_feature (12)..(12): n is a, c, g, or t
  misc_feature (25)..(25): n is a, c, g, or t
  misc_feature (34)..(35): n is a, c, g, or t
  misc_feature (58)..(58): n is a, c, g, or t
  misc_feature (60)..(60): n is a, c, g, or t
  misc_feature (77)..(77): n is a, c, g, or t
  misc_feature (81)..(81): n is a, c, g, or t
  misc_feature (89)..(89): n is a, c, g, or t
  misc_feature (107)..(107): n is a, c, g, or t
  misc_feature (109)..(109): n is a, c, g, or t
  misc_feature (180)..(180): n is a, c, g, or t
tggccccnngtncttgaagccaccncctaccggnntgtatagatattgtataatgccngnggttgttatactgtacntccnatttgtanttttatttttccttccgncnaatattcagccgcatctagttgaatctgaagatgtggacctgctgatgaagagggctgattgtatctaacntaggggcttgcatgcagctggcacttaatgcattttattgactgttttagctaacattcaatggacaattcctaataaaaaactccgctccg

SEQ ID NO: 359934 - DNA, 378 bp, Homo Sapiens
  misc_feature (20)..(20): n is a, c, g, or t
  misc_feature (28)..(28): n is a, c, g, or t
  misc_feature (31)..(31): n is a, c, g, or t
  misc_feature (40)..(41): n is a, c, g, or t
  misc_feature (46)..(46): n is a, c, g, or t
  misc_feature (65)..(65): n is a, c, g, or t
  misc_feature (86)..(86): n is a, c, g, or t
  misc_feature (91)..(91): n is a, c, g, or t
  misc_feature (106)..(106): n is a, c, g, or t
  misc_feature (108)..(108): n is a, c, g, or t
  misc_feature (111)..(111): n is a, c, g, or t
  misc_feature (123)..(123): n is a, c, g, or t
  misc_feature (128)..(128): n is a, c, g, or t
  misc_feature (136)..(136): n is a, c, g, or t
  misc_feature (150)..(150): n is a, c, g, or t
  misc_feature (178)..(178): n is a, c, g, or t
ttttccagccctagctcttntttagttnagntaagtacannacagntcttttcacaagtgttttnttttagcagcagcagtagagncttanttgagcccatagtgngncanctagcagagctnatagncagcatantaagtagtgggagncccagctttttttcctctcccacaaaanccaggtagtgaagttatattaccagttacagcaaaagactttgtgtttcacaagcaacaataaatgtagattctttatactgaagctattgacttgtagtgtgttggtgaaatgcatgcaggaaaatgctgttaccataaagaacggtaaaccacattacaatcaagccaaaagaataaaggtttcgcttttgtttttgt

SEQ ID NO: 359935 - DNA, 467 bp, Homo Sapiens
agactccactgaaacacatctgctagaccactaagtttatccttgtcacccagtttgctcttggaaagagtctgttcccttttgtcactgaaccaatcatgacataaacttgtgctttacctcctatagcacagccgagacaaggctggaacatttaattaaggtttttactaaggactcaggaataacaacagggaaatatctatgtaactagatgacctgacataaaatctatcttctgattgcagtctattgtgagaatgctgcttttcctagctcccagccttccatggggcagaaggctcttttaattaggaagagagggaggacaaaggagagccttttcttttgtccattactcttagaaatgaacaggtacataatagaaaataaataattattgttggtaatgtttacacagcagtgttagagcctctctgtagtgaaacaaaaataatgttcttaca

SEQ ID NO: 359936 - DNA, 387 bp, Homo Sapiens
  misc_feature (134)..(134): n is a, c, g, or t
  misc_feature (159)..(159): n is a, c, g, or t
  misc_feature (324)..(324): n is a, c, g, or t
ccaacctttgagaaggcacttatgcatacatgtgggtgaaaaaccactctacttttgtataaataaaaacaggctcctggaaggtgaaagtagtcatttgttctaaatctatacatattacttgtatctagtgnagaataagctataacatcccattgnaggaatcttaaatttcatagacatgtaaagctgaagtaactctaaagagcagatgcttcagaaccatcagaaggttctggtcaacagtcagtattatctcttaaatgtatatgttggtcactaattgcacaaaatctataatttgccagggctttagagattgantcaatatgtcatttaccatggttttcccactgaaggctttaacttttctgataaaataatatt

SEQ ID NO: 359937 - DNA, 679 bp, Homo Sapiens
  misc_feature (45)..(45): n is a, c, g, or t
  misc_feature (55)..(55): n is a, c, g, or t
  misc_feature (58)..(58): n is a, c, g, or t
  misc_feature (185)..(187): n is a, c, g, or t
  misc_feature (189)..(193): n is a, c, g, or t
  misc_feature (215)..(215): n is a, c, g, or t
  misc_feature (226)..(226): n is a, c, g, or t
  misc_feature (232)..(232): n is a, c, g, or t
  misc_feature (244)..(276): n is a, c, g, or t
  misc_feature (278)..(279): n is a, c, g, or t
  misc_feature (363)..(378): n is a, c, g, or t
cgagtaaatgttgccttggtttacccacccaccccgactgtgatnagcccctgtnccnagaagaatgttggtgaaaagcacagaaaccagtgacgtttgtgggtgtggaatttccatggagaaaagagagcatctgaacacctggaccatcttttgcacctggcagaccctctgcactcaccccnnncnnnnntctgtgaacttgagtgacaacncgtgcttgcanggtgcnttttggatgacnnnnnnnnnnnnnnnnnnnnnnnnnnnnnnnnnannatggacgagaacatggagcaaatgttttacaacctgaacctcagaactgtgatcctccaaggagcgcgctacttgaagaaaagnnnnnnnnnnnnnnnngtcgaatggcttctcagggattttgttttccgtgcacatataagccatagttacagtacaggtggcagtatttagagcactcagatttcagttctgttaaatgtgaaagagggatcgactgacgttcattgctgttccataactagtgtaaaatatgtatatgtttatctttatttttataatatgcaaatacatttaaatttatacagtttgaagcttctagcgttagttcacactgggtgcaatattctgcatgagaactgtgccaagatggggctgatttcttattttagtataagac

SEQ ID NO: 359938 - DNA, 751 bp, Homo Sapiens
  misc_feature (678)..(678): n is a, c, g, or t
  misc_feature (716)..(716): n is a, c, g, or t
catttctgtccatctgtacgctctcccagctggaggccatcctcctggactaccaggggcggcaggagatcttcctgcagcgccatggacccctatctgtccacatggcctgcctctccttcttcttcctggctgcctgcagtgctgccaccgcagcccttctgaggcacaaagtcaaggccagactgaccaagaaagattcctgaggctggcaagtggggcaacgtgtggaggaagcccctcataatttggagaaaacttgatacaatagaagctgactcttaaggcattggcttttaaattaatacatatatccaaggatatgttatagctgcagtgtttgaaagccaaaggatttaagagttttgttgttgttaataaaaggaatactccttttccttttggatcatagcttaacaaggcacaggaagggaagggatcttgactaagattcatgagacattgaattaaggagaatcatcttcatgcctgaaaatttagcaaaattccgactatggcctccaggggcaattcctaaaagctgaatggataataaaattggactgggaaagtaagtaggtggctggtcctcaccctgttgggaatgggctatcctacttatggctgttctttgggtaatggggattaaatttgaccccaagggacccgaattttccntttgggatttcaaattgttccagagttgggaaaagccnttccaaggtggacatggtggaatttactccgtttc

SEQ ID NO: 359939 - DNA, 1047 bp, Homo Sapiens
aaaaatatactttacgtcaaatcattcgtttttcatagcgaccctaacatggtagagctgcgcaagtttggcagtttatggccgattatttgtgcttgttatacgttagtattcaggtcacgaattttccggacctaatagatatccgcgaacctataataagcgcatatttcgttgtatcatcgtattgttacttgcgtggtgttttatctgcaattcaacaattgcggtcgcgcttgagtagcgaacgttttctaacacgcctaagttgtgcgacttttatcataatattgggggaatttgtgctagtggtgtgatttttgcgtttttaaactttgtaattgttgtttaaccggagatctagcgtttgtttgatcggcgttttcttttggtcatcctaggtcccatgttcttaaccatgccctggttgggaaatttgtagaatccagcccgtctctagataacttgccaggtgtagacagttatctggagaaaaggggttagtattatagttgtcgagaaaggagggacccagaaatcagatggaactgaagtaattcatccatgtcaccttggaaggcttttcccactctggacaatttgaaatcccaaatgaaattcggtccttgggtcaatttattccattaccaaagaacagcatagtaggatagccattccaacagggtgaggaccagccacctacttactttccagtccaattttattatccattcagcttttaggaattgcccctggaggccatagtcggaattttgctaaattttcaggcatgaagatgattctccttaattcaatgtctcatgaatcttagtcaagatcccttcccttcctgtgccttgttaagctatgatccaaaaggaaaaggagtattccttttattaacaacaacaaaactcttaaatcctttgggtgtcgaacattgcgggtatcctagacgtgcgcatagatgtagaatatccagcatcctggacatccggtccgttcctacggtagatatacttgttaatgtgttggggcgtcaactat

SEQ ID NO: 359940 - DNA, 406 bp, Homo Sapiens
  misc_feature (388)..(388): n is a, c, g, or t
gcctctggctcacgtcaatggctgtgctgagcaaattggtgggccctctctagacacatacggaagtgatggcctcagtagaagagacgcaagagaagtggctattgaagtgtctttggatagctgtctgagtgaccacggacaaagtcttaacaaaactcaggaggaccaatgttatgtcaacagaacgcatttttaatctggtactcacataatcagaccatatagacgaggcactttggaaccacaagcttggctcacaaaaagagctttctgggttgtaggcccagactagacttgcagcatgcatgctctgtgtttcactaggggttggctgtttggggattttagtttaaacgtgtctgttgatttttattgttaactaacnccttttcctttccccggg

SEQ ID NO: 359941 - DNA, 1369 bp, Homo Sapiens
ggggcaaagcgtacggctaggtacgaggcctgggtgttaatctggccgaggcccgccccgccccgcccggctgctccatggcgctgtgcgaggccgcgggctgcgggagtgccctgctctggcctcgcttgttgctcttcggggactccatcacccagttttccttccagcagggtggatggggagcatcgctggctgacaggctggtcagaaaatgtgatgttctgaatcgtggattttcaggttacaataccaggtgggccaaaattatccttccaagattaatcaggaaaggaaacagtttggacatcccagtagcagttacaattttctttggggccaatgacagtgcactaaaagatgagaatcccaagcagcacattcccctggaggagtacgctgcgaacctaaagagcatggtgcagtacctgaagtccgtggacatccctgagaatcgagtcattctcatcacgccgaccccactttgtgaaacagcctgggaagaacagtgcatcatacaaggttgcaaactaaatcgcctgaactctgttgttggtgaatatgccaatgcgtgtttacaagtggcccaagactgtgggactgacgtacttgacctgtggaccctgatgcaggacagccaggacttctcatcttatttatcagatggactacatttgtctccaaaggggaatgaatttttgttctcgcatctctggcctttgatagagaaaaaggtctcttctctacctttgctgcttccttactggcgggatgtagcagaagcaaaacctgaattaagtctgctgggagatggagaccattagccaatcacaggagacccaaatctgcttgttatctacagaactcaaagttgtcaatacgtagaggtacgcttttttcctcaggcttaaacctttgccactgatattaataataaaagtattagatgattttccagggaagttttatacttaggtccattgtgtttcgacaggatttattaatgcagatatcagggctacagctataaaatataccctgagcagcttgttaattctataaatgacaaagactatgtttttaaaaagtcacaattttataaaaaggggttttcttacattcttttgagaactggttcactcatacatacacccacacaccccactcaaccttgtatcaaattccaaaagtgtaactaaagtataagaatatcatgactagttaaaagatagcaaataccataagggacaagttcaagtattagtataacaagtatctgagtaacaaatgtccttggaaatggggggtaggaggagatatgattagtcacaggtttggttaactgccctcaaaatttacaagttaaaat

SEQ ID NO: 359942 - DNA, 818 bp, Homo Sapiens
agcgggcccggctgctccatggcgctgtgcgaggccgcgggctgcgggagtgccctgctctggcctcgcttgttgctcttcggggactccatcacccagaaaatgtgatgttctgaatcgtggattttcaggttacaataccaggtgggccaaaattatccttccaagattaatcaggaaaggaaacagtttggacatcccagtagcagttacaattttctttggggccaatgacagtgcactaaaagatgagaatcccaagcagcacattcccctggaggagtacgctgcgaacctaaagagcatggtgcagtacctgaagtccgtggacatccctgagaatcgagtcattctcatcacgccgaccccactttgtgaaacagcctgggaagaacagtgcatcatacaaggttgcaaactaaatcgcctgaactctgttgttggtgaatatgccaatgcgtgtttacaagtggcccaagactgtgggactgacgtacttgacctgtggaccctgatgcaggacagccaggacttctcatcttatttatcagatggactacatttgtctccaaaggggaatgaatttttgttctcgcatctctggcctttgatagagaaaaaggtctcttctctacctttgctgcttccttactggcgggatgtagcagaagcaaaacctgaattaagtcctgctgggagatggacgaccattagccaatcacaggagaaccacatctgcttgttatctacagaactcaaagttgtcaatacgttaaggtaccgctttttcttcaggttaaacccttgccactggttta

SEQ ID NO: 359943 - DNA, 688 bp, Homo Sapiens
ggctgctccatggcgctgtgcgaggccgcgggctgcgggagtgccctgctctggcctcgcttgttgctcttcggggactccatcacccaggttacaataccaggtgggccaaaattatccttccaagattaatcaggaaaggaaacagtttggacatcccagtagcagttacaattttctttggggccaatgacagtgcactaaaagatgagaatcccaagcagcacattccccgtggaggagtacgctgcgaacctaaagagcatggtgcagtacctgaagtccgtggacatccctgagaatcgagtcattctcatcacgccgaccccactttgtgaaacagcctgggaagaacagtgcatcatacaaggttgcaaactaaatcgcctgaactctgttgttggtgaatatgccaatgcgtgtttacaagtggcccaagactgtgggactgacgtacttgacctgtggaccctgatgcaggacagccaggacttctcatcttatttatcagatggactacctttgtctccaaaggggaatgaattttgttctcgcatctctggcctttgatagagaaaaaggtctcttctctaacctttgctgcttccttactggcgggatgtagcagaagcaaaacctgaattaagtctgctgggagatggagaccattagccaatcacaggagacc

SEQ ID NO: 359944 - DNA, 271 bp, Homo Sapiens
  misc_feature (5)..(5): n is a, c, g, or t
  misc_feature (7)..(7): n is a, c, g, or t
  misc_feature (43)..(43): n is a, c, g, or t
  misc_feature (216)..(216): n is a, c, g, or t
  misc_feature (218)..(219): n is a, c, g, or t
  misc_feature (256)..(257): n is a, c, g, or t
  misc_feature (266)..(267): n is a, c, g, or t
gtccngnggcctgaaaagaatgcaaaagacggcctgaaagccngtgttaaatatctgacgagcaagtagcggaagagattcttttcccccggtcattggaggatagaactaggaagcagatttcagcttccggtgaagaagttaaaggatatatagcttcctctcccgttttccgatccagtatccccgggttctgacctgatatttcatagctgngnngcactgcaggagttgctccactattctaagcctcagnntttcgtctnnaaaa

SEQ ID NO: 359945 - DNA, 511 bp, Homo Sapiens
  misc_feature (35)..(35): n is a, c, g, or t
  misc_feature (256)..(303): n is a, c, g, or t
  misc_feature (393)..(468): n is a, c, g, or t
atagggagaaggagagataggagaaaggacaaaanggaaagaagaaacagcaatggaaaacaggggaacaaacagaaaacaacataatggtagatctaaagccaaacatttcaatagttgcattaaacataaatggcctcatcacgccaattcgacatattatcagtttggattataaaaacctaattatatgctgtctttaagtaactcacattaaatataacaggatacaagtaggttgaagtaaaaggtaacnnnnnnnnnnnnnnnnnnnnnnnnnnnnnnnnnnnnnnnnnnnnnnnncaacctaaggaaactacagaccaacctcttatgagtacatatgcaaaaattgagagtccagggaaaaatccttcacacgatggttaattnnnnnnnnnnnnnnnnnnnnnnnnnnnnnnnnnnnnnnnnnnnnnnnnnnnnnnnnnnnnnnnnnnnnnnnnnnnngatttccacgtcaaaacaatgaatccccactttacacttatat

SEQ ID NO: 359946 - DNA, 731 bp, Homo Sapiens
  misc_feature (230)..(230): n is a, c, g, or t
agcgggcctggcggccggatcgcatctcagctggttggctttggttagagctcccgtcagactttcgttcggccctaggatttggtagccccgaagtgtgggctctctccagtaccagactcatttcagtaccagcctttgggaagtcgtgtgaatacctcggtctcttagccacagggatagaatggcggcctgacggagccgcggcgccggcgaagtcgctgaggcgncgacctggaacccccagaccagctcaaacgggagccaaaactcgaagcttggaagaattagcaggaaatggcggatgaggcgttgtttttgcttctccataacgagatggtgtctggagtgtacaagtccgcggagcaggggaggtggaaaacggacgatgtattactaagctggaaaacatggggtttcgagtgggacaaggattgatagaaaggtttacaaaagatactgcaaggttcaaggatgagttagatatcatgaagttcatttgtaaagattttggactacggtattcaagaaacaaatcgacaatctaaggacaaatcatcagtatttagcatttacgtgtggcttaatcagaggtggcttatcaaacttgggaatcacacaagtcttgtaacagctgaagtgtcttcaatgcctgctttgcaaatttcaggtgatgataccgaagctgtagaacatactgaaatgcaaggttcaacagtgtcacagagatc

SEQ ID NO: 359947 - DNA, 437 bp, Homo Sapiens
  misc_feature (30)..(30): n is a, c, g, or t
  misc_feature (55)..(55): n is a, c, g, or t
  misc_feature (319)..(319): n is a, c, g, or t
  misc_feature (350)..(350): n is a, c, g, or t
  misc_feature (379)..(379): n is a, c, g, or t
  misc_feature (381)..(384): n is a, c, g, or t
agttttgcatagtagtagatcagaaatggnaaataaataggaacatcaaggtaantcttaccagctgaaaattccttgagagaagccgaagtatggcatctttaggatctactactgtctcaaataacagaaggggccactccacataccttttgtttcattagacgatggtgataatgaagataaaagatttgaagcatcaaatggcatagagatcctgggacattaaacacagtattcctctctgtagcattaataaattgtgatgaggtttgaaatactatatttgcctccttagttcttgtttcaaacagctganacatgtaacttggaaggtttcacctaagaanatttgttgaaatcaattctgtaggaacangnnnnataacaatactcatcacacattgtttctgcattaaagtattttcggtgaatgt

SEQ ID NO: 359948 - DNA, 596 bp, Homo Sapiens
  misc_feature (169)..(220): n is a, c, g, or t
  misc_feature (329)..(329): n is a, c, g, or t
ataagattattagtataaaaggggagataggtaggagtagaggaaaaaaggagaaacagagagagagctcagcgcctcgacacagacactttcccatctccagggccacctgccgtcctggcccaggccagctcccactgtcacctctgcgtccaggagattcataatnnnnnnnnnnnnnnnnnnnnnnnnnnnnnnnnnnnnnnnnnnnnnnnnnnnnacctggggcaatggaatgaggaagaggggaggcgaggaaggtagaagggcaggtctctggatgcataactcccgagcccgggggctggggaggaagattccccagcgcnccgccgcctgcgtggcgttagctcgtcacgtagtgtttggtggacggctgcccatacaccctgtagaaatcctggtggccgggctgctgggaggcgtcaagccagtctctgaccgccaggctgggaagggactgggggacggagggtgtgggcgggagcgggtgtgagtactcctgcgagggcactgtccagggaaagtggccggagcgggggtagggctggtggccgccatggttggccacggaagaacagtaacagttgtccaca

SEQ ID NO: 359949 - DNA, 673 bp, Homo Sapiens
  misc_feature (229)..(273): n is a, c, g, or t
tgggcgttcctgccgggtggggtaagaagggtgggacccccaagctttcagggaagccgaggttccttccagccacgggggtgtgaaggggaaggagtagaggaaaaaaggagaaacagagagagagctcagcgcctcgacacagacactttcccatctccagggccacctgccgtcctggcccaggccagctcccactgtcacctctgcgtccaggagattcataatnnnnnnnnnnnnnnnnnnnnnnnnnnnnnnnnnnnnnnnnnnnnnggaaaagacctggggcaatggaatgaggaagaggggaggcgaggaaggtagaagggcaggtctctggatgcataactcccgagcccgggggctggggaggaagattccccagcgccccgccgcctgcgtggcgttagctcgtcacgtagtgtttggtggacggctgcccatacaccctgtagaaatcctggtggccgggctgctgggaggcgtcaagccagtctctgaccgccaggctgggaagggactgggggacggagggtgtgggcgggagcgggtgtgagtactcctgcgagggcactgtccagggaaagtggccggagcgggggtagggctggtggccgccatggttggccacggaagaacagtaacagttgtccacagaacagacgagaatctt

SEQ ID NO: 359950 - DNA, 779 bp, Homo Sapiens
  misc_feature (2)..(2): n is a, c, g, or t
  misc_feature (54)..(54): n is a, c, g, or t
  misc_feature (294)..(294): n is a, c, g, or t
  misc_feature (415)..(415): n is a, c, g, or t
  misc_feature (500)..(500): n is a, c, g, or t
  misc_feature (533)..(566): n is a, c, g, or t
  misc_feature (634)..(634): n is a, c, g, or t
  misc_feature (641)..(641): n is a, c, g, or t
  misc_feature (708)..(708): n is a, c, g, or t
  misc_feature (745)..(745): n is a, c, g, or t
cnggattggtatcaaaggcttccactgccttctgctgaaggcatgatgtatgcngctccacttgagaccaggtatcaggatgttcagagggagccagctctttatgttggccccaggcagtactaagcaaattaaaaaagacccgacatgggcttccctcccctcatatcatttcattcctaaagcagcaagcttgtcatacccatggggtccctatgttgatagaaatggagaggtagggatacagtttattctccaaaaatggactgcccacttccatgctgagtgatgctncagggaagtgatgcccgcagaaggcgtctgggcctaaggatccatggaagtcaggagcattaaatcccaaaccaaatcaactccagatatatcagtgtcaaaagcccaagaaaagacaaanaagaaaaaaacaatccccaggggttctatgaccctattgactcctacagttctttcccttctcttgggcaatggaaggctccagntacccagattggagattaggatgagacaacttnnnnnnnnnnnnnnnnnnnnnnnnnnnnnnnnnntttattaaggactaagatacacacttatctattctgtctccttctagcttttaggcagcctactcttngaaactngaggaaactgccctgagaattattagaatgctaataatagtaattgggaacattaacaatcagtgtngacaacagtgaggcatatcgtgtgtttttattaaaangataaggtgtgttctctcactaaggagtcctttg

SEQ ID NO: 359951 - DNA, 332 bp, Homo Sapiens
  misc_feature (17)..(17): n is a, c, g, or t
  misc_feature (37)..(37): n is a, c, g, or t
  misc_feature (90)..(129): n is a, c, g, or t
  misc_feature (135)..(135): n is a, c, g, or t
  misc_feature (206)..(206): n is a, c, g, or t
  misc_feature (283)..(283): n is a, c, g, or t
cttttcaaatgtatgancttgtttaagatagccaggnaggcagtggtaggataaacacaagggataggaatgtatcaaaaaacagattannnnnnnnnnnnnnnnnnnnnnnnnnnnnnnnnnnnnnnnaaaccngtacaaaatgccccaatcaatgagaacagaaaaaagaaatcttcaactatgttacagtttaaaagcagaanaaaaaagttagggagtttctccctcccacatgtcaggaaatgtcatccaatattcttaaagcaaggataactaaatnaaatacatgtgcagcatattctgcaattccgttacatacagtagttttt

SEQ ID NO: 359952 - DNA, 447 bp, Homo Sapiens
ctgcaatcagccgtcgtcgtttactgcaaggcgcgggtgccatgtggctattgagcgtaagtcaggtcagtctggctgcggtcagccaggtcgtggcggtgcgcgtctggcctgcgtccagctacacccgcgtgacggtggaatcaaatcgtcagctgaaatataagcagttcgcgttgagtaaccctgaacgcgtggtggtggatatcgaagatgtaaacctgaactcggtactcaaggggatggcggcacaaattcgtgcagacgacccgttcatcaagtctgtccagacgggcacgaacagaaccgataactaccgggcttacaatctcaaggtgagacgggttaaacgccagcgccaggtgcaccaggccgccatcggtcttggagtcagacgagaagcccatgtggtatttcacgtcacccgtgcgaggtgttctttatgtt

SEQ ID NO: 359953 - DNA, 335 bp, Homo Sapiens
gcacgagctggggtgaccaggtgcaccagtgtgatagggctggctctgctacaagttccccttgctaccctcccctgactgtgacctagtgacattcaaatgcaccaacggaatcccctcctgccttttcttatggctctaccctgacccccaaggaaagggtctcacccactctctgttccctgcctgcttgggggagccctagtctttggctctccgcccgtgtgacccccacctcctgttgttgtgtgcattgaatctgtctaggacagggtgtctgatcttttggcttccctgggccacacataaaacacagtaacgacagctgatcagct

SEQ ID NO: 359954 - DNA, 469 bp, Homo Sapiens
  misc_feature (469)..(469): n is a, c, g, or t
tggtggaaggaacctctctgttgatatttaaagaagtgagggctgtgggtattcattgttagaaatgccaatttcactttgaaaccatagtccaagtctctaggttggtagaagggaaaggaaggaagtggtcccagtgattctagatctggttgggaaacttctgcctcatgactctgtcctttgagtcctttggacagcagcacaaaacataacaatttttatttttaaacagacccattctttttgatccccacaggagctgtggttgggtcggccgtagccccgggatgtggtttaagtggattactgcctagctgagccaaaatgtttgcttgtacctgttggaccactacagcaaaccgctgcttacagtgcattgtgtatttctgtagtactgttttgcattttccatagagacagaaaactttgcaagtcaatcactgttgttcccatggtactgtaagan

SEQ ID NO: 359955 - DNA, 1089 bp, Homo Sapiens
  misc_feature (48)..(48): n is a, c, g, or t
  misc_feature (69)..(69): n is a, c, g, or t
aagagacaacctagcttttataatgttaaaaagggaagactttggcangtaaactagaactacatgatngtgaatatttggcaaattgatctctatgtgtatatacaagctatagctaacatgattattacaagttttttggaagcttgaaggccaaggaaaataatctgcacatataactttctgatttatcaagtactgagatattaatgaattcttcatattgttactcctgtatcagttctttagaatttcttagcctttgggtactctaagccttggatggaaccatttagggagtagctagatatatgcaaagaatattaggatttagaaacatttctggtttatcaaagtgaaaagataaatattacaaacactgaaaatgtgaaaataaggttcaagagagctgcaaactatgtgggtaccagttagaaagtatcttcatctgactcatcactcttgggtttggtaagtctttctagttcttctccatccccactggaacgctcccaaagattgccacttagatctcggatcctttcttgcctaggtgcgtattccggaacttgaggcttgctggcattataaataaatatagagagaaggactgatggggcttccaagaaaaattccagggagggcctgaagtcaaagaccaggacagacactgttgtgataatgacagtggtaacctgggccatcaagacatggaacatgttatccaggaacttcagaatgaaagccactgaaaggccctggaatgcagttacaaaaataagggctactgaaaatgcactgtggccataaaaaaatccacagttcttaatctgatcacggttactcctctgaaggcccagagtcagcccattaaacagaatgccaaagaaatagagtttgctgttctgtatgaagatgctttcagtgagctggttcccttccttcagtatcttttcattatagatattagccattgaagaaataaaacactggactataataagaacatggcccatgccaagacggatgtgactgaaaactctggctgtggtgttccatttagcttcaggaaaagtccattcctccgct

SEQ ID NO: 359956 - DNA, 317 bp, Homo Sapiens
ggcccgggaggaacagcctgagaaggacttctttggacgtgtggtcgtcaggagcacagcagtcccgagtgcaggggaacagggccccggagcaggactcagtggagcggcgcatgggcacagcggtgggcaggagcgaggtctggttccgcttcaacgagggtgtctccaacgccgtgcggcgcagcctgtacatcagggacttgctctagttctctgagccgcggacatgccctcgcattgcttcccgcagagtgcagagacaggaagctggagatgtctttataaagtcacacctttacagactgtaaaaaaaa

SEQ ID NO: 359957 - DNA, 286 bp, Homo Sapiens
  misc_feature (247)..(247): n is a, c, g, or t
  misc_feature (253)..(253): n is a, c, g, or t
  misc_feature (281)..(281): n is a, c, g, or t
  misc_feature (285)..(285): n is a, c, g, or t
tggacatctcaccaggtccttcatgtgcaggacagtcttatgaccatgcactcctgtcccgtagtaccctagttgggatcacagatgctccagggactgtccctgctgcccactcttcacctatttctgtgaagggttaccctcaagaaccactaagtttcttgttagtggtggattggacaaagcttttttaaaaaacattttgaaaaacctgtggttttattacttattactctggaaatttggncaatgnaacacgtttacactttgaaaatatatanatanc

SEQ ID NO: 359958 - DNA, 792 bp, Homo Sapiens
ggctctccaaagtgtcatgttcagcaccaaaagggaataggcacagggtgaccccagaagttcatttgtgacacttaaatctccagatatttatcccacgtgggtctgatgcgggctcagcactaaattaactgtatgtggaaagtgtcaattgcagagccttctgtatcgatgaggcttccgccacttgtccatgcttagcccccttgcctcttccttgggagcatgctttctattcctatgtgaaacagcctgacataagtgaaaggatttgggctcaagcaaacatgagatgtgggttcatatcttggcaccactcctgatagctgtgtgatcatggcaaacctcgttttcatcgtctgtcaggtggagatgaagagaaatggtgcatgtaaagtgctcagcatctgtgcttagcaggccatagtctccctgcctcctttttcttgagtaagcctttagaactttctgactcctctagagaaggcagagaaacgaatatattttgggtgccatttggagtctgggtcttttgttaaaattgtcctgtattatgttgaaaagtgtcggttacccccaggctctgggggcatctgtgatcatagaatactgccatgcttattttgcctttctatgttgagattaattcactgacgcctcattttccacgtgcatctgtcatagtctgggtaccagattgtatttagagaatggctcttgccactgttatgtacacacagatcgtgtgtgtaaacaagcaaattaaagtaaactgagataatgaaatcccat

SEQ ID NO: 359959 - DNA, 424 bp, Homo Sapiens
  misc_feature (3)..(3): n is a, c, g, or t
  misc_feature (34)..(34): n is a, c, g, or t
  misc_feature (59)..(59): n is a, c, g, or t
ttntattcttttgacttccagcttgttagagccntcttagtcattagctagaaatgtantttttctcttcatgtattttcaaagaaggatttatgtaaccatgttgtcatttgggaggcactgagtgttaaatatcataggatgccagaagcccacaagaagataagaacactccagtgaggacctctgaagagaaacagcaaaagcatctccatcctgcactgagttgtgggttattattgtcatggaggtgaataaaggatgatttaggagatggtactataatgtggaggaaacatccagcccatttatggttcaggaaaaaggtttactcctttgagcttggttgggttaaaacattgtattgcctactctcataatgctggaagtataaagagatcaataaagtttcctcagattctgt

SEQ ID NO: 359960 - DNA, 749 bp, Homo Sapiens
  misc_feature (440)..(449): n is a, c, g, or t
gagcaggcgacagctttccaagagcaggaaattgatggcaaatctttgctgctcatgcagcgcacagatgtgctcaccggcctgtccatccgcctcgggccagccctgaaaatctacgagcaccacatcaaggtgcttcagcaaggccactttgaggatgatgaccccgatggcttcttaggctgagcgcccagcctcacccctgccccagcccattccggcccccatctcacccaagatcccccagagtccaggagctggacggggacaccctcagccctcataacagattccaaggagagggcaccctcttgtccttatctttgccccttgtgtctgtctcacacacatctgctcctcagcacgtcggtgtggggaggggattgctccttaaaccccaggtggctgaccctccccacccagtccaggacattttaggnnnnnnnnnntgaaatgtggggggcttctcatctccccaagatcctcttccgttcagccagatgtttcctgtataaatgtttggatctgcctgtttattttggtgggtggtctttcctccctcccctaccacccatgccccccttctcagtctgcccctggcctccagcccctaggggactagctgggttggggttcctcgggccttttctctcctccctcttttctttctgttgattgtcgctccagctggctgtattgctttttaatattgcaccgaaggttttttaaataaaattttaaaaaaagaa

SEQ ID NO: 359961 - DNA, 746 bp, Homo Sapiens
  misc_feature (52)..(52): n is a, c, g, or t
  misc_feature (138)..(138): n is a, c, g, or t
  misc_feature (197)..(197): n is a, c, g, or t
  misc_feature (731)..(731): n is a, c, g, or t
attaatgtaattagggctactcagtgattgttttgaatttcttagactgggnattccagccacttgcttggctgtttgcaattttcacccaaaaaacggtcaaaataaattgtaaaaccagaacgaataagtttggcnccttgttaacatttttatttgcaggatggatgaggaaactgatgaaactggctgtggantttaattatccctggtatctttttctcccatctccaaggatcatcaggacttaaaagcatgaaattgacaacacaactacttaaaaacagagtaaggctgaactgtactcaatgtccagggcaactacagtactgaaaatctcaaggaacttactgtaaacaaacaagcaactgttcaacagcctcttgcatttggtaccatgactaaaatctactattttcttccatttacctatctggatatttttatgaaatgactacatgtaaaaaccataataaaatttccctttaaatgtgttataatacagcaaaacacatcaatgactataaataaaatctgaaatctcgaatgctaaatcctaatggaaacatcaagccttagcattcacgcttggatatctcgtgctgagataaaaggcctctttaaagtgactaggtccctttcagtggagtgacagatgtacatacaagcaacaatgctatggaggagtcatgctttatcctagtctacagttattttctctgccaattttnttttactattaccgc

SEQ ID NO: 359962 - DNA, 706 bp, Homo Sapiens
atgcatctttacagtggtctttccttttattaaatctatagcagtgaatatagatttgattcaacttttagttacgttctctcaagaatcctaatcaactttcagttagcctctttaagaaagggaaaaaaaggtgctgccagtcatccccaaattatgtttttggctgtgcattctattttctacatagcactgaatctgagtaacagtcatcctggatttatagttggaacagaacagtaacagacctaactgggactcagccagcactagcctcatcttagctgccccttttctctgctttgccgtttactgcttccctgggctagccataacggggttctgggcaggtcagactcttcagcaagacagtgtattaaatagtgtgaattagatacactgatgacctgctctgcctagttaagaaactgaattaatcagcagttacaaagcacatactttgttacgtgctaggctttgcctcctggcctctagataattaagacggcccagggaataccagcagagaagtgctaattgtatttgggtgttacaaaagcagacctagacgagctgttcacttaactggtacctgttggtcagaaaaagaatttatttagagattatgatcatgtaaaattacagtactcaacccttctagcaaagtatttttttgaaaaataaactaaatgcctttataaacttg

SEQ ID NO: 359963 - DNA, 364 bp, Homo Sapiens
  misc_feature (23)..(23): n is a, c, g, or t
  misc_feature (33)..(33): n is a, c, g, or t
gggcaaagaaaggtatccagganaaccatgganacataatataattccaacaaatatgctttaaactgagacacttcaaaattagtggaaggaaaaacaataggcctacagatctgtacagcagacaaaaagatgtaaagtacatgcaagtaaatatgtaaagttctcttctgccccatgctgagaaaagtattaaagatacattgctataaaaatgtttaaaacagtttcttgaaacgatttcctaatgttggattgaagcatactagctgagcatataatttgttcagtaattgtctataagtatgccgacacactgttgtgtgttcgcagctcccgcaagcaccttcctccactgcctggc

SEQ ID NO: 359964 - DNA, 1040 bp, Homo Sapiens
  misc_feature (77)..(90): n is a, c, g, or t
gggatctgatgatttatttaaagagccgttgatgcctccaggaaacttaagtattttattaatatatatataggaannnnnnnnnnnnnngctttgtctttctctcccttcttttatcctcatgttcattcttcaaaccagtgttttggaagtatgcatgcaggcctataaatgaaaaacacaattctttatgtgtatagcatgtgtattaatgtctaactacatacgcaaaaacttcctttacagaggttcggactaacatttcacatgcacatttcaaaacaagatgtgtcatgaaaacagcccctttacctgccaagacaagcagggctatatttcagtgacagctgatatttgttttgaaagtgaatctcataatatatatatgtattacacattattatgactagaagtatgtaagaaatgatcagaacaaaagaaaatttctattttcatgcaaatatttttcatcagtcatcactctcaaatataaattaaaatataacactcctgaatgcctgaggcacgatccggattttaaatgtgtggtattcattgaaaagaagctctccacccacttggtatttcaagaaaatttaaaacgatcccaaggaaagatgatttgtatgttaaagtgactgcacaagtaaaagtccaatgttgtgtgcatgaaaaggattccttggttatgtgcagggaatcatctcacatgctgtttttcctatttggtttgagaaacaggctgacactattctctttgattagaaaataaactcataaaactcataatgttgatataatcaagatgtaaccactataaatatgtagaagaggaagttttaaaagaccttaagctggcattgtgaaggaacaccatggtagactctttttgtaaatgtattttgtatttaatgaaatgcagtataaaggttggtgaagtgtaatataattgtgtaaacaaatcctgttaatagagagatgtacagaatcgttttgtactgtatcttgaaacttgtgaaataaagattccacctctggtt

SEQ ID NO: 359965 - DNA, 680 bp, Homo Sapiens
  misc_feature (235)..(235): n is a, c, g, or t
  misc_feature (397)..(458): n is a, c, g, or t
aagttacgaatcatgtttctgcatttacatgtcatctgcaagggattctaccatgtaaccctggttacaaagcactgaactggtacaacccctttattttcctgatgaggaaactgcagcccagccacctgcccaggtaacacagcaaatcgtggcaacctcgccgtccagcactcttctgggtctccaaggcctcccttcttcccaagtgtgtcgacgtcggaaggcccatgtnggccagggagactgagccctgaggttgctgacaggaggccactgtggccaccaatgcagtcatctggtgtttctatttattgactctttaaacttcatcatccaaagagagttaatacatgactgtttggtagcaagagaaacataatctaagaccgcaatnnnnnnnnnnnnnnnnnnnnnnnnnnnnnnnnnnnnnnnnnnnnnnnnnnnnnnnnnnnnnnaacctttggagttttagctgaagaagcgagggggctgagggtcagagtggctctctgtggtccagggggtcaggtagaggctgctctcaagtgggagccttctctgttgaaaaggctacattcagcccctcagctttggggggtccttcctgaaggggcttcccttggcagaaggggtgtggagacggattcagtggtcagaggggctcctaggtctgccct

SEQ ID NO: 359966 - DNA, 362 bp, Homo Sapiens
  misc_feature (19)..(20): n is a, c, g, or t
  misc_feature (97)..(97): n is a, c, g, or t
  misc_feature (149)..(149): n is a, c, g, or t
  misc_feature (168)..(168): n is a, c, g, or t
  misc_feature (325)..(325): n is a, c, g, or t
ctgagttattgtatataanngtttttaaagaatagaatgacacatcaagctagataggcaaaaattgacacattcagaacagcttttttgactgcgnagcaaaagttgtcagacacagcaaaagatcccttattattacagagtatttnacgtgtctctattttaggngagaaattaaatagaggggcttcatgcatttaggggagggtgctaaaacttctcaagttcgtcaaacttacaggaatacccaccatgatcattttctctctaattatgtataccacaaaattttcatctggccataggaattcactggtgggtgtanaattaatgactaaagaaattaagtggcaaatacataa

SEQ ID NO: 359967 - DNA, 377 bp, Homo Sapiens
  misc_feature (189)..(189): n is a, c, g, or t
ccaagttaaaaaatagacattcattagaaatatcatctgcactgaatatgtttaatattgcaccccatggaccagatatatctaagatgggtagcatcaacaaaaacaaggtattgtctatgcttaaggaaccacctctgcatgaaaaatgtgaggatgggaaaaccgagaccacttttgaaatgtccnatgcataacacaatgaagtctaagtctcctcttcccttaactttaaaacatttagtggctttttgggaagacatctctttggctactatcaaagctgcttcccagaatatgatttttccaagtcctggttcctgtgcagttcttaaaaagaaagagtgtgagaaagagaataagaagtccaaaaagga

SEQ ID NO: 359968 - DNA, 391 bp, Homo Sapiens
  misc_feature (28)..(28): n is a, c, g, or t
  misc_feature (54)..(54): n is a, c, g, or t
  misc_feature (76)..(77): n is a, c, g, or t
  misc_feature (159)..(159): n is a, c, g, or t
  misc_feature (161)..(161): n is a, c, g, or t
tggtgcttggcctgccacactgtgcaancaagaggttaggtcccctggaagggncatgtgtttctaacttgcaggnngatgccatgtgggctaaccaggcctggaaatcacgcctgttggagtctattatctctacagatcttatgcagggtttttgtntnttttttcaaatggagtctcaaaacaaaacaaaaatccgggtgtgaagtgggtgaaagatgggggtgaaaagcaccttgcccaagctgtagagtttgcttagtgattctctgcagatctcctgcctgagaggaaagggcaggggtagatctgacatcaaattcctactcagacactcacccgcaccaggccccatgtgctgcagtcagaggaatgtgacaggggctttcac

SEQ ID NO: 359969 - DNA, 446 bp, Homo Sapiens
  misc_feature (26)..(26): n is a, c, g, or t
  misc_feature (30)..(30): n is a, c, g, or t
  misc_feature (166)..(166): n is a, c, g, or t
aaaaagtacttggtaaatgtctaacnaaanctgttttacttttccagagcacgaggcatgcatgaaagagattaattactccacatgggaagttactacccaggcttaccaaaaggtcaggcttatataaagtggcgttccttttttcccccttagtaagacattnaaaaaagaaaccacaattgaaaagccgagagctatctgtgatacggaatatgaacacagaatcagattctcatagcagctaagctgttccccaggcagtggttctcaaggtgtgcttccaagaacagcagcagcagcggcatcacacatgcaaattactggactctgccccagatccacagaattggagactggggatggggcttagcattctgttttaacaagtcctccagatgattctgttgtgtatctagcttgagaatcactgccctggagaatgg

SEQ ID NO: 359970 - DNA, 362 bp, Homo Sapiens
  misc_feature (12)..(12): n is a, c, g, or t
  misc_feature (22)..(22): n is a, c, g, or t
  misc_feature (94)..(94): n is a, c, g, or t
  misc_feature (119)..(119): n is a, c, g, or t
  misc_feature (128)..(128): n is a, c, g, or t
  misc_feature (267)..(314): n is a, c, g, or t
tgaagaacatantgaaaggcantgaccttgaaaaaacaaccctttcccccaagaagaaagcaatggagaagcaaattgtttccaatcagtgaancccccagtttggggcctgtggggcntagagacantgtgaaatcaaaacttgtgttaaacttttcccccctggctcactttttttgagaaggtttatgggctatttggctggtgagacacgatcccctcctaagaaaatgtaggtgctcagacaggtaaccactgctgctactnnnnnnnnnnnnnnnnnnnnnnnnnnnnnnnnnnnnnnnnnnnnnnnngtactaggattttaaaaaatgtaatatattgcaggatttataaccagg

SEQ ID NO: 359971 - DNA, 336 bp, Homo Sapiens
agatgatctcagaaaagatggtaaagctagctgctgagaatacagaaatgcagaaagactattctagttttctatcaagaaaaagcaagattaagatagctaaaggtgactgcgtttttgggacacataaaggaagaagatctctgaagaaagctctcatattttaaaatatccttggaggctatctcacagacagtgaaagaacttggggattcaggtgggctacctaccatcagtaggaggaaatttgacctcttcccatttttttggcattaacatggactgtattcatcaaggtattataccacagcactctgatggaaatctcaagattag

SEQ ID NO: 359972 - DNA, 541 bp, Homo Sapiens
ggcaggtggtggagggccttggcttctgctaagtgagatgggaaccactggagggtttgaacagaggagtgccttgattgatttatattttgcaagggtcattctagctgccatattgtgaaaaactttagtggacaagggcagaaggaagagggaagacctgttaggaagctactgcaaggttccaggcttgggcctgggccacagcaacagcagtggtcaaatatctagatttattttgaaaagagccaataggatttgctgagagtttgaatgtggagtgtaagagaaggaagagttaatgatgacattaaggtttttggcctgaatagcaggaaagatggagttaccagttactgaaatagggaaggatgggctgggtaagtaaggaatttggtgcaaagcaggctgtctgtggttggaatgggaggttctggctgcaaatcaaagtggagagttctctcaggtcaggtctgcagcagagctcgagacagggatctgaatgcacttggtttattgtccggggttgttgggtaccgag

SEQ ID NO: 359973 - DNA, 1149 bp, Homo Sapiens
  misc_feature (258)..(301): n is a, c, g, or t
  misc_feature (590)..(616): n is a, c, g, or t
accccccaaaggattcgaggtggtcggctccccgggggacaatacgccgcgtgcaccagtgggcgccaaacagggtcggcgggggaacgaaggagataggctgtacccgctgctttctggagaaccgcgaaagtgggaagagtgcccacacgggtggcgggcgcctgacgcatatttttctttgagggcgggtgggggccttgcgcggagaagttttccgccccgagaaactcgcttccaggttcccctttttcggannnnnnnnnnnnnnnnnnnnnnnnnnnnnnnnnnnnnnnnnnnngaccagggaatttccataatgtcctcccctttacaaaggggtgggaggccaccatggagaaactgaccagaaatgttctgcctgtcccagaaggagacagagccagggcagacccaggggtgacttcgggaggcacagacactggcagtgatgggtcccatgggatgcctggcactcccagcacagacagctccccaaagcaggtggggaggccctttctgtgtttgggaactttttagttaaacaaatcctcagaatcgaattaagaaggatgtccacagctcgatcnnnnnnnnnnnnnnnnnnnnnnnnnnnccaccaaggttcccaagatcctccaacagaggggcttcccatctgatcttaccctcctgtttcagaaggtattaaacatcaataaaaattaaaatatattatcagtatcaactctagaagataacccatggcttcaaatctccctggacgggttctctgagcccagatttctggtccccaactcgtatgacatccagggccagcgagcgttcagctggcatctgttagagtctgccctccactgtgagactcctggcccctccgtggccctggtattcctcctgctgctgcccctaggagtcctccagctggataacaataaaccaaaccgctgtctcctaatccctgacttgttctcctgactcctagtcctttggtttcatcggcccctgatgtctgttcaactcttcccctttgtaatcagcccctagcacccagtcagcatgacgtaagacagaaaaacagtttactaaaggccagagccctggcacagaggatttaaaagaaacagcacccaaaatcccgagaattcc

SEQ ID NO: 359974 - DNA, 578 bp, Homo Sapiens
  misc_feature (73)..(73): n is a, c, g, or t
  misc_feature (100)..(100): n is a, c, g, or t
  misc_feature (149)..(160): n is a, c, g, or t
  misc_feature (403)..(438): n is a, c, g, or t
  misc_feature (455)..(457): n is a, c, g, or t
  misc_feature (476)..(476): n is a, c, g, or t
  misc_feature (487)..(487): n is a, c, g, or t
  misc_feature (489)..(489): n is a, c, g, or t
  misc_feature (491)..(491): n is a, c, g, or t
  misc_feature (495)..(495): n is a, c, g, or t
  misc_feature (497)..(497): n is a, c, g, or t
  misc_feature (501)..(501): n is a, c, g, or t
  misc_feature (504)..(505): n is a, c, g, or t
  misc_feature (508)..(512): n is a, c, g, or t
  misc_feature (517)..(517): n is a, c, g, or t
ctttcccgtccacttgtcacctacctatccccttcaggtttgttgggtttttcgtctttccagattgcagtgngacacagcccccgatctcgagccccgngcccccggcttctgtctggacattgcatcgccctagttttctttctttnnnnnnnnnnnnttccaacagaagccacaggccggagcccctgggagccctcgcaccgctccccaccccactcagcggccccatcggaactgagaattgcaaaacccccgactttagctatagttaagttgccttcccccggtgtccccacgtttggtgtctggctatggcgcccccatctgactgtccagctctctctcccccacccctcccggtgttgttattaaacgtctgtggagcttctgctgcaaggannnnnnnnnnnnnnnnnnnnnnnnnnnnnnnnnnnncacaaacagaagaggannnaaaagcaacaaataaaganaacacacagangngntttnanaaanaannggnnnnnaaaanggacttaactggcaccagttaactttcttgtacttttttgctgagtttagcttcttgtagt

SEQ ID NO: 359975 - DNA, 1146 bp, Homo Sapiens
  misc_feature (102)..(102): n is a, c, g, or t
taaataagcaccgagctgataatcggattgtagagcgttgttgcaggtgcctgcgctttgctgttcgctgtgtaggcaaaggatctgcagcactgctcagcncactagtcacacagatggtgaatgtgtaccacgtacatcagcattcctgcttcctgtaccttggcagtatccttgtggatgaatatggcatggaagaaggctgtcggcagggactctagacatgctccaggcactgtgcatccccacctttcagctcctagaacagcagaatggtctccagaatcaccctgacactgtagatgacctgttccggctagccaccaggtttattcagcgtagcctgtcaccttgctgcggagccaagtggtcatccctatcttacagtgggccattgcctctactaccctggaccaccgggatgccaattgtagtgtcatgaggtttctacgagacctcattcatacaggggtagccaatgatcatgaagaagactttgaattacggaaagaactgattggacaggtgatgaaccagcttggacagcagcttgtcagccagctgctgcacacctgctgcttttgcctccccccctataccctaccagatgtggctgaagtgctctgggagatcatgcaggttgacagaccgactttttgtcgatggttagaaaattccttaaaaggtttgccaaaggaaacaaccgtgggagccgtcacagtgacacacaaacaacttacagacttccacaagcaagtcactagtgctgaggaatgtaaacaagtttgctgggccttgcgagacttcaccaggttgtttcgatagctcacactcctgcactgtgcctgtcacccaggaatgtcttttttaattagaagacaggaagaaaacaaaaaccagactgtgtcccacaatcagaaacctccgttgtggcagaggggccttcaccgccaccagggtgtcccgccagacagggagagactccagccttctgaggccatcctgaggagttcctgtttgggggtgtgagggaaaatcagcgcggattttaaaaagatggctgtggcctgcccggcgtggtgggaggggagctggtttcctggtgaactttctaaaaggaaaaataattttaagtaaagaaaaaag

SEQ ID NO: 359976 - DNA, 387 bp, Homo Sapiens
aatcaaagggagggaggagggagagagaggaaggaaaggctgcctcctgatgctcccagatccacccaggacacaggctgtgctcatgaaaacacaaagtcgtgagaatgcggatgtgtacctcctggggccaggctcagacggtaatggtgacacctcttcctaagtgttcattttcacaatcacctttctcaaggcacatgacatattttcttacaacgctgtctggagctttaatcctacctccctaagacctttcagaaagaaaaggaggcctggagaggctgctggaggaaggcccgggggttatgctgcatcagccttcactaaaatgaactcactggtcccattctgctccttcttcaagttctcttgaggggggttctc

SEQ ID NO: 359977 - DNA, 177 bp, Homo Sapiens
  misc_feature (149)..(149): n is a, c, g, or t
  misc_feature (151)..(151): n is a, c, g, or t
  misc_feature (153)..(153): n is a, c, g, or t
aaaaacagcaaaaggttaggagagggcactgttctagcaatccttatttgcatcttggagtcctggagggtggggaagagctagaagttaaaggttagggaaaatccaggagggatgcatattgtatgtcagatggtatcatagaattntncnctcagagttgaaaatggtattatg

SEQ ID NO: 359978 - DNA, 277 bp, Homo Sapiens
  misc_feature (9)..(9): n is a, c, g, or t
  misc_feature (22)..(22): n is a, c, g, or t
  misc_feature (39)..(39): n is a, c, g, or t
  misc_feature (145)..(145): n is a, c, g, or t
  misc_feature (178)..(178): n is a, c, g, or t
agttttaanatttgctaaaaangaattcccccacgaatnccctggtaattctatacatttgatcctttaataaacactaaactaatagatcatagaaaactaaaaccttagagaaggtgcctcacagacatatttacataaatanacgtagcctcacaagaaagaccaagatctcatntagcgtggaatgctttttccacaaggctgggtccatgcctcatttgtcagattaaccccatttgaggagaaatttgagtttgtggttcatgggtttttg

SEQ ID NO: 359979 - DNA, 2289 bp, Homo Sapiens
  misc_feature (960)..(968): n is a, c, g, or t
aaggagcgaggcctgggtggcgaattcggcacgaggactgggacccctgctaacactgcaggtcttctcttctgccaactaacgtgctcgcgccctcccagcacgtggagagcttcaattgtcagataaacaggaagcgacagatgaccgctttctaacgctctcttttctcccgttttcagctgtagagtagctgccaggaggacttggccacccggccctgtcacactgcagccccttccccttccctctcgtggcccacaaggaggaaggaagggcaacctaaaagcccacttagaaactttttggatatgccactgcaattcttttcaaaatagcattccccaggtttttaatgggaggaaaaaaagctttaatgttgagcatgctgcgagctgctgcgtggaaaggcctctgtatgggccgaagacccttcttccctggctgccaggctcgccaggagcccactggaaacgcccaccacgggggctccttgttacacatgttctttttttatccgatcaacctgtgcacttttgatattttgatattatatttgcttccttaattcctcgcgtagagacggtctcaggtgccgtggtctatgctcgtggtcctgtagctgtccgcctcagctcccaccgtgtttgtctggtgtcagcacgaggcagagctgtgtgctccatagcgtgtagctttagactcggagatgagtgctttgacccagcgaggagctcagctaagtgtatccacgctgtggttcagcagcctttagatcatacggcattgtggttcatgtttgaaattacagattttaaatgccatgttcattaagaaatccagggtattcagattctgggggtttttcatattgggattattattattcctaggaatagttcaatgtaacaagaagaaaacttgacctttgctctggttaaaaaagaaataggcacttgnnnnnnnnngataaattattgaatgagtagtattacctacaaattccagaattttctgggttttaggacgttgtgaagcatgactgattaacagaattttatacaactgtaccaataaaattccaaattggaattgttttgttactctggttgttgtgccaaattgtggtacacttagaaaattctacagtcgtcgatttttagggtgttctctttcaacacctttttgttagtaatcattgccagtagtgccttcatcagttaagggaggtgtcccagcacagatcattctcaaaagcgagccaggaaagagcttagtggccatgctgaaggccagcgtggaccagccaggtgaggccaggtgctcctcacacccagacctgggcatcttcattgagggaaaagaaaccagtcattgtgccaaaattctgttagtcagtgattctttacttgcaaattcaggggcttagaaaatgaaagcaaacacaaaaccttgagtgtgctttgggaaccaaatggaccttctgggacaagctgagcaagctgtatgaacgccacgtttgtgaagagctgagggtatcaggagggccgacgctgtgttggcatgcgcagtaggggatgagggttagccatagtattctttgcaaatgtgaaagcgagacattatatcttctcttgcttggtgtaactaatcactgttaatttcaggaaacagaactcattaaaactccttagcaaaccaggtctacatcctgttttgtttgctgagtgaggttagtgggagtggtcaaattggtactcttggaggaagaaaaactgtccttccttctccaaaaaaggaaaaattataataatataaatgacaaaaataaaagaattctgtttcctggaataagcatttcttattcctagttgtagggactcctatttttaccttccgttacagtgttgattcataagaaatattgttacatttgagataacttcatctgtatggggtatttatttgcaatgatgtctgagtactgtattttttctgtgcattaccttagtgtcagaatgttggtctttattttaaagtcatatgcatgttctcctgccaaggaacctttacacagacccaaacaaaaaaataataatcaaatgccttcaatttctgagaaaatgaggcagagcatggaaaaggaataggaaggagaaattaattgagattttcaggacacagacatatgatgtgaatgcctacaaagccagtgcgcataggaacagtgggcctgggtaaagagtcacattggtaggaccaataaagaataataaaaagacaaagcac

SEQ ID NO: 359980 - DNA, 1399 bp, Homo Sapiens
  misc_feature (858)..(894): n is a, c, g, or t
  misc_feature (1029)..(1046): n is a, c, g, or t
  misc_feature (1052)..(1139): n is a, c, g, or t
  misc_feature (1231)..(1231): n is a, c, g, or t
tacttccacaggggagcttctcactctgggtgcagacaggacagtgttggccattgatgaaatagataggatgggtttgaggccagagcagtctgggagtagggggaaagagaaggaggtgtgctagtgtctatcacaggctttctcaattaggtttgcaggagaaaaagccctaagtccctgtgtcatctagaatggtactaattatgtacagtccctaggagaatggagaaaatcataactcaaatcatcgactcaattctgttctcttcagatgagctcagagagcacataggagtgtttgtaatgaggggtatgtaatgattgagatagaggaatgagttacataaacatctcgggacaaatgcagcatagaaaacatctttgtagttaccctgaggggaaatttcctctgagttcttttaacattaactacccgtattattttatacttaacattcatatcataccttcccaaatatattgggaagttcagtgttaagtacgtttctcaagtacttaacaacttaatatagggaggaaaggtgtaaacagtgaaaaaagagcaaaactattttatggtaattttatggtagtatcagcttgtatttggttctctgtttctaaaataatgtaatttttaatattttaaataataggataacctggtttccaagcctttttttcccccgacatccagaatacacactggatccaagcctttcttaaacatcagtacatgtggaagactggcatgccatataccaaatgccattcagctgtaacagtatacacagattttctcttataaagaataagaacatcataaccaatgaccactcatataaagtcttattnnnnnnnnnnnnnnnnnnnnnnnnnnnnnnnnnnnnntagagtctcattatgttgctcaggctggagggcatggtgtgatcttggctcactgcagccttgacctcctgggctcaagtgatccttccgagtcgttgggactacagtaggtgaacaccaccatgcctggctaannnnnnnnnnnnnnnnnnaatcannnnnnnnnnnnnnnnnnnnnnnnnnnnnnnnnnnnnnnnnnnnnnnnnnnnnnnnnnnnnnnnnnnnnnnnnnnnnnnnnnnnnnnnattataggtgtgagcccacatgcttggaccataaagccctactatttccttttggagaacacagtcttgctcttgtccaagctggaatgcantgatgtgatccatggctcacttgcacccttgaaactcccaggccttaagaagattctccccatctcaaccctcccggaagtaactgtgggaataaaaggtggaaaaaccaataaagcccctggctaattaatttttttaagaactttttccttaaatttccaccccaa

SEQ ID NO: 359981 - DNA, 693 bp, Homo Sapiens
gtgttcctttaactattaatacctgcagcaaagccccaagccaacaacaaaaatagtttatacccggggataatagctgctatttagaattgccatctttcctgcttttaggtggagtgttttttcagttgagtgttcataagataagcattaccgaagagaaagacagcagaaagaactttccttggtatccctcttcacagctatgaagaaaaaagaatacatttattcagaaataagtgacctgatagctccaatctattacacacttcaaatatcacaagcatatgctgagagagaggcgcagaagaagtctctcgatggaggttaacgccttttttggatataacgccaatattcaggctactacagaagataattccttggcaagataacaactactcatctcttcggtgacaactcggcattatggttaacttcttaaggaatgtagtagattcttacaataacaacgtcagggaacaaggagatatcctgacaattctcaagttagttttataatgtcatactgccaggaacacaatctagaaggtggtcttatctaggtcttgacacaagctgtactggagcttgattaaatgacattttccttaccaagatagaattttcttttctaaaggctagagaaccaagaataaagaataccaagaatagccgggtgtggtggctcat

SEQ ID NO: 359982 - DNA, 1052 bp, Homo Sapiens
tgtaattctgcccttacatccagccggcaaacaggctaaactcctctaatgatgcataatgtatatttatttactttcctttctagatatacgggcactggatgctaataaaacgtatgttgatatacctggagtctcaaagcttgcagagctagggatcaatagggttcacactgccactgtcaataacaggcccaccactccttgctgataaagggtagcagggcctgtggacccttgcctgtgggtgtccatgccaggtgtaagggtgcgtcacaaggtcatttgagagcctgtcttgggaataacctgggatggacttgggttcattcgtaactacttagtaataagaggccacataagaggcaaaagctcaaagcaaaccaaaatttaaaacctgagcatgtttagtacgaatccattttgaaagtttggatgagtctgtttatcaacatgtaccgagctggaatatgtgggacactgcgttctgattggctaccaaaaactaagtagttacacagctccaacttaaccagcagtcccaactacaaacctgccaatgctcctggatcagaggagagactcctgcccacgtgctacttctgagagccagcggctaccacagaggcagtgggctggagccctctgcaaggccgaggggaaggcaccaggctccatccggacacactccctgtccattaacaaatacagtagattgtgatgatctaaagtctagtgttcttacagcacctacagtggaaatattttccttttggccagggtgaaggagtggaaaggggtgaacatatccagatgacaactatgacggacagctgaagccatgcacactaagaaaaccaggctgccctcttaatccctcacggggtggtggcttgtatttcaaagggtttatctgtccatttattgtccagggtgggacacaagttaattcagaacaatgggcagagagctactctgagagccctccagagagggctctccaattgtttaacttttttagaaaagataaaattagagaattacaatccgct

SEQ ID NO: 359983 - DNA, 355 bp, Homo Sapiens
aacgaatagaataaaggttggacgtggaaacaggtactggcagctctgtcagcagctgcttgggacaatgtcagttgcagaggccatcaacaatggagagggcgtgagtgatggcagcagctgttctttgtgtgggtcacccataaattgcctgtttatttttaaaaatgaccaaccatactgaacaagtgttgatattatcattagtctgggtatgcacttaggatatccaagaataaaacaggaatgaataataaggatgaaagaattcttgaaaagtttaaattccaaacagctgtgctaacagagtccaacattagctgactgaaacaaatatgaatacccagaactgtag

SEQ ID NO: 359984 - DNA, 1040 bp, Homo Sapiens
  misc_feature (37)..(37): n is a, c, g, or t
  misc_feature (102)..(102): n is a, c, g, or t
  misc_feature (191)..(191): n is a, c, g, or t
  misc_feature (393)..(496): n is a, c, g, or t
  misc_feature (587)..(636): n is a, c, g, or t
  misc_feature (662)..(676): n is a, c, g, or t
  misc_feature (932)..(956): n is a, c, g, or t
agtgagaacattctttaatcagttgtaagcatatttnggttacagaaaaacatttgagagatctaacatttgttatgtgccctctgtatatcatctacacgntaagactgaaatattttattcttttacagagaagggaactaaagctcagagaggttaagtactttgcccaaagtcatttgataaatganaggtagaaccagaattcaaatttggacctgtctgataccaaaacccatactcgctctactacagaagtactgtagtggtaagctgaagggtacaggttcaggggttagtaatgaatatcacagtgagaattttaactattactttaggcttatagtttgctaataaaattgctacctgaaggcagaggcagtggctcactcnnnnnnnnnnnnnnnnnnnnnnnnnnnnnnnnnnnnnnnnnnnnnnnnnnnnnnnnnnnnnnnnnnnnnnnnnnnnnnnnnnnnnnnnnnnnnnnnnnnnnnnntaaattagcagggtgtgatggggagcacctgtgatcccagctactcagaatgctgaggttggaaggattgcttgagcccaggagttaaaannnnnnnnnnnnnnnnnnnnnnnnnnnnnnnnnnnnnnnnnnnnnnnnnngagtgagactgtctctcctttatttnnnnnnnnnnnnnnncctacttcttgggtcattgtcctttgtcaaaggaaactcttctaatatcatacctacatgccagaggaagtcctataaattttaaatgtttacttccaagacatttacttgaaagttgaatgttttgatgttctgtcccatggggtccttattgtaatctagaccatcttgttctagatgggcacttaagccctgtttcttcatagtctgttatgctgtcatttggacctggatgcttcctgtttcttccagcaannnnnnnnnnnnnnnnnnnnnnnnnaagagaggaacatttaaggagttagataaactggtaattttcagatgtgtagaaaattgcataggtggtgaaagccaatgcccc

SEQ ID NO: 359985 - DNA, 341 bp, Homo Sapiens
aaaagactttgcttgtaagagtaacgttaaaggtttaaggaaaggtttgttgaaatcgatatgcatcacacgaatcatttattttcaatgttgttttccagttgcagcaatcatttgtgtttacatgactttgaaaaagggtttagtttatgttgattttgaccctcttatttaatctctagtgcagaagtgcagctttctgcaggctgcgcctcaatcgctaagttccactctccatcctctgccgcgctactcctggcatgtggatcaccaagatacaatttctggtcctgtctgttcttattgatgtcctttacagttaataaatttgattgccacta

SEQ ID NO: 359986 - DNA, 473 bp, Homo Sapiens
gcctccaggattcctcttgagactcctccactatttcattaccatcccgccacatcttctagtgctatgccctggttccctttggaatcctctcaatcccaaagaaggcctcctaccacctctaaggcatcaaaggtgttagaaagtgccccaagactcaacagggcatccatctcatcatagaagacactggtgcctggtgtgtaggtgctcctggctttgcagtagtcggtcaggaggtttttgaaccgatagcaacattgctccagggtccacaggaagccatgttctcacagctgctcagccataatccggtacacctggtggtttcgatggcaggtgcggagtttttcgtggatccaggcctctgagaattcccagaaaatcttggtttctttgtatcccagtgcactcctgccaccttctcatcctccagggcctgccactccagctcgctccaggtcttgggcttt

SEQ ID NO: 359987 - DNA, 461 bp, Homo Sapiens
  misc_feature (22)..(22): n is a, c, g, or t
  misc_feature (30)..(30): n is a, c, g, or t
  misc_feature (58)..(58): n is a, c, g, or t
  misc_feature (69)..(69): n is a, c, g, or t
cattaaacgaaagcgggcccanccgtgtanaaaggaccctgctgaatatccttaaggntttttgtaagnaaaaagaaaacccaacaaaaaaagcttattttcacattaaaatgaaacctcttttgcaacttaagaattctatggaaaagcagtttttatcatattttgtgtccatgcaccatttttcttaaaatggcttacaaaaaagaatgtaaacaatttgtgatctggccagttgtacttttagctcccagagggagagttggtggtattatgagttgagtaaaaaccatccaggggaacttgagggagcagtctgttgccagtaatgttccttgtgtgccattaaaccacctccagatgagtggaggaacatcactttttaattttttaattgtatttggaattgttgccgtgtactaagaacttgacctaaataaaatcccacaaagtaaaaaaaa

SEQ ID NO: 359988 - DNA, 507 bp, Homo Sapiens
ggagagcaagagacttggaacagctccctacagctgcacttctagaaggtcagcctgtccgattcttgtaacctggaggtccctccccatctgcagccccctgagctgcaggagcggccccatcagtgcacctgattggaacacactagatttcaggtcctggaaactgggcgctaggatccgtttccctggctgcagagagtgggaggtgtgatgtggaatatcccttctcccagcacaccccaattaatactgaagagtagggcaggaggaggtgctgggaaaaccgggtttcttggcacatgggggtgcaagcactgtggttgaaattggccatgtccaaggcacaccagacgatttcaggtcatttttagccctagactggaaaggggtcaggggacaggtgacctgggctcagcccccagcagctcccaactgcccctctcccaagcaactcctgatccctgcttttgaggaaataaacaaataaaaccccgctaaaaaaaa

SEQ ID NO: 359989 - DNA, 1279 bp, Homo Sapiens
tggaccggtccggaattcccgggatctgggctgggagcaacgcgactgaccgtggtcgtgggcggacggcggctgcagcgcggaggagctggggtcgctgtggggtcgcgaagcagagcccgggacgtgcgcgcttgtgtgcacgatcctgaaggggagctccgaggggcccgggtctccagggctgctgcggccattcccggagcccggcgcggggcccgcgagatactggtttaggccgtcccagggctccgggcgcacccggtggccgctgctgcagcggagggagcgcggcggcgcgggggctcggagacagcgtttctcccggaagtcttcctcgggcagcaggtgggaagtgggagccggagcggcagctggcagcgttctctccgcaggtcggcaccatgcgccctgcagccctgcgcggggccctgctgggctgcctctgcctggcgttgctttgcctgggcggtgcggacaagcgcctgcgtgacaaccatgagtggaaaaaactaattatggttcagcactggcctgagacagtatgcgagaaaattcaaaacgactgtagagaccctccggattactgggacaatacatggactatggcccgataaaagtgaaggatgtaatagatcgtggccctgcaatttagaagagattaaggatcttttgccagaaatgagggcatactggcctgacgtaattcactcgtttcccaatcgcagccgcttctggaagcatgagtgggaaaagcatgggacctgcgccgcccaggtggatgcgctcaactcccagaagaagtactttggcagaagcctggaactctacagggagctggacctcaacagtgtgcttctaaaattggggataaaaccatccatcaattactaccaagttgcagattttaaagatgcccttgccagagtatatggagtgatacccaaaatccagtgccttccaccaagccaggatgaggaagtacagacaattggtcagatagaactgtgcctcactaagcaagaccagcagctgcaaaactgcaccgagccgggggagcagccgtcccccaagcaggaagtctggctggcaaatggggccgccgagagccggggtctgagagtctgtgaagatggcccagtcttctatcccccacctaaaaagaccaagcattgatgcccaagttttggaaatattctgttttaaaaagcaagagaaattcacaaactgcagctttctaaaaaacaagaaaatcatcaataagaagacatatacaggg

SEQ ID NO: 359990 - DNA, 590 bp, Homo Sapiens
  misc_feature (470)..(470): n is a, c, g, or t
  misc_feature (508)..(508): n is a, c, g, or t
  misc_feature (521)..(521): n is a, c, g, or t
  misc_feature (535)..(535): n is a, c, g, or t
attcggcacaggagcatgggacctgcgccgcccaggtggatgcgctgcaactcccagaagaagtactttggcagaagcctggcaactctacagggagctggacctcaacaggtgggtgcgcccttcccccggctgcacttcccagtggggatctctgctgtcgcccaagcctgacagctggatccaggggagttggtgtagacctcactgccctccagcagcttctgcatgtgcactattcggctactgggatcattcctgaggaatgttctgagcctaccaagcctttccagatcattctacatcacgaatcacacagagtgggtgcagagtattgggatgcccatctgggaaccattcttcattcattcagagttcggccattagggaaaacgagggacttccaaccagcatgttgccgtttttcagccatgatttcctgattaaaggatagttgcatttattaagtngttttcttaggaaaggacggaaaattttgggaagtctnttaggttttttgnccgcagaatttctngggacaagcaggcaggaaagagattttgggccagggttctttaaggcccagaatt

SEQ ID NO: 359991 - DNA, 310 bp, Homo Sapiens
  misc_feature (28)..(29): n is a, c, g, or t
  misc_feature (58)..(58): n is a, c, g, or t
  misc_feature (60)..(60): n is a, c, g, or t
  misc_feature (279)..(283): n is a, c, g, or t
  misc_feature (287)..(287): n is a, c, g, or t
  misc_feature (300)..(300): n is a, c, g, or t
aaccatagtacactgtaaataaccttgnncatacatacattgcagtttcaaagaaagnantcatgtcattgtacaaggataggaagaaatccttaaagttacctactgtagtttatgatataagaaatacatatctatatagcattgtatatacatatatagattgtgtgtgtttatatgtaatttatttgcccaattatcctgttagttttgtggatctgcaactttcaggaatgaaaaaactccttttcactgcaagtttctcttcccccaaacttnnnnnatantcatactagaggnaacgcacgag

SEQ ID NO: 359992 - DNA, 492 bp, Homo Sapiens
ctccagaccaaagagaggcgttttgaacattaagacgctttgctgcttctcacctgaaacacgtaacaggaacaccaacctcttcagccgcgggaaatcttctttgacacaaaactcaaaccgagtcaacccaaagttccaagttctttgctttctcttctgtgtgtgtgttggtttgtcccaaaagtcagtttgcaagttgaaacttcatgaaattactcgtagcagaaataaagtacattgtacaaatcacgcaggtctgcgatgtggagtataaaaatggtatttacagccagtaaacatggaccagaaagacacgtacaactgcacaccggcacacactcccaagcaggccctcgggggcctcggcgggcgccgcggacacgggtgaggccccctcgaggcagattggcatggcacacgcttgcacacggggacacacggaacacaggcacgctagaggagagtctcgaaacaattatcaaactctcc

SEQ ID NO: 359993 - DNA, 793 bp, Homo Sapiens
  misc_feature (736)..(736): n is a, c, g, or t
  misc_feature (759)..(759): n is a, c, g, or t
  misc_feature (787)..(787): n is a, c, g, or t
gatgaggggttggtctccctttctcacttgcgtggtgtctgatgagccgtctgcggtcatgttggtttgttttagtgcttgagaggggttggtctccctttttcacctgcgtggtgtctgatgagccgtctgtggtcgtgtgtgtttgttcctctgctgcttccaggattttctctctcagtgcttttgagcaacttgattacgatggaccttggtatggttttctatgtgttccttgtgcttgtagttcattgagatttttggatctgggtctttgtagttttcatgaaatttgcatcattttgaaacttcatatctgcaggtgttttttctgtccctctactcctcaggacctcaggcatgcaggtatcaggcacgcgggtatcaggcaggtgggtatcaggcatgcagttatcaggcatgccggtatcaggcacgtgggcctcaggcacacaggtatcacgtgggtatcaggcacgcagttatcaggcacgcgggtgtcgggcaggcgggtgtcggcacgcgggtgtcgggcaggcgggtgtcgggcacgtgggtgtcgggcaggcgggcgtcgggcaggcgggcgtcaggctgcttggctttgccccaccgcagctcagtaaagctttgtgcctgttttgtggtttctgttgctgtgtcttcgggttcactcatcttttcttctgcaatgtataatctgctgttcatcccactcagtagttttcatagtttntcactcccgcaagttgagtttgngctcgttttaaaaaatatctctcgtgtntcagct

SEQ ID NO: 359994 - DNA, 440 bp, Homo Sapiens
ggaccaggtcgtcaggtcccgatctgggccaaaatttaacttctactggtgattgtgatagtcctcatcttcattgacctgttcatgcagtctcatcaagacagcccattctacagggatccattagggtgtgggcttcagagctaggtccttggggaagtcctggctgtctgcattagcagtggtggtgggaatgtggccatgggcaggggctttatgtgtttttgcttggggggcgctgggcctagcccagagtagtgcttgctccccctgccttgtcccaccagggaggcagcagactcaggccctccatggtcctctttgtcattttgttgacatgcattcctccttttgtcatcttgttggggggaggggattaaccaaaggccaccctgactttgtttttgtggacacacaataaaagccccgtttatttgtaa

SEQ ID NO: 359995 - DNA, 417 bp, Homo Sapiens
gcatttaaaaacaataaatccccctattaaaaacgtaaaacccgggtttgcttgcgtgcccacagggaatatatccaggaaggttattatgaagctgtcaaatcaagatgatggaaataaggcagtttgaacgaacagtcttcccacagtcaggccatttttgctgatttggtttagaattttcagaaatacttagtacactccacctgttctttgatgggaatatctaagaaggctaggtaggttcttagggttagcctgagtcatctaggggctcaactccttgtgaggggaaatgacagtgaacaagttagtactttgctccacaaatgcatgaaaggacaaatttgcatcttctatcagtatttaacttccttttgctaatgacaaataaatatatctatatttttaaaaaaa

SEQ ID NO: 359996 - DNA, 272 bp, Homo Sapiens
tgggacaacaggaatgaaaccctgtctttagaaaataacttcctcatatttaatgttttttgcttcaagattcttcatataacagtaattgaacacattcctagtcaaatctattccttatccattaagatccctggaaatccagcccactgaaataaaagtaccagtatatgtgaacttaaaatacagggacgtgcaatgcaatactgttcctgatggtcaagatctcacaaaaaagtaaacgttcatcagtagagaattaatgaataaac

SEQ ID NO: 359997 - DNA, 578 bp, Homo Sapiens
  misc_feature (3)..(3): n is a, c, g, or t
  misc_feature (499)..(529): n is a, c, g, or t
ctncacaatgataacttctccctctccaccattgccgagggctctcacccaaatgatgatcctagtgctccccacaaaatccaggaggttctcaagtcctgcctgaaagaggaggagtcatttaacatccagaactccatgtcgcccaaacttgagggtggcaaaggtgaccaggctgacttggatgtgaactgtcttcagaataatttaacctaaagcagagcaagaagagaggaagcgggggtagtgggtggggggtaggggaagaaacattatctcctcttgtacagagtctatttcttgtaaccatttgttaaactcttttctttttctgatctcatggcatgcttttatgtattttgtacaggaggcaaaaaaaatacttaaaataagcaaagaaactgaacagaattgcatacattgggttgttttttctgtgctgtctgtacattgcttctgctgctgtgatttctaaacctgtgctgttattcaactgacnnnnnnnnnnnnnnnnnnnnnnnnnnnnnnnaaataccagtaaaaaacaaagttcttgaaataaaactttttaaaaagtt

SEQ ID NO: 359998 - DNA, 275 bp, Homo Sapiens
agaccctagttggatccatactatctatcctaggtcatctagtactcctaggtctgggctcttgcaaaaagcttgcaattcatcaagggttgagctgcacattggggcttttagatgtgctgctgaggaagtgatttcctgcatttaatcatcttccgatgaatgctagagaaactgatctagagtggctcctcttggttagaactagctgaagcatactgtatatacttactacttttaaaaatttcatataaaggaatagaaaataatactgg

SEQ ID NO: 359999 - DNA, 351 bp, Homo Sapiens
  misc_feature (249)..(249): n is a, c, g, or t
  misc_feature (264)..(264): n is a, c, g, or t
  misc_feature (284)..(284): n is a, c, g, or t
  misc_feature (307)..(307): n is a, c, g, or t
  misc_feature (327)..(327): n is a, c, g, or t
acaaattcaaaaatcttaatttattgtagactcttctcatttgtaattccagtgttttgaacattaataaatacacgttctgttaaaaacctccagtgtctaatctctcccataaagtcttaagtaataaaaataggtttacatttttcccatctcaataaaactgacagttgttttttggtaacagttctgatcaaattaaaaattacacctcgtggatgttgggctgtgggagtacgtgggaaaaanataggaacaaaaaanttacacctcaggggggcagnaatcctggttaaaggtcatggantgggaggactgttcgtaggncttaaaaaccctttttcgtacttg

SEQ ID NO: 360000 - DNA, 904 bp, Homo Sapiens
  misc_feature (110)..(110): n is a, c, g, or t
gtgaatatggaaaaggaaaggaaaacctatccagtcctgttccctctaatccccatgtcccatttttcccctcttatgtaaacaaagtctttggacttaacatcctttcntttgaactttactgtgtaatattagagcacaagattcatgctactctttatcaaataatcttgcagtccttgaaaagaattcaaagaatttaagccactgacgtcctaatcttggtaaataacactaaaaacaaattcttgagccaacttcggtagcaaattctctacagagcatctttctctgtgaacatctttatacatgtgtattaaagttaggctggttagtcactcttaccaacctcctggtcttacagaatgatcaagaaagtatttgttcatctatgatagagcaagaactgtgactgttttaaagctaagacaacacaacacatttctcccttgccagccaaggtggcagtggaggccctgggtggtccagacctccccaaaggcgggaatcttcactatgttctcttccctccggtgagcctccttctcttccctttatatcagtgcctttttctgctttcagagagaaaggtgtttgagcaagaaaacataggatatttcccaccacgaaacagacataattttgagggctcagcacaaaatgaaatcatggggcccttcttcaaacattattaagaatttccgctatagcagagccttgaaccaagtgtggggtccttctaagtgtgggccctgtgctgctacacaagttacacgctaagaaagccagccctgcctaggttccccgcctactcagattgccaaaaggagataaagtggctcaattgggttgtccagatgaaaagcaggtattttttttatgatgattcaaacactgtcatcaa

SEQ ID NO: 360001 - DNA, 415 bp, Homo Sapiens
  misc_feature (371)..(371): n is a, c, g, or t
  misc_feature (387)..(387): n is a, c, g, or t
  misc_feature (395)..(395): n is a, c, g, or t
  misc_feature (397)..(397): n is a, c, g, or t
ggttccttgatctagaaacctgagcgtcacctttacctcctccctttcgcacagttgctgtcttccgccaattacatgcccttcttccttctcagttcctctcaaactcttatgtcacccacgccagcccttgtcctggccaccacctgctcacctgaattgttgccactgcctcccaacaggtctccctccctccagccagacggcctacaatctgccctcacctcactgccagaatgatcttctggaagcagaggtggagctgaacctgtattcaagccgtcagttggaatccaaacagttataggactgacttcaggttccatggccagggacccatgagtctttgtagccaggctccagccagcacnttcctgcatcaatttntgaccagntncccaaattgcgttcctga

SEQ ID NO: 360002 - DNA, 840 bp, Homo Sapiens
gggtgacctacttttgaccgcaactatgggcttcgcacattcctgttctgcacgccgttcacgccggatgggcgcgcacacggggagctgcccgagcaacacaagcgtaagacgctgctcagcaccgaccacgccttcccctacagtcaagactcgcatccgtgtgtgccaccgggaggagacggtgctgacgccagtggaggtggccatcgaggacatgcagaagaagacacgggagctggcctttgccaccgagcaggacccaccagatgctaagatgctacagatggtgcttcagggctctgtagggcccaccgtgaaccagggtcccctggaggtggcccaggtgtttttagcagagatcccggaagaccccaagctcttccggcatcacaacaaaattgcggctctgcttcaaaggacttctgcaaagaaatgtgaggatgcgctgcggaaaaataaagccctgattgggccggaccagaaggagtaccaccgtgagctggagcgcaactactgccgcctgcgggaggctctgcagcccctgcttacccagcgcctgccccagctgatggcacccaccccacccggcctcaggaactccttgaacagagcaagtttccgaaaggcagacctctgagcccacaaggaccaaagctgtacctagaggaaccagcacccgggcctcagctgtctgtgctgcgaggggagtctgccctggtgcccactgggctgtggggtgaccacactgtacttggggctgggccctctgcccctgtgtccccatctgtgtgcactgatgcttcctcccttttttaatttaaaatggtttttataagc

SEQ ID NO: 360003 - DNA, 375 bp, Homo Sapiens
  misc_feature (1)..(1): n is a, c, g, or t
  misc_feature (7)..(7): n is a, c, g, or t
  misc_feature (10)..(10): n is a, c, g, or t
  misc_feature (50)..(50): n is a, c, g, or t
  misc_feature (214)..(214): n is a, c, g, or t
naaatcnccncaaatattttacagagttcactctttcatccacagagganacataccccccaggcttggaagaaggaaagaactgcatccagattgggctataggtacagttacttcctacagaaatgcgtctttcctatggcttcttaaaactaagaaaaatattcagttatgagaaaagaaaagaacttttatctgaggaacacaagtcctnttaattattgggcccagagaggtattaaaaaacaggcagcaattgttgcagaattttgctccttagttcagttgtaagtgggttcttttcacacaaccaggaaatttaggcacgcagacacattaaagggtgagtagagcaggattttattgggtgaaaag

SEQ ID NO: 360004 - DNA, 315 bp, Homo Sapiens
  misc_feature (10)..(10): n is a, c, g, or t
  misc_feature (307)..(307): n is a, c, g, or t
  misc_feature (309)..(309): n is a, c, g, or t
aatgcctggngtgcagctgaagctgagccactggtgtttcttcacagtatctctgtcgggagggtgtattattcctttttatagggatctctataatgaagtgagaatcttgaaaatataagtgttatcctagatgggaggtgttaaaggtttttgccttgggaattttgtcatatttgttgcacagcaaggaaggactttcagaaaagcagggatgtggtgaggaagagcaggcaatagagagcagggaggaaaggctaagtagcatctggacttgagaagtctaagggggccaaattgggttttntnttaaaa

SEQ ID NO: 360005 - DNA, 938 bp, Homo Sapiens
  misc_feature (48)..(86): n is a, c, g, or t
  misc_feature (198)..(199): n is a, c, g, or t
  misc_feature (201)..(202): n is a, c, g, or t
aggctggtacggtccggaattccgggatatcgtcgacccacgcgtcgnnnnnnnnnnnnnnnnnnnnnnnnnnnnnnnnnnnnnnntgagccactgtgcccaaccaggatccagtatcttaaaggcccatactgtaaaggtcagcctgcctaggaattctgccacatttacacacacccctggccaaagtaatatttnncnnttccatgtagaacaaattatgggcagaaagtaaagttagttttagaagtgctgtttgtggttggagaactgtaaaaatcttttaaagggataagggaattaggggcttttaatataaccactgcttcagcccgaaacacaaaatcactgttacatggaaaactggttattaggccagatttatattcatctctgcctagagtatttcatgtgtgtatgtgttgcttacgttgtctgtctccaaagtctctcatctcttttaatcactgcaaataaagcaatactgaaaacttgagagaatgcaccttaggggaaggggctatttcaagacagaaaacaaaggaaatacctgccttttgaataagatcccgcttttgagtcttacctatgactttaccagggtagattagaaatacacatcctcctgctgaccctctgccttcaatagctatctatcttaaaagctgaagtttgaactgcagcatctgcttgacaggtgccaggttccttcggcagggggacgatcactctatatatcttccgttgcctcagattcctgtggcccaaggatcccaccaatcctcgttcccctaaaatgctaacaaaatcctttatcggggtattaccaatataacagttaccctgtatgcatatttatgtgctcctttggtcaggtaatctttcatcatggttaagctgaattacgcataagttctccaattttccccaggtatcca

SEQ ID NO: 360006 - DNA, 457 bp, Homo Sapiens
gagttcatctcttctgtacgttttgtcaagtgcagtgaacagcaactacaaaatattttgtttttctgtctttttctttagtaaagggtagatgatctgcctttcaggttatctcaaggggcagtttcacctttccataatataaattacccttgtgtaagttatttcttccatcttctgatagcaatttcctgaatgcctgccagctaaccattaagccagtgttcagtattttagcattttaaaaaacaagggaccaatttctgtgtcagcatgggctagcttgccattgaataacaaaggcaaaatctcactgtctcacacaacttttctattgcaacttgcctagggactttggtttagatcataggttggccatgatcaaactatggtccatgggcaaaatctgtctagctccttatttatctaaataaagttttactggaatataaaaaaa

SEQ ID NO: 360007 - DNA, 485 bp, Homo Sapiens
  misc_feature (2)..(2): n is a, c, g, or t
  misc_feature (56)..(56): n is a, c, g, or t
  misc_feature (69)..(69): n is a, c, g, or t
  misc_feature (92)..(92): n is a, c, g, or t
cnccccccccatccccaaatcactattcagattcctaagggaacagtgatggtggnaagccttcctctnacagtcagtataccagcagtggntctgtgtcttcctcaggcagcaaaagccaccatagccattcttcctcctcttcctcatctgcttccacctcagggaagatgaaaagcagtaaatcagaaggttcatcaagttccaagttaagtagcagtatgtattctagccaggggtcttctggatctagccagtccaaaaattcatcccagtctggggggaagccaggctcctctcccataaccaagcatggactgagcagtggctctagcagcaccaagatgaaacctcaaggaaagccatcatcacttatgaatccttctttaagtaaaccaaacatatccccttcttcatttcaagggccacctgggaggcttcttgacaagctttgccttcttcccaatggaagcctgttcctgggg

SEQ ID NO: 360008 - DNA, 1152 bp, Homo Sapiens
gggttaagtagcagtatgtattctagccaggggtcttctggatctagccagtccaaaaattcatcccagtctgagtgggaagccaggctcctctcccataaccaagcatggacagagcagtggctctagcgagcaccagagatgagaacctcaaggacaagccaatcatcactatatgaagtccttgctttaatgtaaaccgaaacatatccccgttctcattcaaggccacctgggaggctctgacaagtcttgcctctccatatgaagcctgttcctggagactcctccatcctctaaagccaagtcccctatcagttcaggttctggtggttctcatatgtctggaactagttcaagctctggcatgaagtcatcttcagggttaggatcctcaggctcgttgtcccagaaaactcccccatcatctaattcctgtacggcatcttcctcctccttttcctcaagtggctcttccatgtcatccctctcagaaccagcatgggagttctaaaggaaaaatctccaagcagaaacaagaagccgtcccttgacagctgtcatagataaactgaagcatggggttgtcaccagtggccctgggggtgaagacccactggacggccagatgggggtgagcacaaattcttccagccatcctatgtcctccaaacataacatgtcaggaggagagtttcagggcaagcgtgagaaaagtgataaagacaaatcaaaggtttccacctccgggagttcagtggattcttctaagaagacctcagagtcaaaaaatgtggggagcacaggtgtggcaaaaattatcatcagtaagcatgatggaggctcccctagcattaaagccaaagtgactttgcagaaacctggggaaagtagtggagaagggcttaggcctcaaatggcttcttctaaaaactatggctctccactcatcagtggttccactccaaagcatgagcgtggctctcccagccatagtaagtcaccagcatataccccccagaatctggacagtgaaagtgagtcaggctcctccatagcagagaaatcttatcagaatagtcccagctcagacgatggtatccgaccacttccagaatacagcacagagaaacataagaagcacaaaaaaaa

SEQ ID NO: 360009 - DNA, 814 bp, Homo Sapiens
  misc_feature (87)..(128): n is a, c, g, or t
agcggagggggcggagcggcgccggagcgggcgtcatggcgcggctcctctggttgctccggggcctgaccctcggaactgcgcctnnnnnnnnnnnnnnnnnnnnnnnnnnnnnnnnnnnnnnnnnnaccgggccgggactgggggaggcagggtctcttgcaacgtgtgagctgcctcttgccaagagtgagtggcaaaagaaactaaccccggagcagttctacgtcacaagagaaaagggaacggaaccgcctttcagtgggatctacctgaataacaaggaagcaggaatgtatcattgcgtgtgctgcgacagtccactcttcagttctgagaaaaagtactgctctggcactgggtggccttcgttttccgaggctcatggtacgtctggctctgatgaaagccacacagggatcctgagacgtctggatacctcgttaggatcagctcgcacagaggttgtctgcaagcagtgtgaagctcatctaggtcacgtgtttcctgatggacctgggcccaatggtcagaggttttgcatcaacagtgtggctttgaagttcaaaccaaggaaacactgaccatcttcaagagtcccgttcccttgccaccccttcacgtgcaccctcaatttccacaattcacttgaatgacttgttttatttgcaataaaactgggctgaatttgctgctgtctccagcgagtcattgcttctcttaatttatttacctggaatcaacttaatcctgtgtgttaggctgttcttgtgttgctataaagaagtacctgatcaggatctgggagaatttg

SEQ ID NO: 360010 - DNA, 448 bp, Homo Sapiens
  misc_feature (5)..(5): n is a, c, g, or t
  misc_feature (277)..(277): n is a, c, g, or t
  misc_feature (433)..(433): n is a, c, g, or t
ccggncatccacatcacaaggagactattctctgctcagcatcccagaaacatatttcgggaaaggtatgtgttacaatattcacctatctggggactcaggactgcatgccttttagttccaagggactgatgtatttttccttgaatacatataaacaagactaactccttaggagaaaggactgccacctaccctgatgggagatgatggccagtgcaagcaagcagttttagggtctccagtcctcaagtctgcttatatgattaaatgtgtnactccagtcctgagacaagcttcctggttaaattcctatcaatatggggctacacaggaattttaatatgatgacaaatgtcaattccaatgtgcataatttgacactctactggctttgcatttatactgattgccacggtataaaaggaggggnaaatacaatctccag

SEQ ID NO: 360011 - DNA, 1138 bp, Homo Sapiens
  misc_feature (35)..(36): n is a, c, g, or t
atggaggtgggcagggaaggggagggctgtgcgtnnggggagaggatatatatgctggtgtggctgagaaagcggaaccgagcctcgcatccatcggagggagccggcgactgacagctctcagctaccgtgcttcctgctcctgcaccatgaaagtcctgctttgtgacctgctgctgctcagtctcttctccagtgtgttcagcagttgtcagagggactgtctcacatgccagggagaagctccacccagccctgggacagctttcgacctggaggtgtgcatcctcgagtgtgaagagaaggtcttccccagccccctctggactccatgcaccaaggtcatggccaggagctcttggcagctcagccctgccgccccagagcatgtggcggctgctctctaccagccgagagcttcggagatgcagcatctgcggcgaatgccccgagtccgcagcttgttcaaggacaagcaagagcccaagcctggcatgaagaaggctggtgagatggagcacaagcagctgcagaacagattcggggccttcaccgggccccgaaagtcgcccaggaagttggccaatcagaagcggttcagtgagtttatgaggcaatacttggtcctgagcatgcagtccagccagcgccggcgcaccctgcaccagaatggtaatgtgtagccggaaggggcgctcctcccagctgtaccggccactgcaacccatgagcgtccaggtgatcccccaaacagcatgtgctcagccccagacctgccgcctgggaatcaggattccttcttccccaaggcactgagcgcctgcagatcccgcaggcttcgtttgcctccagaaccttcccgtctgattgttcctccccagcccccgggcatgtttcaccacaaccctgttgctacatcagagtgtatttttgtaattcctctagctaccatttcaatagccccatctctcctgctcacccgcctcttgccccttctaggggcaggtgaaaggaataggaaattgaacctggggttttgacttgccactgccataacttgtttgtaaaagagctgttctttttgactgattgttttaaacaacgatttctccattaaacttctactgagcaaatggtt

SEQ ID NO: 360012 - DNA, 448 bp, Homo Sapiens
  misc_feature (71)..(114): n is a, c, g, or t
attgttttttaagattaatatatttcaggtatttaatacgaaatgtggaagggaatgctggagtaaaatannnnnnnnnnnnnnnnnnnnnnnnnnnnnnnnnnnnnnnnnnnnttcgcccgctcctgtggtttttctgagcgtgcgggcgccgggaggggatgctgaggctgatggagctgcctccagggctagggccactcaccggagggagggcggggcctgcacttgaagtcaggccgcacctgtctgtttttggaagggtagccgacaaatccttccagagggaaagttctttgtttaagtgttgtacttgaaaaggtcaatcttcagggcttcctgtttgaagtcaagtcagaggtaaaccggtcagttacagaagcaggatttctaggatttctaactccagctgttcccatactgtctagtttaaattatggctgttaag

SEQ ID NO: 360013 - DNA, 325 bp, Homo Sapiens
  misc_feature (17)..(17): n is a, c, g, or t
  misc_feature (34)..(34): n is a, c, g, or t
  misc_feature (74)..(74): n is a, c, g, or t
  misc_feature (138)..(179): n is a, c, g, or t
ctataagatgtacattntttcattgtaacatagnaattgtaaataattgattaaagtgctgcattttgatgaantttttctagccatttttaaagagaaaactaggaattgagtattttgtgtacggtatgtttccannnnnnnnnnnnnnnnnnnnnnnnnnnnnnnnnnnnnnnnnnacctatttaattttcatttgtcatgaggtttttggatttgccaatgatctgctggacatcatgccccatgtcatagagaataaagctgatgattgtaccagtcttaaattattcatgattcaataaaattgatgcttatttattca

SEQ ID NO: 360014 - DNA, 303 bp, Homo Sapiens
  misc_feature (19)..(19): n is a, c, g, or t
taggtattttttaaccttnccctgcccccaaactatgatattaagccgaaagatattatggcaaaactttaaaaaaagagattatgattacccaggcaaaacaatggctacctttagagaataaaaggtaactgtgactgggaagaggaatgcaaagagcttctgagatgctggcaatgctcccatgacatgggtgatagctaaacgtgtgttgatcttgtaagaactttgttaagttatatatttatatttatgtacttttctgtatgtgaggttatatgacactaaaaagtggtttaaaat

SEQ ID NO: 360015 - DNA, 2863 bp, Homo Sapiens
  misc_feature (794)..(794): n is a, c, g, or t
  misc_feature (940)..(950): n is a, c, g, or t
  misc_feature (2380)..(2490): n is a, c, g, or t
  misc_feature (2539)..(2548): n is a, c, g, or t
  misc_feature (2624)..(2632): n is a, c, g, or t
agcggagggggccgcgcggcatcctggggattgcagtctcccgagcgttctattgtgtccctgcctacaattttagggaacctaataaaagggtggtcggtatgtttttatttgggtgtgtacttttgttaggtcgctttttcgctatgcattaagtacggactttaggactcaactagtaccaggaagaaaaagaccggacattttcacctgtttgttatacagcgaaggggaaaaattgggaagaaatcctcaagctacaagaaaaataaccagaagctttacactttagcctgcagtgacttatatcctggtgtcctaagtccacctaagtcagttttgcaataagaggtcccaagtttggttttcttggagcttgcatcagttggttgcatcatccctgagtagaagatttgcggttgcaaggaaaaataaggtacagagcttctccagcgggaaagtgcatgtctgcacggcacgagcccacgcaccgcagaacaggcttgccaggtctcctcagagaccctcgcaggaacctaacaatgaaaatccagttgtccagtcttgatttgtggaggggtaaggagaatccgaggccagtgggcaatccgcccactgttgggagcgactgacctcacgaatcaataatttgcttttgactaggaagtgcagcggttcttggggggaggggctggactgggtggcggacgcgaggagcaacggttctcccgaacctctcccccgccccgactatcttggcctacatattcccgctccgtcccgggacctggacnacccagaatccacgaaaagcaactcgcgctcgagaacagctctcgtacccttctacgtgatctgcacctttaagctcactccatcccaaaccggaccccggaggcaccacccacatccgtctaacatcacttccttcagagtttgnnnnnnnnnnntctgggaagtagaggtgttgtgctgagcggcgctcggcgaactgtgtggaccgtctgctgggactccggccctgcgtccgctcagccccgtggccccgcgcacctactgccatggagacgcggcctcgtctcggggccacctgtttgctgggcttcagtttcctgctcctcgtcatctcttctgatggacataatgggcttggaaagggttttggagatcatattcattggaggacactggaagatgggaagaaagaagcagctgccagtggactgcccctgatggtgattattcataaatcctggtgtggagcttgcaaagctctaaagcccaaatttgcagaatctacggaaatttcagaactctcccataattttgttatggtaaatcttgaggatgaagaggaacccaaagatgaagatttcagccctgacgggggttatattccacgaatcctttttctggatcccagtggcaaggtgcatcctgaaatcatcaatgagaatggaaaccccagctacaagtatttttatgtcagtgccgagcaagttgttcaggggatgaaggaagctcaggaaaggctgacgggtgatgccttcagaaagaaacatcttgaagatgaattgtaacatgaatgtgccccttctttcatcagagttagtgttctggaaggaaagcagcagggaagggaatattgaggaatcatctagaacaattaagccgaccaggaaacctcattcctacctacactggaaggagcgctctcactgtggaagagttctgctaacagaagctggtctgcatgtttgtggatccagcggagagtggcagactttcttctccttttccctctcacctaaatgtcaacttgtcattgaatgtaaagaatgaaaccttctgacacaaaacttgagccacttggatgtttactcctcgcacttaagtatttgagtcttttcccatttcctcccactttactcaccttagtggtgaaaggagactagtagcatcttttctacaacgttaaaattgcagaagtagcttatcattaaaaaacaacaacaacaacaataacaataaatcctaagtgtaaatcagttattctaccccctaccaaggatatcagcctgttttttcccttttttctcctgggaataattgtgggcttcttcccaaatttctacagcctctttcctcttctcatgcttgagcttccctgtttgcacgcatgcgtgtgcaggactggctgtgtgcttggactcggctccaggtggaagcatgctttcccttgttactgttggagaaactcaaaccttcaagccctaggtgtagccattttgtcaagtcatcaactgtatttttgtactggcattaacaaaaaaagagataaaatattgtaccattaaactttaataaaactttaaaaggnnnnnnnnnnnnnnnnnnnnnnnnnnnnnnnnnnnnnnnnnnnnnnnnnnnnnnnnnnnnnnnnnnnnnnnnnnnnnnnnnnnnnnnnnnnnnnnnnnnnnnnnnnnnnnnccctggccgccccccccgcccccaaaaaatttttaaaaacctttttttnnnnnnnnnnccccaaaaggaaaggaaactgggccaaggtggttccaaaaaaaaccgggacaagaacaaggggtgggatccccacnnnnnnnnncccccggggggaaccggggggtttgaaaaaatccgaaagggattctgggggtctttttgggtattttcaaaagggatcccaaggggactcaaattaaattaaccccccgcccggcccctatccgaagaaggggggaaatacataacccttccggggaacggggaaaccctcccaaacggggttggtaaaaccgaaatcgccgggcggaagcgagacctggggcgccttggg

SEQ ID NO: 360016 - DNA, 445 bp, Homo Sapiens
  misc_feature (231)..(231): n is a, c, g, or t
  misc_feature (351)..(353): n is a, c, g, or t
  misc_feature (444)..(444): n is a, c, g, or t
gaagtatcctgtgaagagcatcgtgatgccaccgaatccactcttccttatggtggtgttgcacctgatccagcctttttgtacagctcccaagagcctcattagagagaagttggaggttgtaagtccggtagggggttccaaactccttatatgagttgagcttcgttccaacaaagaaacttgcgagagtctttccccctggggactgataagttgtggcttctgggncattgcattccaacactgaggcttccctggcaacacccctagtccaaggtaaccaggatagagctctggaaaccactccagccccatgcagctgcgaagagtcttcctgccagcagctgnnncatgattggtgaaggggctctgaggagtgtgacgctgggctgaacataaagggctctggcacccagtgtgtgatgcttggaagtgactatna

SEQ ID NO: 360017 - DNA, 231 bp, Homo Sapiens
ggttccacagggcaattcagtgggcaacacagggtcacgaaggcactagagagaagtcacgaaggcttctcctacttaaacgtgcttcctaatccaaacatgttttagagcggcaatccccagtcgtcttcgccacaccaatgcatggaggtactgtgctcttccagggcaggggtcggcacaattttttcagacgtctgaaactccagctacaacacaggacgaagtatc

SEQ ID NO: 360018 - DNA, 810 bp, Homo Sapiens
  misc_feature (475)..(498): n is a, c, g, or t
gagtgtgtctgtcctagattccccgactcctcccactgttattttaagctgagcttctctctcccaaggtttccctgtaataatgtcagctgctgttcacaggatgtgatggtggtaggagagccaactctgatgggaggtgagtttggggacgacggacgaaaggctaatcactaggattagaaaacacgcaatatgatgcggccaatcggcatggacgacgaggaggacttcaacaattcacccgcgctggggaacaacagcccgtggaacagtaaacctcccgccactcaagagaccaaatcagaaaaccccccaccccaggcttcccaataagatgatcggcaccagaatccactgtcaataggcccgtgggtgatcattacaattgcaaatctttacttacaggagaggaaacagaagagataaaaacttttccatgcaaatatctatttctaaaccacaatgatctgannnnnnnnnnnnnnnnnnnnnnnntaattgagaggattattcccaataagcttccatgaccctttcttggaggccttcacaggtaatacagatactggcactgattgtaattaaaatgagagaaaactctagcgcatcttctggcacggttttaacaacgtgtttgtgttgaatttcctttttatgcatcaaacgaaggccatattgtccataaatgctcagtgctcaggatctcattaatatgccgaacctaactacagatgactttttaatattgtaaaaatattttctgctttttgacttgcatctgagagtttcttgattcagtaaaaaaaa

SEQ ID NO: 360019 - DNA, 394 bp, Homo Sapiens
tcttgagctgccagttaagtgtttggagtgcaagtgatttgcttcattttgcatacaactcactggctagaaccaatcacatggccccactcactcacaaatcagtaagccaggaagtgtccacagcagcagagagctggaaacatttggtgatctgctgtggtgtgtactatggcaggaagtcttctccacttgaagatgggggacctgaggctaagagagtttaaataacgatcaagaacattcagcttgcaggtgacttgggctcaaactcaggcctatctgggtctaggacccaggtgtttaactgctaagctataggtttttcatctcttaattaattgtaaaatcagtttcttcccttcagtgaaaactctcagcttagaaagaaaat

SEQ ID NO: 360020 - DNA, 468 bp, Homo Sapiens
catttctctgggatgtatattcctagggagaatggctggattatacagtaactctttcctcataactttgcatatcaaaattatatccatctttcagaacccaaattcagtgttatttccaaagtgttccaacatctcccactcaaaatgaatcttctccctagtactcccattgtttagtacctaattgttcttaccagtttgtcttagagctcagtcattcctacacagcacttttcttcattatactgctaatttcattacactgtaagagtggggacaagctgttcttcttgtataccagaaagtagtgagtgcactgctgtgaagaaagcaggaactcaaaagttaagaattttgaatgagcctataaaatgtgtctaataaataataatgttcattttcaaatctcaacaattaaatgtttaacaaataacacttgaaataaatgtttattagaaaaaccaa

SEQ ID NO: 360021 - DNA, 304 bp, Homo Sapiens
  misc_feature (80)..(88): n is a, c, g, or t
aatactattattattaaatcccagaatgacgggattacaagaaaatgcacacgtaacaaaagcagccttaaaaagctaannnnnnnnncagggccagagcaacaggaaagagatagacccattattcaagacagatgatgtaatgtgaataaaagagtgaacattttcaagtgtcttttctcctaatattcttctattttctttagaagagagaataatcttcaacctggaaaggataataaacatgattatggggaaatcgggatctaagacagatgatgcagcactcaaggagaacccttcc

SEQ ID NO: 360022 - DNA, 570 bp, Homo Sapiens
  misc_feature (52)..(68): n is a, c, g, or t
aagctggtacgggcgggatgtaaggatgcaacagaggaagacctgtctcatnnnnnnnnnnnnnnnnngaaataagaaaaagaaagcggatacacccccgggtattaagataattgagatcattcctgtaaacacagcggagtagcagcatctagtataataggcacgcaataaatacgagctattatggctgaggcaaggcatatgggggctcttattactccatcctctggtgtagcctaagtttggcagctgtgtagggaagaccgcctcatactaatgaagcacactgggctggggatcatttcagacctgcagatctctttggcatgaaatgcaatgggggccggggctccctcttctgcatttgtgcacctgcattttaagaacataatgaatgatgggcattggtctctttgcattctcatctaggcttgggcccatcatcctaacctgtgggctacatttggaatttcgggattgggtaatggaatgcttcagatctccctccaagcttggcttcctataaattggatacccatgactcataggtcatcatctgagtcatga

SEQ ID NO: 360023 - DNA, 1035 bp, Homo Sapiens
cctggttataagaggcaatatataacggtctaaggtacgaggctgggtgggaattcggcacgagggtccccacgccaggatggatgaggcctgggagcagaagcctgtgcacctggccctgtgcatgggcacatgctggagccgcccgtgggccccgcatcctgccacagccacagggcaccccggtgtccaccaccgtcgccaaggccatggcccgggaggccgcgcagagggtggcgagagcagcaggttagagaaaaggagcgtcttcctagagagaagcagcgcggggcagtacgccgcctcagacgaggaggacgcctatgactctccagacttcaagaggaggggcgcctcggtggacgacttcctgaaaggctctgaacttggcaagcagggaaactgaggcccacagaattgagaattttgtccatgattacgcagatggtctcctaacagagctggaattagattgaaccgaggcctgaagaagacctgtttccacgcctttccccatgtgccacgttctcctcacctatccaggagtgaatcatcaccttccctgcaatctgctcaggttacaaacccggaggaaaggctggagcacttgttctctgggtgaaggacccatacccccactggtttttgagatcggcattcagcgctgtcttatggagcacagcccggtggcccagagccttgacatgtggcactggggctgagtgtgactgaggcctgaattttacttctataaattagttcagataagttacatcctaattagttacatgttaacagcaccgtgtgtggcacagtgtgacgcagttggtgacaaactgtaagagatgacttcttgagagcgtgaccgggcgaccggtggttcggggctcctcttgtgatggagagtttgcagttttacggtctgtttggttccggacggttgttaatagggttggagttgttcaatacttgttacaggcttggagttggcgatatgatatgtacaaggaggagcaatagaatattaaataagag

SEQ ID NO: 360024 - DNA, 1312 bp, Homo Sapiens
  misc_feature (178)..(214): n is a, c, g, or t
aaaacctactggaatttggtttttaggagtttggtaattagattatctcttttgttattttcattcagttatattctttggctcagctagctttgaaattggctgatgaaaaaatatacataaaagggtaaaattcacacatacagcaaacaaaaatgcacaaagcctgcttcgtaannnnnnnnnnnnnnnnnnnnnnnnnnnnnnnnnnnnnctgccaaaacaataatcaaagaactcttgctttaacctattcctgtacaaagactgtttttgaccagataatcatctgttgtggcattctatcttgtaggacactgtatattgcaaattgctgattatggaaggggccagttgctgttttttcatgcagtgccctgggagtcttaaaagcagtgcttagcaacattggtgatagcatgtggctgggacccagggcccttccccactcttcagccccgagtcatgtgtctgaggtgacggactgagacgcatctggtcctgtaattcagagagtgggcacatcaccaaagaactgcattgctgtggtcactgtttcttcaagtacacactgactctgctactttaggataaatatattttactcagaactctgaatttcacagtatacttactaaactaagtaaaaaggatactttaaaatacttattttactttctagacctaggctagatgttttaagctacagctctagttcattgtgatatttataatttgaaagctatgagaatagatgtgtgggtgaagccatagaacatatttgcttgaaattcttgagcagggatcttataaagggccagaaataagatgtgtggttcacatagatagtgagcgtaacatctgtatttaaacataggagagaagtttataaagggcattggcaataaactctttgttgcagctgttttccaagcagtgtaaatactttttcctgtgattatgtatagccttggaatggcaccttttaactaacccatatgtgtttggtttcaatggtttttctatattcagatgtatatattggtgctcacttttaggatcagcagtgtttgaccattttattgctgcatagctgtatatatagccttattagtttgtgtggttgacccttggggttatacacaaatggtcagtctgaaatgggtgtcttactcccttttggttataagtgaatgattgtgcctgtttggtatgtcataatatggtcgtcccataaacgggatggagcggaaaaacttacttagcataattatggaccaaacaattactgccctaaacagttcctgttccc

SEQ ID NO: 360025 - DNA, 773 bp, Homo Sapiens
  misc_feature (59)..(59): n is a, c, g, or t
  misc_feature (759)..(759): n is a, c, g, or t
tttaaatttgtttttatttttacagagacaggagactcaccgtgcttgcccaggctggnctcgaactcctgggctcaagctatcctcccaccttggcctttcaaagtgttgggattacaggcgtgagccaccatgcccagccttggtttacttttaaactcagagactgtatctcagaaacactataatcaccaaaaaattttaaaaacacaatagaggtgatcttctacagcaggaatttatattaagcttatttcagttggcaaataaatcagattttactaatgatgtttaagaatagcgatattggttcagtcagcttgaaatgtaaagtatccaaataatcaaatcgatcacctatcctgatatgactactcattcatattcttctgctgtgcagaagccaattacccaaaaccatgccagggaatttatgtgctcagtcagtctcggaagtgatttccacagttcttaaccaacctgtcagctattagggttgaaaatcatatcatactgccatagaagcaccggctagaaataaatcaggaatcatttgcccttaattaacatgccaggttcaaaccaactttatttatttacactctcctctcccagtgagtgctctagttgccactttatccaactttcaaaaatatctcagagaggatttgagatttctattttgctagagagacatgcttggtcagattcaacatttaccaactctctttcatggagggaatttgctgggctcttttncttgcaatttctaa

SEQ ID NO: 360026 - DNA, 1050 bp, Homo Sapiens
atgacattacttttgtctctacttttcttcaaatagagattaagactcagtaaaaatgtactttattaacactgatgccatgaaaacttctttttaaaaatgaggtatttggcttactgtcccaaacagtagaggtttgggcaaactgcagaaatggtctagtaagtaagaaaatgaaagtgaatacactgaaacataaaacagaagcaggatttgacaatatgctgctctgacaccctgagaatctttactgcaggcaaaataaatccaccaccttttatctctaaaagcaaaacccagcatgatttcttcctagggcatacatttctattcagaaaagaccacaagaaataaagaggtgagttaatatgagaaaggtaaagacaactaagatcatttctttttgcccctttccccaccccaatataatactcattaaggggccactatttcccttgctttcaaattatcttagaaaatatttagaattacacaacagcagcatttacaagtgaatttatatagaactgttgtcaaggctcaaaatatcaggagagctcttgaaaaaaaccagttgaggtattttcacataaaaaactgaacaatcaggttagccacgcccaaaatgatgaggaaaacgtggaagattaatttaggccatgtcagacgctcttcttggtggagggaaattatatagatgagagatgggtatatgaatacaaaggccagtccacatgctgctcctgaatatcttatgatccctcctatgtttgggtagaaacaggccatgatcactccagctcccacaataattagattaagaatcagcacatggaaaatgctaggataaatgtcaccgaagatatggcccaaaagctggacacgagccaggtagcctaagagtgggtatacagtcatcatctggaacagcaggaatatccttgcaatgaaggacagggtgtcactgctagggaagttgtctaaaaaattctgctcaatacaatctttggataatggtggtgaaggaaatgaagcaaaaaccaggactcc

SEQ ID NO: 360027 - DNA, 404 bp, Homo Sapiens
  misc_feature (365)..(365): n is a, c, g, or t
  misc_feature (373)..(373): n is a, c, g, or t
  misc_feature (387)..(387): n is a, c, g, or t
agccactgggctcagccctggagctgagagcatcgctggagatagacgtggcagagaagaggttgcgagcatggccccagccagcagctcccacgctgcccctagtcctgggcatggagcgagccttggtgtcagagaccagggtgtgcagtctgagctcctctaccttactaaagagaggcctcttttatttaccagagccacagccctgctgcctcaggaccttttcattctgccggtgctggggctgtctatctgcaagctggaggtgtcgagagcaggaaaaggaggctgtgaggaagggttcgggcagctcctcctgctctcagaggtggctcctcctccaggcatggaggtctgtccantactgggnttctggggtatttnccctgatttgtccctgg

SEQ ID NO: 360028 - DNA, 773 bp, Homo Sapiens
  misc_feature (47)..(47): n is a, c, g, or t
  misc_feature (65)..(65): n is a, c, g, or t
  misc_feature (96)..(131): n is a, c, g, or t
ggtgggctaaaagagggcttaggtttggaaaagggtgtccttctgtncccttgttaatttatttnatagtgatttggttcaaagatgtttacaggnnnnnnnnnnnnnnnnnnnnnnnnnnnnnnnnnnnnccctagagaaaagtacagatttccagtggatatttcaagcacagttctgctgctgtggcttcagctttggaagctgtcaatcccggagcaactttcccaactacccaaccccaccatggccaggacatgtgcaatgccagccccttcttgtcttggcacatgcacagacccagtcccctcacggtagggcacccctgacctacgggcttccaagagagcagctgcagtggttgggaggagcttgaccagtgtgccccaaggagtggagtggagcccaatctaagtattccttgctgcttggaaccctccctgtttggaaccctccccaaagaggcagtcaggctgatgctcagtgctttgtgctccctgctccttcccgcgtagccaggtgggcccaagggtgcctggcagggagcactacccctggacccctcctgctcgctctggggaccctgccagggaaggccactgggtgttcacctgcaaagtttctggttgtcactgcacagtggtcgcgtcatccatgggtattaaaaggacactgtcaagtacttttttaaactagtttttagggttttttaaaactctctgttgtttgtaatattctcttaaaagcttgaaaataaaacttctttcccttac

SEQ ID NO: 360029 - DNA, 1808 bp, Homo Sapiens
  misc_feature (1803)..(1803): n is a, c, g, or t
tttccgggatggaagaacccgcagcagctcccaggatgaactggttgcagtggctgctgctgctgcgggggcgctgagaggacacgagctctatgcctttccggctgctcatcccgctcggcctcctgtgcgcgctgctgcctcagcaccatggtgcgccaggtcccgacggctccgcgccagatcccgcccactacagggagcgagtcaaggccatgttctaccacgcctacgacagctacctggagaatgcctttcccttcgatgagctgcgacctctcacctgtgacgggcacgacacctggggcagtttttctctgactctaattgatgcactggacaccttgctgattttggggaatgtctcagaattccaaagagtggttgaagtgctccaggacagcgtggactttgatattgatgtgaacgcctctgtgtttgaaacaaacattcgagtggtaggaggactcctgtctgctcatctgctctccaagaaggctggggtggaagtagaggctggatggccctgttccgggcctctcctgagaatggctgaggaggcggcccgaaaactcctcccagcctttcagacccccactggcatgccatatggaacagtgaacttacttcatggcgtgaacccaggagagacccctgtcacctgtacggcagggattgggaccttcattgttgaatttgccaccctgagcagcctcactggtgacccggtgttcgaagatgtggccagagtggctttgatgcgcctctgggagagccggtcagatatcgggctggtcggcaaccacattgatgtgctcactggcaagtgggtggcccaggacgcaggcatcggggctggcgtggactcctactttgagtacttggtgaaaggagccatcctgcttcaggataagaagctcatggccatgttcctagagtataacaaagccatccggaactacacccgcttcgatgactggtacctgtgggttcagatgtacaaggggactgtgtccatgccagtcttccagtccttggaggcctactggcctggtcttcagagcctcattggagacattgacaatgccatgaggaccttcctcaactactacactgtatggaagcagtttggggggctcccggaattctacaacattcctcagggatacacaggggagaagcgagagggctacccacttcggccagaacttattgaaagcgcaatgtacctctaccgtgccacgggggatcccaccctcctagaactcggaagagatgctgtggaatccattgaaaaaatcagcaaggtggagtgcggatttgcaacaatcaaagatctgcgagaccacaagctggacaaccgcatggagtcgttcttcctggccgagactgtgaaatacctctacctcctgtttgacccaaccaacttcatccacaacaatgggtccaccttcgacgcggtgatcaccccctatggggagtgcatcctgggggctggggggtacatcttcaacacagaagctcaccccatcgaccctgccgccctgcactgctgccagaggctgaaggaagagcagtgggaggtggaggacttgatgagggaattctactctctcaaacggagcaggtcgaaatttcagaaaaacactgttagttcggggccatgggaacctccagcaaggccaggaacactcttctcaccagaaaaccatgaccaggcaaagggagaggaagcctgccaaacagaaggtcccacttctcagctgccccagtcagcccttcacctccaagttggcattactnggaca

SEQ ID NO: 360030 - DNA, 400 bp, Homo Sapiens
  misc_feature (14)..(14): n is a, c, g, or t
  misc_feature (20)..(20): n is a, c, g, or t
  misc_feature (25)..(25): n is a, c, g, or t
  misc_feature (40)..(40): n is a, c, g, or t
  misc_feature (42)..(42): n is a, c, g, or t
  misc_feature (61)..(61): n is a, c, g, or t
  misc_feature (117)..(117): n is a, c, g, or t
  misc_feature (143)..(143): n is a, c, g, or t
  misc_feature (147)..(147): n is a, c, g, or t
  misc_feature (160)..(160): n is a, c, g, or t
  misc_feature (168)..(168): n is a, c, g, or t
  misc_feature (202)..(202): n is a, c, g, or t
  misc_feature (233)..(233): n is a, c, g, or t
  misc_feature (244)..(244): n is a, c, g, or t
  misc_feature (248)..(249): n is a, c, g, or t
  misc_feature (259)..(259): n is a, c, g, or t
  misc_feature (271)..(271): n is a, c, g, or t
  misc_feature (395)..(395): n is a, c, g, or t
  misc_feature (398)..(398): n is a, c, g, or t
ctcagtacatcatngtgcanttacntctattttcctcagngncctgctcctagggaactgngacctaagcacaattagatcgctaagataaagctcaacaggacatatcaataagcncaacttgatagagcctgcttctctgnagcnccagcacctctgnccatcagntgctgctgggctgctgccaatgtacatgtagggngcagtcttctgctccccattcaagcttaccntgtagctcggnagtnnaaacataagngctgctgtacantgtaagttcccatcataatgctagctctagataccaaattgacaagtggtaaaatttgaggtcagaaaacaggagtgttttcctcagagatctccataattgaaagaaagtatcaaaatgcttnttntt

SEQ ID NO: 360031 - DNA, 667 bp, Homo Sapiens
  misc_feature (33)..(33): n is a, c, g, or t
  misc_feature (42)..(42): n is a, c, g, or t
  misc_feature (50)..(50): n is a, c, g, or t
  misc_feature (58)..(58): n is a, c, g, or t
  misc_feature (119)..(119): n is a, c, g, or t
  misc_feature (128)..(128): n is a, c, g, or t
  misc_feature (380)..(380): n is a, c, g, or t
  misc_feature (497)..(497): n is a, c, g, or t
  misc_feature (505)..(505): n is a, c, g, or t
acattccaaggtaaatttcacggggttaccccngagcttaantccttgcnctgaatgncatggcaacaccattcgccgtcatatgaatacctccaaccaaactgccaaaattccacccntaaaatatngcaaatgtatgtatgagcaaactaatgctaaaaatgtctaattttcttggctagtctttcaaggaccagattcatgagtgttatttgaagggaaaaagtgaaatacttggaattattttgagtgatgtgctcctgagcttgttcttaaaatctaccagtggtagcttttggaaagaatgtgtttcataccgatgtgcaggcctcactggaagagcttcaagaggagtttgtgaaactcaaagtctaatggtntttgattagaaacttccaggcaaatactccagagaaacttgggtgtaaaatgactaaacagatgaaaaggctttatccactattccatttgctccttacaccttaaaaagctttttnatttttcnatgttttgatatatctagctttggggagaaagcagtgcaagagtgttattaaaagcagcttgtgttttcttgcacctttcacaccacccaggaaagaaaagttcaggcttaacagtgacatggctatcacatcatctgaataaattttttccttctaaaatt

SEQ ID NO: 360032 - DNA, 794 bp, Homo Sapiens
gcaagccggggagcggtactctgtctagctgccggctgtctctgcagcccccaggcccccttctgttcgcagcgtgccctggacttcagggagagcagggaagctgagccccacccgctgtgggagtacccatgccgcagcctctccgagccctggcagatcctgacctttgacttccagcagccggtgcccctgcagcccctgtgtgccgagggcactgtggagctcagaaggcccgggcagagccacgcagcggtgctatggatggagtaccacctgaccccggagtgcacgctcagcactggcctcctggagcctgcagaccccgaggggggctgctgctggaacccccactgcaagcaggccgtctacttcttcagccctgccccagatcccagagcactgctgggtggcccacggactgtcagctatgcagtggagtttcaccccgacacaggcgacatcatcatggagttcaggcatgcagataccccagactgaccactcttgagcaataaagtggcctgagggctggggttctgagtggctcatggcctttctaggggggaaggctgaaggccctcctctcctctctgggagctgctcggcctcagggcatgggaaagactgcgccgtgttgcatcttgttgcatctttgcactgctggcctctggctccagctgtggcaggaagcatgagagggtgactgaatttggagcctggaggggctgggaagacccccctgcttgtgcttctgaggtgctgagaatgctccacaagaggacatttctcct

SEQ ID NO: 360033 - DNA, 474 bp, Homo Sapiens
tgtgaggtcctatcagtactgagaggccatgccatggtcctgggattgactgagatgctccggagctgcctgctctatgccctgagaccccactgctgtcattgtcacaggatgccattctccatccgagggcacctgtgacctgcactcacaatatctgctatgctgtagtgctaggattgattatgtgttctccaaagatgctgctcccaagggctgccaagtgtttgccagggaacggtagatttattccccaactcttaactgaaaatgtgttagacaagccacaaagttaaaattaaactggattcatgatgatgtaggattgttacaagcccctgatctgtctcaccacacatcccttcaacccacacggtctgcaaccaaactctaattcaacctgccagaaggaatgttagaggaagtctttgtcagcccttatagctatcatgtgaataaagttaagtcaacttc

SEQ ID NO: 360034 - DNA, 756 bp, Homo Sapiens
  misc_feature (16)..(16): n is a, c, g, or t
  misc_feature (64)..(64): n is a, c, g, or t
  misc_feature (124)..(126): n is a, c, g, or t
  misc_feature (128)..(129): n is a, c, g, or t
  misc_feature (746)..(746): n is a, c, g, or t
gttgaagcctcctggnatgtttgagtcaagggaattgctttccagatgctaagaagcagcagtngggcttttgaattttatgattatctggcagtgaaagctgggcttttgccttaataatttnnnanngtatgaattgttttgttttgttttcctcaattgaggaagctgatgttattaattcacaggctaaattcggtaaacaccactgcccctaccacgggtaatgagaggtcactcacttgaactttgccattccaggcattctcagagtggcgaggggccacctgcaagtggagcacaacttggtgctcttactgtgtccttcagaaagaataggtgtacagaaaggaaatggcaatcttatgtgtgctgaacaaagttttcaacaattcctagttgtgccttttaaaccatgcaatattcaggatagtttgaatcaaagaagtaagaagctgctatttgggtaacttatttctctgtgggaaggggcagggagagtcaccaaacaatctacctccaactctcttctcttttgtctagagacattacaaagtgcacttgaggctgcccccaacctctgacatttgttcttgcatgtgatgatagaaagtcttcagatggacttatacattctgtgctttggaagcacaagaagaacaaaatatgtgtatatttcctttaatgtttatacaaaagtttatatggagcagtattgttatgtttgtatgaaatttgcaaaattnaagtgtacaa

SEQ ID NO: 360035 - DNA, 326 bp, Homo Sapiens
  misc_feature (21)..(21): n is a, c, g, or t
  misc_feature (27)..(27): n is a, c, g, or t
  misc_feature (29)..(30): n is a, c, g, or t
  misc_feature (32)..(32): n is a, c, g, or t
ccgtaaatgtctctagacatngccaantnntncccttgggtcaaaactgcaactggttcggaaccactggcctactgggtgaggaggggatggggaatcggtggtagtgaggactgcaaagcacattcctgcctgtcatcctcccagccaccctggggctggatgggattagagaggctgcttgcagcattgcttgctgaaacttgctgagaagtctcttaactgagctggccattgatgagatgtctcaggggaatccattccagggcccctccactgggtcggggactgttggcattttgttctgacacctccagttcttaaat

SEQ ID NO: 360036 - DNA, 1473 bp, Homo Sapiens
tagaacagcctggtcaggagcgtaacggagtggtgcgccaacgtgagaggaaacccgtgcgcggctgcgctttcctgtccccaagccgttctagacgcgggaaaaatgctttctgaaagcagctcctttttgaagggtgtgatgcttggaagcattttctgtgctttgatcactatgctaggacacattaggattggtcatggaaatagaatgcaccaccatgagcatcatcacctacaagctcctaacaaagaagatatcttgaaaatttcagaggatgagcgcatggagctcagtaagagctttcgagtatactgtattatccttgtaaaacccaaagatgtgagtctttgggctgcagtaaaggagacttggaccaaacactgtgacaaagcagagttcttcagttctgaaaatgttaaagtgtttgagtcaattaatatggacacaaatgacatgtggttaatgatgagaaaagcttacaaatacgcctttgataagtatagagaccaatacaactggttcttccttgcacgccccactacgtttgctatcattgaaaacctaaagtattttttgttaaaaaaggatccatcacagcctttctatctaggccacactataaaatctggagaccttgaatatgtgggtatggaaggaggaattgtcttaagtgtagaatcaatgaaaagacttaacagccttctcaatatcccagaaaagtgtcctgaacagggagggatgatttggaagatatctgaagataaacagctagcagtttgcctgaaatatgctggagtatttgcagaaaatgcagaagatgctgatggaaaagatgtatttaataccaaatctgttggggctttctattaaagaggcaatgacttatcaccccaaccaggtagtagaaggctgttgttcagatatggctgttacttttaatggactgactccaaatcagatgcatgtgatgatgtatggggtataccgccttagggcatttgggcatattttcaatgatgcattggttttcttacctccaaatggttctgacaatgactgagaagtggtagaaaagcgtgaatatgatctttgtataggacgtgtgttgtcattatttgtagtagtaactacatatccaatacagctgtatgtttctttttcttttctaatttggtggcactggtataaccacacattaaagtcagtagtacatttttaaatgagggtggttttttctttaaaacacatgaacattgtaaatgtgttggaaagaagtgttttaagaataataattttgcaaataaactattaataaatattatatgtgataaattctaaattatgaacattagaaatctgtggggcacatattttggctgattggttaaaaaattttaacaggtctttagcgttctaagatatgcaaatgatatctctagttgtgaatctgtgattaacagtaaaactttt

SEQ ID NO: 360037 - DNA, 669 bp, Homo Sapiens
  misc_feature (364)..(364): n is a, c, g, or t
  misc_feature (458)..(458): n is a, c, g, or t
  misc_feature (481)..(481): n is a, c, g, or t
  misc_feature (502)..(502): n is a, c, g, or t
  misc_feature (530)..(530): n is a, c, g, or t
  misc_feature (542)..(542): n is a, c, g, or t
  misc_feature (613)..(613): n is a, c, g, or t
ttacaaataaatggggttattagacccaagagcagggtcagaaggagaaacagcaaaaacggggagtaagtgcccaggctcctgccccaaaccccttgaggaaaagagaaacaggtgttgggcaggaagaacagcaccaacagggaggagagagaggggattgggtcccggctctaccacggaccagtcactttccccaggactcagttttgtcacctgtataatgggggaagcacaatccttgcctgactccttccaagagcctcaattaggcttcggtgagagagtgggtatggaagagctttgcaaactgtaaagtgcagtacacacattgcaggctagctgtggccctggggcccaggcnccagcggggctctgcggagtgggtacagtaagtgttggcaatgaaaacactgcttgaggctgagcctggccctttgagcaccctcaggtcctcnacatctgttcctcctctcaggtncccaccaatttccctggcacnttttaccctgggtggcctgagccctggnaagactgaggcnctcctggcctgggctggccccgcctcccactctgaaccctctggtcacctctgctcctgatgatgatgaanaaatgcagacctggtggtggggagcagccgtgccctgcaccctcttttccctagtc

SEQ ID NO: 360038 - DNA, 877 bp, Homo Sapiens
tcccatgcccagccagattctcatgggaagccctctcccttcttttctgcctaacaccatctcatcgtttctggcctcactgtggacaatccacacacattcttctttcctctcctggcggggcacagagccacccccttgccttttcttttcttgaaggttctagttcagctcctgattcatcagacccttctagccccctgcatctagcagtgaagcatgaagcctggtggggatgtggtactcccatctggtgtggccaccagctctgccaatgttcctgtagccttggaaaacttgctctctcggttcttttgggtgctgtgtactccccagcttccccccttcaccccccattttgcacctgggtttagtgaaaggatggcatttggttgacccatatagaaacccagaatgaggtctcagggccaggaggcctggtatttgtaggccagggaaggggaagaggcaagtggtctggggtatcaccagccagccctctctgatttggcctctactccccataagtcacagtaccataagcaggcttctggcctcagcaatttggtctttgtgcccaagtttattgtgagaatttcctgaaaactctataaaaggtctcttcctactgtaggcctctaatgtttctcccctttttgcttcagtccactcttcagtcttgtaggcctagttttcaaacctgcacatgtgtcctacctggccacaggcatgcaggcctcaggcagctgggccagtttgggagcctcgggtgatgtctgcacgatctggggctgccctctgcacccctgctgggggcttcagggttgggagaaagcctggggaccaacccgggtggagatcccacagttctctggga

SEQ ID NO: 360039 - DNA, 288 bp, Homo Sapiens
  misc_feature (2)..(2): n is a, c, g, or t
  misc_feature (34)..(34): n is a, c, g, or t
cntacagatataaaggagtagtttaactacatgntcatactgtttcaggaataaggagattctggaaaccaacccaagtaaatacacaagtccaaagcaggttgagtttatttttcctacctctgaggaactagaggcattttaagagagcatttacctctttaataatacacaagaaagtacagaatcagaggctacaagaaaatgatgagttgatatgagtgtctgacatcagtcaccctaattgttatttttattaccctgttttatttattttgatgatacaat

SEQ ID NO: 360040 - DNA, 2413 bp, Homo Sapiens
  misc_feature (219)..(265): n is a, c, g, or t
  misc_feature (471)..(518): n is a, c, g, or t
ccccccccgtctgcagttcccaaaatactaacgcagcgaggcctgggtggcgaattcggcacgaggagcggccgggctggctatcgagcgagcggggcgggaacgcggagttgcgccgccgctcgggcgccgggctccgtcgcggccgcagccccgcgggtcgccctcccgtgcctcgcccgcggacaccctggccgtggacaccctggccgtgggcannnnnnnnnnnnnnnnnnnnnnnnnnnnnnnnnnnnnnnnnnnnnnnatgaaggtcacgtcgctcgacgggcgccagctgcgcaagatgctccgcaaggaggcggcggcgcgctgcgtggtgctcgactgccggccctatctggccttcgctgcctcgaacgtgcgcggctcgctcaacgtcaacctcaactcggtggtgctgccgcgggcccggggcggcgcggtgtcggcgcgctacgtgctgcccgacgnnnnnnnnnnnnnnnnnnnnnnnnnnnnnnnnnnnnnnnnnnnnnnnnccgtggtggtgctggaccagggcagccgccactggcagaagctgcgagaggagagcgccgcgcgtgtcgtcctcacctcgctactcgcttgcctacccgccggcccgcgggtctacttcctcaaagggggatatgagactttctactcggaatatcctgagtgttgcgtggatgtaaaacccatttcacaagagaagattgagagtgagagagccctcatcagccagtgtggaaaaccagtggtaaatgtcagctacaggccagcttatgaccagggtggcccagttgaaatccttcccttcctctaccttggaagtgcctaccatgcatccaagtgcgagttcctcgccaacctgcacatcacagccctgctgaatgtctcccgacggacctccgaggcctgcatgacccacctacactacaaatggatccctgtggaagacagccacacggctgacattagctcccactttcaagaagcaatagacttcattgactgtgtcagggaaaagggaggcaaggtcctggtccactgtgaggctgggatctcccgttcacccaccatctgcatggcttaccttatgaagaccaagcagttccgcctgaaggaggccttcgattacatcaagcagaggaggagcatggtctcgcccaactttggcttcatgggccagctcctgcagtacgaatctgagatcctggcctccacgcccaacccccagcctccctcctgccaaggggagcgcagcaggctcttcactgataggccatttgcagacactgagccctgacatgcagggtgcctactgcacattccctgcctcggtgctggcaccggtgcctacccactcaacagtctcagagctcagcagaagccctgtggcaacggccacatcctgctaaaactgggatggaggaatcggcccagccccaagagcaactgtgatttttgtttttaagactcatggacatttcatacctgtgcaatactgaagacctcattctgtcatgctgccccagtgagatagtgagtggtcaccaggcttgcaaatgaacttcagacggacctcagggtaggttctcgggactgaaggaaggccaagccattacgggagcacagcatgtgctgactactgtacttccagacccctgccctcttgggactgcccagtccttgcacctcagagttcgccttttcatttcaagcataaggcaataaatacctgcagcaacgtgggagaaagaagttgctggaccaggagaaaaggcagttatgaagccaattcattttgaaggaagcacaatttccaccttattttttgaactttggcagtttcaatgtctgtctctgttgcttcggggcataagctgatcaccgtctagttgggaaagtcaccctacagggtttgtagggacatgatcagcatcctgatttgaaccctgaaatgttgtgtagacaccctcttgggtccaatgaggtagttggttgaagtagcaagatgttggcttttctggattttttttgccatgggttcttcactgaccttggactttggcatgattcttagtcatacttgaacttgtctcattccacctcttctcagaagcaactcttcctttggggaaaagagttcttcagatcatagaccaaaaaagtcatacctttcgagggtggtagcagtagattcccaggaggagaagggtacttgcctaggtatcctggggtccagtggcggtggcaaactgggtttcctcagctggcctggtccttctgggggctttatgtctcttgtgaacaattggttttcctccccggcccccctggaaggttggccttccagctgggggaacttcctgggatttgcaaaattttggcaacggggggaacttacttt

SEQ ID NO: 360041 - DNA, 490 bp, Homo Sapiens
  misc_feature (341)..(355): n is a, c, g, or t
gccatgggttcttcactgaccttggactttggcatgattcttagtcatacttgaacttgtctcattccacctcttctcagagtaactcttcctttgggaaaagagttcttcagatcatagaccaaaaaagtcataccttcgaggtggtagcagtagattccaggaggagaagggtacttgctaggtatcctgggtcagtggcggtgcaaactggtttcctcagctgcctgtccttctgtgtgcttatgtctcttgtgacaattgttttcctccctgcccctggaggttgtcttcaagctgtggacttctgggatttgcagattttgcaacgtggtactacnnnnnnnnnnnnnnngtctgttagttatttctccaggggaaaaggcaataattttctaagacccgtgtgaatgtgaagaaaagcagtatgttactggttgttgttgttgttcttgttttttatagtgtaaaataaaaatagtaaaaggag

SEQ ID NO: 360042 - DNA, 1383 bp, Homo Sapiens
  misc_feature (891)..(948): n is a, c, g, or t
cctgagtgactgctcatcgagaagagatagccaggatcagccaagatcttgctctcattgctcgggagatcaacgatgtagcaggagagatagattcagtgacttcatcaggcactgcccctagtaccacagtaagcactgctgccaccacccctggctctgccatagacactagagaagaggtaggagatcttcatggagaaatgcgtaagttggttgatcgtgtttttgatgaaagcctcaacttccgaaagattcctccattagttcattccaaaacaccagaaggaaacaacggtcgatctggtgatccaagacctcaagcagcagagcctcccgatcacttaacaattacaaggcggagaacctggagcagggatgaagtcatgggagataatctgctgctgtcatccgtctttcagttctctaagaagataagacaatctatagataagacagctggaaagatcagaatattatttaaagacaaagatcggaattgggatgacatagaaagcaaattaagagccgaaagtgaagtccctattgtgaaaacctcaagcatggagatttcttctatcttacaggaactgaaaagagtagaaaagcagctgcaagcaatcaatgctatgattgatcctgatggaactttggaggctctgaacaacatgggatttcccagtgctatgttgccatctccaccgaaacagaagtccagccctgtgaataaccaccacagcccgggtcagacaccaacacttggccaaccagaagctagggctcttcatcctgctgctgtttcagccgcgagctgaactttgagaatgctgaatctgaggctgatttcagtatacatttcaatagagtcaaccccgatggggaagaggaagnnnnnnnnnnnnnnnnnnnnnnnnnnnnnnnnnnnnnnnnnnnnnnnnnnnnnnnnnncacagaaagaaagaaaaacagaacgaagaccacaacaacaagaacaaatgacagaaaataataagtagacatgacacaacaacaaggcgggggggcggggcacacataacatcccccgaccacgggaggaggccagacaaacgcaccaccccacttttagacacgcacagggcaggccgaaccaggtaggaggaggcctcacttaatcaatacggagagcagcggagggcgggtagctaaagagagagccttaggttgtcgggaagcaaaaaaggagggggagaatctatttcgagaagagacacaagaccacccagccggatcacgcccaacgaccacaacgcacaacgcccaaccaccaccaaccagacacacacgacaccccaaggccaacaaccccatacatcagacgcacagcagcaaacaaccaccaca

SEQ ID NO: 360043 - DNA, 327 bp, Homo Sapiens
  misc_feature (85)..(85): n is a, c, g, or t
  misc_feature (87)..(87): n is a, c, g, or t
  misc_feature (117)..(117): n is a, c, g, or t
  misc_feature (251)..(251): n is a, c, g, or t
  misc_feature (275)..(275): n is a, c, g, or t
  misc_feature (313)..(313): n is a, c, g, or t
cggcacgaggcaaaccccacactcagtcaaattcatagaaatttgctttctcttgctatgatctgttttagattatgtatatttntngtctgcacttgcctagtaatttagaatgangctcttaaaattggagctttccaaatcaatatcacaatttagagactgataagaaaccaggtatttttactggactatagggggtaaattctaagctgcgcaaactaacattctgctttgtaagtaaaattaanctcaacagggtttagaatataatncaggttcagctttcatgttctgctcttttagcctttgntttatgcctagggg

SEQ ID NO: 360044 - DNA, 490 bp, Homo Sapiens
  misc_feature (2)..(2): n is a, c, g, or t
  misc_feature (16)..(16): n is a, c, g, or t
  misc_feature (57)..(57): n is a, c, g, or t
  misc_feature (89)..(89): n is a, c, g, or t
anccatactttgtagngtgtaaagcatcacccccggcatttttggaatgaaaattanaaagcctgaagaggctactgtataaatattcncgttataacgtggtaacaaaaatagctccatagcatatttgggaggcaatggggcagagaaggaagtggaggttagtgctaatttaagaaggcctatagaatgtatgtgaaggtagctaaggaactagttagtgtattttaaaatccctattgcaagcctaacactgacctcgctagtaactcttaaggcaatcaagacggaacatgtgtttggcccccagatgcacgaatcctgccctcccctcaacctttgttcatcctaacagaccaacctggctcctgcattaatatggagtggggagaacagcaaaacaattcactgtatgtacaaaagacaattcagtgcaaacctagaaacttctcttagtcaatagtttccaattttctgagacgaggtcttg

SEQ ID NO: 360045 - DNA, 790 bp, Homo Sapiens
  misc_feature (25)..(25): n is a, c, g, or t
  misc_feature (44)..(44): n is a, c, g, or t
  misc_feature (117)..(117): n is a, c, g, or t
agaaggctgcacactggagtgagtnccaagtggcggcccacagntggtggtgggattttgaaaatgcgtactggctgcccatgccgctaccccctgtgggtaacccacagttttggntggcaagggtcccttcctgcgctccagggagttggaccgatccacctcactgcattcagaataggtgtccagggaaggcggtaagagacgctggaacacactgctcatttccgagagcagagatgatgtgctggtatcccccagtgtcctcatcgtttggggagtcctttccaaaggtggaaaaactcttcttcgttttcaccggaatctgcaggctgagcgtcatcctcaagactctgatgtggatgctgctgctggggttgcgttgggaattctgtcccctggaatgaacatgttactcctataatcagaagacggtgagggcagtggtggcatccagcactggtcagagtgtcccaggaccctgcactcgctccgtgcagagtgctcatagctgctggaattcttccatctgtgagaaacaggtcgctgaatccttcacccagcagcctatctattggagaatctcgccccaaatcataatcactgtctcctgcctcactgtcaccacggccactgtctttcaagctaaatttgtccatgtcttgaagggcatatctgtagctcctggaatatttgtttcctcgaaaacttggtcttggctgatattgctcctggtgaagcattgaaagaagctgcctcggccgattaaccaccggcctcgtacctagcc

SEQ ID NO: 360046 - DNA, 266 bp, Homo Sapiens
ctattaaaatactgtgaacgactaacagcacaattgtgataagtgaaaagttttataggaagtccttcttgagtgctccatattttaactttttggagtattctagtaaaataccagtgttgaccttttttcaaaaataaccagaatcaccatataccagttctattgttgctcacccacagtccccaaaatgaaaagcagcaaacacgtagccagggccaccttattcctgcttcatcttgcaaacacccaaataaatgcagact

SEQ ID NO: 360047 - DNA, 594 bp, Homo Sapiens
  misc_feature (316)..(316): n is a, c, g, or t
  misc_feature (500)..(500): n is a, c, g, or t
  misc_feature (512)..(512): n is a, c, g, or t
ttcggcacagcgttatttttgagccaaattgaaatgtgcacctcctgtgccttttttctccttagaaaatctaattacttggaacaagttcagatttcactggtcagtcattttcatcttgttttcttcttgctaagtcttaccatgtacctgctttggcaatcattgcaaactctgagattataaaatgccttagagaatatactaactaataagatctttttttcagaaacagaaaatagttccttgagtacttccttcttgcatttctgcctatgtttttgaagttgttgctgtttgcctgcaactaggctantaaggaatagcaggagaaattttactgaagtgctgttttcctaggtgctactttggcagagctaagttatcttttggttttcttaatgcgtttgggaccattttgctggctataaaataactggattaatataattctaacacaatgttgacattgtagttacacaaacacaaataaatatttnatttaaaattcngggaagtaatataaaaggggaaaatatattataggaaagggataaagggtaatagagcccttctggcccccacccaccaaat

SEQ ID NO: 360048 - DNA, 504 bp, Homo Sapiens
  misc_feature (32)..(32): n is a, c, g, or t
  misc_feature (39)..(39): n is a, c, g, or t
  misc_feature (47)..(47): n is a, c, g, or t
  misc_feature (66)..(66): n is a, c, g, or t
  misc_feature (121)..(121): n is a, c, g, or t
cagaacccagactgttgtccacctgcacggtnacacggnaaatgccnacgttctgatagacgtgtntgatcccatcttccatggagctgagattgacgtaagacaccgcaataccatcgcnaaagtccacttggatgagtgtccgctgaacatcaccctcttctaattgcaccatgagagtgacgttgtgtccttgttcccgctgtcagctttccatcagccgtgactatcccgcagcccccgcggggctttccctgggcacttctgcggtttggcagtgtactgttcccttacgccatcagtgcaattattggaaaccaccttcctgtacccagtactattgaggtaactctgtcccaagctgcaatcctttgacagagaggatggattgaaccaaaatgccggcaggcactggccattgctgtgtcgctcataaccatagtcgcaatcaaaatcagcctcagtgcagacacagggttcagattccatagctcctgcatattt

SEQ ID NO: 360049 - DNA, 328 bp, Homo Sapiens
  misc_feature (7)..(7): n is a, c, g, or t
  misc_feature (14)..(14): n is a, c, g, or t
  misc_feature (130)..(130): n is a, c, g, or t
  misc_feature (320)..(320): n is a, c, g, or t
gcccccnaaagttntgggattcaggcgtgagccactgcacctggccagttctggtagttattaaaccatgcattggaagaccctgctggaatataagatgcagagcacagaaagaaaactaagtgaaganaagaattgtttcggagccttgtaaggaatactcacgtcctccttctccaagctgggctccctgaagttgggcaatttcatcaaaacagtatccacttaaaagtacccttaactttttcttccaaagttacacagtagccccaagttctacaatgcccacttcatgtttcctgaggcaccctggagacgcnaaaagcat

SEQ ID NO: 360050 - DNA, 954 bp, Homo Sapiens
  misc_feature (780)..(794): n is a, c, g, or t
  misc_feature (881)..(881): n is a, c, g, or t
ccggaattctccggatctcagagccagcgtgtgctgggaaagatattagtcaaagcctggctttatagaatccaggaggtccttttagctgaaacaagtggcttcaaaagggaacatgaaacagtgaaaagatagccaaaggtcagtgaaaccacagcatttctttctaatctggctgaggccatgggggggaatgaggggaaaatatgcttccgggccaaggtcaccgagggggaccttgggatttgtgtcctccccagtgcttagagtagagatacctgcaaattcatggcaaacagttggaagaattacttgactgaaacaacccaatcttactttctttcgtaagttgaacctctgatttattgtggggttcaggctctcctcaatagaaggccagagttggacaggtggactaaggtcaaggatgaggagtctgcagtggggactaccacagcaaactgccttccttccgtggagtcctaactcagccatgtggtccactcacccaagaggccaaggggctcaaactaaccccatgggggaacatgctgccatggctctgacgtttcatgtaaacgaaatcgggttagggacacccagagagaatttactctctaccacaaagcgagaatatgaaaaccgcagaaaccggagtggatttaaatgtaataaaaatggtagaaagtgatgggatcataaatgactaatgtttccaaataggcccggtataatataagctgtacgggtgatgacaatagtaacgggtgcctgaaacgnnnnnnnnnnnnnnnttaagaatgcgaaaacaccataacaacggagcgtcacataaaaagataataaaacttgtgagaatgcgattgaccaatcaaaagcgncggtagtcagatcggctttcacacctgcgtaaaaggcaccaaaattaccaaaaaaacgtaaaccgtcatgagg

SEQ ID NO: 360051 - DNA, 724 bp, Homo Sapiens
  misc_feature (147)..(192): n is a, c, g, or t
  misc_feature (323)..(323): n is a, c, g, or t
  misc_feature (340)..(340): n is a, c, g, or t
agcatttagtgtttgaactcttcccatccttgactacctcttctctcccttaccccaccttctgttcactactattatttccaattgttgactgaggcagagaccactcggtttttcaattatccaggcccataaaccagcaaatannnnnnnnnnnnnnnnnnnnnnnnnnnnnnnnnnnnnnnnnnnnnncaaagagcaacagaaagttcagcacaatctacagtattaaaattagccaaaagtcccatacttttattagctaaaaattccatctcaacagggttcatgcatgttttagccttcaagatccaatacctttnggggactcaaggtatangagctaatgtggtttggaataccataattcccccaggtgtttactgtgttaatgtagccaagggtccaatttcacagagctttcattcaatcaactgcctcaattggggttctttctttccatctcattagcatgactccatatatcacttcagtgcttgtttattaatgaaagaaaaataaaaattgactgagtttcaccagaatgatcctctgaagtacaccgaatatgtacatgtactgtatgtattaccgtagagattggaatcaacttactgtatgtaaagttttatgaatggttattttataatttatgtatttaatataggaatcgatgaactctggtgttttagtttatataaaaataaaacaagctgcatttttt

SEQ ID NO: 360052 - DNA, 531 bp, Homo Sapiens
ttttttttcagatatagataaaactttatttatacataaaaaattacactttaggaattctgttcctaaaagcattctcttagtaaagctcaaaatgaaaaggttgaaaggggcagtgaacagctttttaactgtgtacatactgcagtcacaagcaattttttaagctgcaaaaatcatctcttctaagtagcatgagcttttgaaactgcagacttaaatctcatgatggcatcaaaagccaaagcgaaataaatcaatattctgaaatagaagacttggctgtcgatgttaattgggtgctatctccaaccactttccatcatgttacttcttcctcttaggtgtaactcaagaaataacttttttctaataatacctatcactgcatggaaaaaatgaaaagagaagtgataagggcctcctattagtagtttaatattaacattatctaccctcaataagaaacaaaaaatgtcataatgttttaggataaaaatacttatacaataaccattgatctattctgaa

SEQ ID NO: 360053 - DNA, 301 bp, Homo Sapiens
  misc_feature (6)..(7): n is a, c, g, or t
aaaaannggggggcggggtgaagaaataccaaactgaaaatttctgaaacaaatgtgtaattactactacgctaaacttttttcacacctttgtttgtgagccagtttccctttaacctttgactcgtaacataaagaaggttaaggccaggagtccatcaatggttaaaagattgtgagtgagatgtagaaaaacagtactgatgaattctgaaaggggaaacctcatttccattgcctggttcttgtgcattgcagtattaccacaatatggcattctatacagcagataaatgtaatt

SEQ ID NO: 360054 - DNA, 867 bp, Homo Sapiens
  misc_feature (282)..(282): n is a, c, g, or t
cagtttccccatgattcagaaattatcagacttatgaaaataacaggcctgacgaaaggagagattaaaaaatggtttagtgacacaaggtacaaccagagaaattcaaagagtaatcagtgcttacatctcaacaatgattcctctaccaccattattatagactccagtgatgaaaccacggaatccccaactgttggtactgcacagcctaagcaatcctggaatccttttcctgactttactccccaaaagtttaaagagaaaactgcagagcagctntcgtgtccttcaggcaagttttctcaacagctctgtacttacagatgaagaattaaataggttaagggcacaaaccaaacttaccagaagagaaatcgatgcttggtttacagagaagaagaaatcaaaagctttaaaggaagagaaaatggaaatagatgaaagtaatgcaggtagttccaaagaagaagctggagaaacttctcctgcagatgaatctggtgcacctaagtcagggagtacaggcaagatatgtaaaaaaacacctgagcagctgcacatgcttaagagtgcatttgtccggacacagtggccatcaccagaagagtatgacaagttggccaaagaaagcgggcttgctagaacagacatagttagttggtttggggacacccgttatgcttggaagaatggaaacttgaaatggtactactactatcagagcgccaattcaagtagtatgaatggtctgtcttcccttaggaaaagagggagagggagacccaaaggacggggaagaggaagaccgcgtgggcggcccagaggaagaaaagaataacaacctgggacaggggccatcactca

SEQ ID NO: 360055 - DNA, 331 bp, Homo Sapiens
agtctccgcccggcgctcccgggatcagctggcgggcgggcgggagccgagcgcggccccggctctcgctgcagcgccgcctcttctctgcgtcgcaggcccggcccggcggccgtgacaatgtcgcggggctggtagcagggcgccggccgccgagccgtctcaagtttaaacttacacgaatcgctttctggaggaggaggggacccgctgcgcgattgacacgcatattcctataggcatcctccctcagcccccacccccacggccggattcgggtggctcctctccgaggtgaaatctgagaagaaatccttggatctcttttctt

SEQ ID NO: 360056 - DNA, 604 bp, Homo Sapiens
tccactgctcgtcagtcgatagggggagtcggtagtctgtccgaccgtaccattaggcgcctgggccggaggaggggttttcagggtcgtaggacgccgttgggcaccacgctcggagaaggacaggacaatggcggccttagggtccccgtcgcacacttttcgaggacttctgcgggagttgcgctacctgagcgcggccaccggccgaccctatcgcgacaccgcggcctatcggtaccttgtgaaggctttccgtgcacatcgggtcaccagtgaaaagttgtgcagagcccaacatgagcttcatttccaagctgccacctatctctgcctcctgcgtagcatccggaaacatgtggccctacatcaggaatttcatggcaagggtgagcgctcggtggaggagtctgctggcttggtgggtctcaagttgccccatcagcctggagggaagggctgggagccatgaacatggagaatatccttggatgctgcattcataggagaattgaataatttctatcaatatgtatttatcattaaattttttttaagtttaaaacaaaacgaaaacgcacaacaaaaaattggcggccggcct

SEQ ID NO: 360057 - DNA, 1117 bp, Homo Sapiens
  misc_feature (104)..(112): n is a, c, g, or t
  misc_feature (584)..(649): n is a, c, g, or t
tttgtgcgcgcagaggaggtagaactatgctcgccgttggtggcggccacaggatcgtttctaatggcgcggcggtggcggggacaaatgactggagcggccannnnnnnnntgtagacacgcgcgcgggttagtatacggccgcctgtgctggaaggagagtgtgtagtatatatgtgtgcgcgctctctggtgtgaagagagcctgtgtgtaaatagactgtgctctgggtaaggggaggagagttttggtcgcccgcaccaaaaatggtgcgtgtggcgcccccgcccccgcgggagaagatagagaggggtgctctccgtcttccccacagagggagtggctccacagcggtggactccgaccgtgtgtgtcgcccgcgcgacggagcccgacggtgggaaacgacagacgcgcgcgccagcgcggctccgagggctgatataatagacggcggctcctcccaaagaggggcgccacctcttggggcaagagagagaggagcgggggggacggcggcgagagaactgtgggcgccgccctcgcgggaggggaaatttggggggggcgcgcgcgcgcgccnnnnnnnnnnnnnnnnnnnnnnnnnnnnnnnnnnnnnnnnnnnnnnnnnnnnnnnnnnnnnnnnnnaaacttaaaaaaaatttaatgataaatacatattgatagaaattattcaattctcctatgaatgcagcatccaaggatattctccatgttcatggctcccagcccttccctccaggctgatggggcaacttgagacccaccaagccagcagactcctccaccgagcgctcacccttgccatgaaattcctgatgtagggccacatgtttccggatgctacgcaggaggcagagataggtggcagcttggaaatgaagctcatgttgggctctgcacaacttttcactggtgaccctatcccacgaaaccacacctagcgcccacgtgaggggtgacgtatgctgggagttgtagttagagaacaaaagtccacatcaccgcgccaaaggctttaccctcgaaactgcaccgatgctccggacgttgaacgggcgcgcgcacgcttctgcgtacgcgcttgcctgcccc

SEQ ID NO: 360058 - DNA, 1287 bp, Homo Sapiens
  misc_feature (844)..(844): n is a, c, g, or t
cacgttttaacacaaagaaataataagtgttagcatcgtgtgtcttgaagtatacttttgcactgtaacttgggttacgttaaagagagcttagcaccaaaggtagataatgaagaaatggcataggaaagtggagatgataaaaagttgattgttgaaccaaaaagggtttgaagggaagcttcgactgagtatcagaaattacttaaggcacataggacctgaatcaggaaaccagcacttcttacaactgccagttttaaaagaggaaatgattctgagatgtgctcattttattttaatttggtggttggtggttttccaagtagtctgtaaaatcctgcaagattcacagtctctggtgtgaaacctcagaagtgagtcgttgtgagcctgtgggcagcaccaccaaggcaggctaaggggagggtgcagtaagtggagtttgtgaggctgagtggctgaggagggagcaagtgcaacaaaatagggctagagaagaaccagccaaggagtggaacccatgctgctctcagagattcacggaacacggcagccttctgcaggcagttccatgcatgtgcactcacgctgcaatcacagatgtcccagtaattaacctttctaagtcttgtgaatgctgactgcactttcacctcctcgaaaagccattggaagtttttagagcagcagcagccacagtttgtaagacaaatgtagagggggacgcaaaagaaaagacaccaccaggagggaggattcagtgtgcagtcagcacagaccaacatcaaccaaggcaatggctgccctccactcttgggaaatggggggggaggtttctganaacggaaatttggattgggagctagcagttatttcctatcagatgtactgtgcactttaacctaacttaaaatgtattttaatattttgtctgtactgcacaaataccctgtttttgtcaaatagcataattgatggtaaagaaaccatttttggaacaacgagcggaataccattttaaaccaacattccaaagggtggacctatataaagaaaggaggttgagtccctggcggcacccttcccgggtccattcagaaatggcggggtccccgcaaatattttcctttacggggaatatatggtgcaacagtaaagctctttgaaaatccccgggttttacacccaattctcctttctccaaaatttcaccgcaatttgcctcgctcacatacaaagttcaccccgcaatctgccacccggaaaacgcgcggccagggtgca

SEQ ID NO: 360059 - DNA, 474 bp, Homo Sapiens
  misc_feature (261)..(318): n is a, c, g, or t
acatgcatgcattgtattagtgttagaaaacacagctgcgtaaataaacagcacgggtgacccgcattcccgctcggacactcgcgcgcagccccgcggccgtccctcctcgctgcggcccgcggtgtcctcggggtgcgagctgcacgtggacgcagggccccctcaggccgccagggggcggcatagcgcagcgcgcccccgacccggaagacggaagcccaagaacgccgcttccgcccggcgcccacttccaagatnnnnnnnnnnnnnnnnnnnnnnnnnnnnnnnnnnnnnnnnnnnnnnnnnnnnnnnnnnatgctgcggactgcgctgcgcggcgcgccgaggttgctgagtcgcgtgcagccccgggcgccctgcctgaggcggctgtggggccgcggggcccgtccagaggtcgcggggaggcggcgggcctgggcctggggctggcggcgctcaagctccgag

SEQ ID NO: 360060 - DNA, 834 bp, Homo Sapiens
gttgtgtttcttttcttgtgggaaagtaattgtcatgtttacttgatatgaaacaaggccacggtccagagaggcccaagggcccatacgctcctttctggaaaggccgaagtccccacagtgcacggggagcccaggagtcagctcggctccgtctttgccagggctgggggtgaccctcatcctcaacccacttccggagctgcagtggatctgggggcccctgcagcctccagaaccagttccagggccccctcgcccgccacacggtgcacctgctcgcctctggccgtcaggatctcttcgatatttctcttcccattcaggtccgagaaccagcccaggttgtcagcgatgatatggtggttctggcagccggggcaggtcacaatgaccacgccttggtgataggccagcttggagatgcgcttggaggacctagtcccgcagaccttgcaggtgtagacgagctggtagtgcagccgcctccaacgcgccccagagccgccgcgggccccggcccctgctcggagcttgagcgccgccaagccccaggcccaggcccgccgcctccccgcgacctctggacgggccccgcggccccacagccgcctcaggcagggcgcccggggctgcacgcgactcagcaacctcggcgcgccgcgcagcgcagtccgcagcatcccgctcgccggctccgtccgccctgccccggccccgccccgccgccatctggaagtgatcccgggaatccgaccggtccatcattcttcttttttttcccttcggcgggggagggggccgcggtacgctcggtccgggcgggagacaagg

SEQ ID NO: 360061 - DNA, 559 bp, Homo Sapiens
  misc_feature (26)..(26): n is a, c, g, or t
  misc_feature (37)..(37): n is a, c, g, or t
  misc_feature (104)..(104): n is a, c, g, or t
  misc_feature (116)..(116): n is a, c, g, or t
  misc_feature (283)..(324): n is a, c, g, or t
gaacgaatcccaggtgctaactcttnaactgaccctnctcccttatttatctcttttctatttataagtgtggcttaggaccctccgtgaatagatgatatagncatctctccccngtgacccttcttttctgtcccaggaaggtgggtaaattccctttgggatggggctcccacacctccctcaggtccccactcagaccagcaccagtgtctgcctctgagaatgttggcagctcacagagagcagggccggcccgggatggggggcaggtactccccannnnnnnnnnnnnnnnnnnnnnnnnnnnnnnnnnnnnnnnnnttattaccgttttttgtacttgatgccttctctgtgagcagtggctctgtgggaaggagggagccgggagcctggtgggaagccttccccagagagatggctttaggggctttatttaaagactgtgatgatggagccacgcaaggctgcacctctgtgtgttgggagacgatgatgatgtccattgctgtgtgatggcttggaatttaatttattaaagtcaaattggagttta

SEQ ID NO: 360062 - DNA, 643 bp, Homo Sapiens
aattacacgagggcgcatgcagcaaggtctactcccgcgagtgaccacgggacagacgatcctctgaggtttccaggaagacccccgccctaatcctctgaaggtcggaggtcacaggtcaaagccgagaacagaagctggggtggggcacacagaggtggaaagaggggcctgagcatcgggcggccaccagcagggtcccctcctggccacaaggacgctcccgttccagtccccggaagagggtggctgcagcccccggggaatgaccagcagaggtcctcacggcctgcggcccggggagacctgagactcctaagctgagcacgtcagcgtctctacctccaccgcagacagaaagaccgggcggacccaagactgcaagctcaagccctggcggcagggcagcggggcctgtgagggccgagggtggacgctgctctgagccagacccgctcgtcagcagctcggcctcccccgctgctccccaccagcgcccgggcttgggtgtttggtgcttccaacttttcaagagaagcttgaaatctgtaattcttatgtgaaatcctgcctttcttaactaattaaagacttaaaattagctagttaaaattaattaaaattgattaaatttgtactaatt

SEQ ID NO: 360063 - DNA, 1051 bp, Homo Sapiens
tctcggtttaagtgtaaactttgctcgaattgtgactgcccttgttgtttagaaataatgtgttcgtggagacattagatttaacccgaaagtagtttatgggaggcacctttctttggactgcgacggtctcccctgtcctctagatgcctgattctgagagtcaagaagatattcccaaaggagatccttcgctgcaaagtttcaatcccttacaggtaagtagccattatttcaggatgtcgaaggcatcatgttcaagttaaagcataccttcatccgagagcttgccactgatttacagctaatccatttcaaacttggttggagcatagcaattgcagaactcataaaattgctgctgaaattacacaccatattactagcatatacattgcagtgctccaatcatgctaacagataatagatttttctttaagaattttatcaaatatttcactatttggggaaattttagaggaggggaagcctgtattcaggatgatagagggagcagagacttaactgtctctcttccacattataaatgaactgcctttccaggtccaacatgctgtcaggttgcttcagctcggtgtgaatgtaatgtgtggggatcaaacacagcacagcctatacacatacatattaatatgcagaggattttaaataattgcaaatgtcttgtggctgttttatttctacaaaattctgtaagatgtataccagaaaacataataaagataagcctcagttcttcattgggaaaaaatatttttaaagaaaatttagaagtttttgctgaattaaagtatcttcaattttaattactggatttggaagttgaaatgccatccttcaatatcactggtctcaaattcattgatagaattttttcttaaactaataagtggggtaagtataatctcctaaattggtacccactggctgctcctaaactggtttccagtcatgtcctccagtatgtgatttttataaattaaaggtaatattgtatattaaagttcaaataaagatgttctttaagtta

SEQ ID NO: 360064 - DNA, 384 bp, Homo Sapiens
  misc_feature (329)..(329): n is a, c, g, or t
  misc_feature (357)..(357): n is a, c, g, or t
  misc_feature (380)..(380): n is a, c, g, or t
atgagccaccgcgcctggcctgaccttgttgatttctatacaaagacatttcagttgcaactattcccttagaacataggcatatagtatagctaccttaagggaatgtaatatgtcaagacctagatttatgaagtaagaataacgagaatcctcacattgcagaagtactcactggcagatttctgtgtgaccacaataattacctggacatgattttctgtggcacactacacttgtatttatattgttcttgacctgtaaaattatggtgcccaggagagaaagttttctcttttcatgcttgccaacatttaaaaaattaaagnggttatatatatatgatgctacaaaggntggtgattaacaaaggctttgtnttgc

SEQ ID NO: 360065 - DNA, 1320 bp, Homo Sapiens
  misc_feature (1235)..(1235): n is a, c, g, or t
  misc_feature (1262)..(1262): n is a, c, g, or t
  misc_feature (1279)..(1279): n is a, c, g, or t
tattttaagaaaaagcaagctgcttttagatatgtgggggcaaatttttaatcttgcagtaatattaaacaggaatatccaatttaaaatgatgtaaagatgtaataaaattccttttcattgtaaaatagtaattaagtcaatttacacagacctttgtatttaatatgtctccctatttgtatagaatttcagatgggtctagatgagaaccctatgcataagcttggatcttgatgaaaggttaccaaggatcaggatcaaaaattgggaaatactaagctcttgaagatatttttctgatataattagattgaaaagagcaattttgaaaatgctgtgttctccagaagtacagggtgcattatttgacatcaattacttaaagaagttatgagttgttccccaaacagattttaaaaacagcaaaataaaagcactttaagatataattttactgagtttaacttcacagaattatctttttaatgcttggagacatattgaataaactgtagtcttaaatcatgtggtctgcaatcgtttgcttttgcttaaaacataattactgaaacccttggtattggttgtatatgaagttaactatttgagttggtacacactgcttgtgagtttcatagttattgtaatgcagagaaggaatttgagaatttgtttctcctcaacatgactaattaacactgaaaagtcagtcaaggtttaaggatttattttcccagaaataaatataaaggcaattggaataaccatccatttagtcgtatttccaaagtatagcaccatttcactccatttataccagctcccttttatgggtgtggggggagaggtttacacccacatatttcatatatattttgtacattttgtattttgaattgctcacattttcgggccctgttttgcctttagttacaggtcctgccttattttcatctcaccatgcacagaactaggggagccttagggaagtgccagggtttcactgtcagatttgccaagtcacagaggcgcacagaccctgaagtgcctgtctggctgctgtggcattgtgtgggcatgtggccaggcagatggcatcttcattactgtgctcttcgccatggcccagtcttttcattctctgggcagtgagggtttctgtggctgttcagacttcattgttattctgtgacttgctgggaggttgggcagtggcctttgttcaaacacantgaggaaggatgggaaggggccagcanttaaaggaggcaggaantgttaccctttaggaggaaacgggacagagggcgattgggc

SEQ ID NO: 360066 - DNA, 301 bp, Homo Sapiens
ttaaactgatcaagctttctgaaggacaagtttagatgatcctaaacaggtaggattaggctgaggggattaggtttgctcctctgaggtagtatgaattctaaaggaatcaggcaggactgattttgcagccctggaccatagctgctttgtggattacgcaagatgtggatgcaggagatcagcgcaattggatgaatactggaaggaaaaagcaaggccgccatgataacgtgtaatgctttaaattcatttctgcttccaacgactgcttttaattggcacaagaggaatatttccc

SEQ ID NO: 360067 - DNA, 807 bp, Homo Sapiens
aaatacaaggacagatgcttctctgttccaagagggtttccttgaggaagctactgaagcagaaagacatgatggagacgagatcgcctcccctcttgtcaaagtgttaaaaaaatgttctgtcttactctgcgcctagcattggaaatgaaagtgacatttacgccacaacccacgtgtgcgcctcctctctttttgtttaaggatgatcaggtctatccaggaaacagctctggcatcccaaactgaaataattaggacgtatatagacctgacaaaaatggaaagggggtggggaatctgagggtctgtcttgcctaattgattccgctaaacggaatgcaggagatgtgaacggcaggacgctccgattcccacgctcgggggcaagtgataaagcggggccgggcagcctatgacagacagccctgttggggggtgggggtatgaaaaaaacatcaagtgcacacaccatactcatctccatcgcttaagaaagtaaaggcatttcccacccacagccatctgcagcttcccaaatggcagcaccaactggtctgtagctgctacatagtctgcttctgttaattttttaaccactgtttaatctggccataattaagtttggctttcttcgttgtttgagattttcagaattcaaggcaagctagtagaaagcaattccaagaaagtcccatgactgcctgcccctaatgtcaaaatctcagtccatgagattatggccttgtgaccacattttgctttggtaagggtgggcaaatgtgtatagagataaaatcatatctc

SEQ ID NO: 360068 - DNA, 1203 bp, Homo Sapiens
  misc_feature (73)..(108): n is a, c, g, or t
atgatcatcatatagggcctagcctgctgtagcgaacgacgagcgcaggcagtagtgagcgaggaagcggcgnnnnnnnnnnnnnnnnnnnnnnnnnnnnnnnnnnnnagtcgacgggaccggacatatgcccgggaattcggccattacggcgggggaaaattcatggggaggtcagtgtgctggcttacactgaactgaaactcatgaaaaaccagactggagactggagggttacacttgtgatttattagtcaggcccttcaaagatgatatgtggaggaattaaatataaaggaatcggaggttttgctaaagaaattaataggaccaaacaatttggacatgtcattctgtagactagaatttcttaaaagggtgttactgagttataagctcactaggctgtaaaaacaaaacaatgtagagttttatttattgaacaatgtagtcacttgaaggttttgtgtatatcttatgtggattaccaatttaaaaatatatgtagttctgtgtcaaaaaacttctttcactgaagttatactgaacaaaattttacctgtttttggtcatttataaagtacttcaagatgttgcagtatttcacagttattattatttaaaattacttcaactttgtgtttttaaatgttttgacgatttcaatacaagataaaaaggatagtgaatcattctttacatgcaaacattttccagttacttaactgatcagtttattattgatacatcactccattaatgtaaagtcataggtcattattgcatatcagtaatctcttggactttgttaaatattttactgtggtaatatagagaagaattaaagcaagaaaatctgaagtattgtcttgtttttaaaaaatacagttcctagtgtttttagaagtcacttaatttgtctcatttttccacctggaaattaggaataatgtagaatgcaaggcagtaatttccttttggaaaggactctgaaggcagaaaagaagggagagaacctcatgggcagaatattataaaaagagtgtcatattccagcatttgaattggaaagagaagagtgaagtcccaagttgcattattaatctgccctgtgttttttccttttaacaatcagtttgagctgctgctgttatgagtttctcatcaagatgaaagccctaatatgtaaagtcaaatccgatt

SEQ ID NO: 360069 - DNA, 705 bp, Homo Sapiens
  misc_feature (25)..(25): n is a, c, g, or t
  misc_feature (35)..(35): n is a, c, g, or t
  misc_feature (145)..(145): n is a, c, g, or t
  misc_feature (296)..(296): n is a, c, g, or t
aacccctctgggtaagaggggaatnggggcccagntgcccctccggggttagggcccagtggcccggtgggaatcagaaactggctcagacgtccacacactcctggtttctgtggggagtggagcggctgagtcctgccgatcnccaagatgggctgggtccctcctctgcaggccaggccgagggacagggttggctgaggagcctgctggtcccggcgtgtattagggcataatttctaactttttagtagctgccagtatctcttttttgactcaatatcattaaattatcnatttgggcttaatgtaacatggcatttatatagttcttgatctttactgataatgtataatcacaggcttactatttgtatggaagattctcatatccacttagggtgattttcacggtgtatttgacttagaaactaaagagttgtacattgcttatatagaacattaaatacattaagccattaattggcaactaggccattaaactagtaaccaagccaataacaacaaggaaaaatagctatcagcacacccttccccttatagctcactccattgtaaatattataagccctctgtgtcatgggaataaccctgcctaccacgtgatgctgatgtaataataatatctaaagctaagcacctggaggaagaagagaaagaagttttgctttggattggtaacac

SEQ ID NO: 360070 - DNA, 1721 bp, Homo Sapiens
gctggtacggtccggaattccgggattcgtcgacccagcgttgcgcaatatgcccagcctgtggagacgggacagccctgtcccactcactctttcccctgccgctcctgccggcagctccaaccatgggaggccgcgtctttctcgcattctgtgtctggctgactctgccgggagctgaaacccaggactccaggggctgtgcccggtggtgccctcagaactcctcgtgtgtcaatgccaccgcctgtcgctgcaatccagggttcagctctttttctgagatcatcaccaccccgacggagacttgtgacgacatcaacgagtgtgcaacaccgtcgaaagtgtcatgcggaaaattctcggactgctggaacacagaggggagctacgactgcgtgtgcagcccgggatatgagcctgtttctggggcaaaaacattcaagaatgagagcgagaacacctgtcaagatgtggacgagtgcagctccgggcagcatcagtgtgacagctccaccgtctgcttcaacaccgtgggttcatacagctgccgctgccgcccaggctggaagcccagacacggaatcccgaataaccaaaaggacactgtctgtgaagatatgactttctccacctggaccccgccccctggagtccacagccagacgctttcccgattcttcgacaaagtccaggacctgggcagagactccaagacaagctcagccgaggtcaccatccagaatgtcatcaaattggtggatgaactgatggaagctcctggagacgtagaggccctggcgccacctgtccggcacctcatagccacccagctgctctcaaaccttgaagatatcatgaggatcctggccaagagcctgcctaaaggcccccttcacctacatttccccttcgaacacagagctgaccctgatgatccaggagcaggggggacaagaacgtcactatgggtcagagcagcgcacgcatgaagctgaattgggctgtggcagctggagccgaggatccaggccccgccgtggcgggcatcctctccatccagaacatgacgacattgctggccaatgcctccttgaacctgcattccaagaagcaagccgaactggaggagatatatgaaagcagcatccgtggtgtccaactcagacgcctctctgccgtcaactccatctttctgagccacaacaacaccaaggaactcaactcccccatccttttcgccttctcccaccttgagtcctccgatggggaggcgggaagagaccctcctgccaaggacgtgatgcctgggccacggcaggagctgctctgtgccttctggaagagtgacagcgacaggggagggcactgggccaccgagggctgccaggtgctgggcagcaagaacggcagcaccacctgccaatgcagccacctgagcagctttgcgatccttatggctcattatgacgtggaggactggaagctgaccctgatcaccagggtgggactggcgcctgtcactcttctgcctgctgctgtgcatcctcactttccctgctggtgcgggcccatccaggggctcgcgcaccaccatacacctgcacctctgcatctgcctcttcgtgggctccaccatcttcctggccggcatcgagaacgaaggcggccaggtggggctgcgctgccgcctggtggccgggctgctgcactactgtttc

SEQ ID NO: 360071 - DNA, 443 bp, Homo Sapiens
  misc_feature (392)..(392): n is a, c, g, or t
  misc_feature (400)..(400): n is a, c, g, or t
  misc_feature (408)..(408): n is a, c, g, or t
  misc_feature (424)..(424): n is a, c, g, or t
cgcgcctcaggagccagtgtaggcgccgcaaagcggaagcgggcgcgcggataggctgccaggatggaaactaactacctgaagaggtgctttggaaattgcctggcccaggcactggcaagaggtggcgaaggttcggcccagtgacccaatagaatacctggctcactggctttatcattacaggaaaacagcaaaagcaaaagaagagaatagggaaaagaagatccacctgcaggaggaatatgacagtagcctcaaggaaatggaaatgacagaaatgctgaaacaggaagagtatcagattcaacagaactgtgaaaagtgtcacaaggaactgacttcttgaaacttgtttccaccgaagaagaccatatttcatgcagggaggncacaaaancccccttnagaaaggagggccttnaaacagggatttcttccca

SEQ ID NO: 360072 - DNA, 1050 bp, Homo Sapiens
  misc_feature (730)..(730): n is a, c, g, or t
  misc_feature (748)..(748): n is a, c, g, or t
  misc_feature (779)..(779): n is a, c, g, or t
ggtcggaattccgggatgtgacccagggagacaaacttggagatacttggggctgagtttgagcaagactccctaacctgtgtctggacaagtctgatgtcctgtgtggcccaagaagaactgaccaagtgtctggagctcccaccagttattgcatccctgctgtggctcacctgctgctgtctccaggagcccctgagaagatttgcttcctctcccctgctaagctccaggtcctgagattaaattaggggctggagctcactgcactccagcagtcatgggacccaggatagggccagcgggtgaggtaccccaggtaccagacaaggaaaccaaagccacaatgggcacagaaaacacacctggaggcaaagccagcccagaccctcaggacgtgcggccaagtgtgttccataacatcaagctgttcgttctgtgccacagcctgctgcagctggcgcagctcatgatctccggctacctaaagagctccatctccacagtggagaagcgcttcggcctctccagccagacgtcggggctgctggcctccttcaacgaggtggggaacacagccttgattgtgtttgtgagctattttggcagccgggtgcaccgaccccgaatgattggctatggggctatccttgtggccctggcgggcctgctcatgactctcccgcacttcatctcggagccataccgctacgacaacaccagccctgangatatgccacaggacttncaggcttccctgtgcctgcccacacctcggncccagcctcggcccccctcaatggcaactgcctcagctacacagaaacccagcatctgagtgtggtggggatcatgttcgtggcacagaccctgctggccttgggcggggtgcccctttcacccctttggcatctcctaactcgatgactttgcccaccacagaaactcgccccctttaccttcggaatcctgttttgcagtgaaccatgtaagggggccaggccctggggccttttggggctggggcaagcttcattggttgcggccttt

SEQ ID NO: 360073 - DNA, 550 bp, Homo Sapiens
gggaccttctgggagcaggtgctaacatagtgttcagaatcaatatgtgagatgaaaaggatcccctccaggaggatcctgagctgttcagaaatcatttaagtttacagcgttgttccctttgcgtttgcagtgcgttttactcaagtagccagaaacaccccacgtttctgaatttgtttaaactgtaacaataaagtaaaatagaatgcatgaaagatattctggcgattgtaacttagaatttttctgacttctggatttgttggcactagaacctgatatttaaacaaagtcttactgagcagctatcaagtggcagttacaggcacaaattggtggaggctggaggatcgccaggggagcaaaccctttatatttgtgaagaaaatatctgtagctgatagaaataattgcttaaattggtttatgaaattaatgagtctgaaaaggttaaaagcacttataaaagaccaagtcctacatttccagaactttctggcaaaatttgactcatattatttatcccatgacatcccattgttttttt

SEQ ID NO: 360074 - DNA, 610 bp, Homo Sapiens
atctgttaatacattaataatgaataatatagatttaccatatgaagcaaaaaaccacttttttcctcatggcaaaggacttaatttaagactaagatgcaattaatttatttctggcatttctgctaggcagaataattttatataggggagaaaaatttccacttccctattttgagagtttgaagaaaatgacgaccatatgtagctcattttcaggtaaacctgtaggcaaaaggcttgtcaggagggctttataccaccccagcctgctagaatattaggaaaaaaatcagactaaatggaaagattctcaatgaaatacacttaaaaaacaaagaatgtaactaggatgaccctttataagcatgtcaccaaagcaaaaacaatacaagagtattcacctgagataaaacttgtatctgaatattttataactgagtagacaaagcatttcaagaggaaaatccattgaaattagtttaaaatatacatctgatcctattttacaatatatgcaatttaagcaattcagatcaatgaaaaagtcttaaccaaaaaaatcacagtgtttatcaatgttaattacaaaatgtatgctacttgtttt

SEQ ID NO: 360075 - DNA, 874 bp, Homo Sapiens
  misc_feature (13)..(13): n is a, c, g, or t
  misc_feature (27)..(27): n is a, c, g, or t
  misc_feature (40)..(40): n is a, c, g, or t
  misc_feature (48)..(48): n is a, c, g, or t
ggacccccaattnccccctacgggaancccctactccccnacctcaantaatccagttgccagagttccaggtccaaaaccccggttgtaggaggcagtgagaacccacttctttgaggacatcccaaactgttccactgggacacatttgtggcccgggttttcagtgcaacattgtgtcaaaatgtgctaaataagcttgcaaagaactctgcttacttctctaaccaagacctagatccctctgatagttaaaggacaaacttttaaaacatgaatgcatttggattgtttatgcaacacataagcattacatagtttgttatacttactgatgacaagaacaaagccagaagcaagaaacctgcttgagtatcttaaccgcgaatgcaccaagaaagaatggtgcaactcagggacggtttcatcttccccgacaaataaggtgtttgtcttttaaatatctctatggctcacaagagaggtccagagttaattgcaccaacattttaaaaagtaataataatgactaaattcaatgcaagacttcagggacatctgtttagaatcctttccacagcagcaaagaaagacaactatatttattaaggccactcatgcttaaattcactgtttgtcctttaaaaatgcaggttttcatctcccacttgcatacacgtggaagggtttcttccattgacaagaaaatggagcaatacaagagttgcacatgtttgccagactcagtcatgagttttatgaagttataacaatttaaattgtttcttaatattcagaggaagcagtaggagtttaattctccttagtaccatatcactgtatgtaaaagacctcaaaatttggtctttttccc

SEQ ID NO: 360076 - DNA, 520 bp, Homo Sapiens
ctgccttacacttggtgttgggactgtgcctggctttctttttgagagccgggcccctttgccccccaggggaaaagttaaccatgtggcttttttctttctgcagtcctttctgtagcatcctccttactgcttccgagccctgggcatcctgcatgaggcggagttcatctcacacctctgagatgcctgtgccagcatggctggagcccctggctggcagagcgggcaacttggtcctgcacattaggatggggaagctcctaataccagctgtctctctgccgccatcccccaacaccctcaggaaggggcacctttctgggcctgcctaaaggagggagcatgggtgtgagggctgcccaggcaggtggaagtacggagccttgtggggcagggtggaggcgtccaggaccttcctaggaggttttgcccaactccccctaagtgatgacaggtctcaggagggggccgcccccacacatgggagggagaagcccaccttcccagcttggggtgg

SEQ ID NO: 360077 - DNA, 701 bp, Homo Sapiens
  misc_feature (403)..(403): n is a, c, g, or t
  misc_feature (457)..(457): n is a, c, g, or t
  misc_feature (544)..(544): n is a, c, g, or t
  misc_feature (581)..(581): n is a, c, g, or t
  misc_feature (608)..(608): n is a, c, g, or t
  misc_feature (618)..(618): n is a, c, g, or t
  misc_feature (623)..(623): n is a, c, g, or t
  misc_feature (682)..(682): n is a, c, g, or t
aaaatcttgacagctatcagaatgccttggtcatagtgttgttgcaaaattgaccatacaggtggcccatgtataaaatctgaattttaggggtttgtccccacctcgcatgctggcttttacagggaggtgtctgggattcctcattagcaatcaaaacttaattactgggatgcagagtccttactttatcgccagcccgtaggcatttctgaagtgcacttttttgaaacatcattttgctaactctcagcagtgtctaattaaactgagcaatacttttgtgaattttaattaatctcagcaaaaccatgatgggagagagtcctctgatggaaatgtagtccctggattatgtgtaacctttttattgctcttagatgcagaggatagaaagcatttnttggtgcagtggtcttgtggcaaacacaagaccctctatgcgtctccaactgtnatcctaatctaggaaaatgaggactgggcccctggggaaaaagtgacatgagggaatttactctgggaagagggaaaatctggggtnggtttcccaaggctaaaggataggttttgttattttncaccctgttgggccaaggttacagaanttttggaggnttgtngggaagaatttttttgccaaccaggagggggaaagagggcctttttaacttggcctaancaaaaagtttacattgagg

SEQ ID NO: 360078 - DNA, 1321 bp, Homo Sapiens
  misc_feature (596)..(596): n is a, c, g, or t
ttctgttagaaaaaattccataaacaactgcatcactttgcatagcaattaggttccagctcacaagcgccttccgggggtgccccaagggtgaatcctgcctaaggtggaggtagaagacatgaccctggggctctttccttagccaagagcccatgagactaaggaacatcgtgcttgttgacaaagaccccggacagtctattctcttacggtcacaggctatggtgccaaggacaagtgcagactcaggatcagaaagcttgcagctatatctgctatctccatggactagcaggatggtctggaaggctgtgtcgggaaggcccttaggcctcactggggcccaggccgttgatggaaccaatgtccaaccctgagggtgcggggaatggtgcccatttgtttgtcattttcctggtcccagaccgcccttggcttggtgggccttaactttcaaaggtaaggtccagtttaacaaagctcaagttgcttgaaccccataccctaatggcaacgccttcgccccagccacttaagaagaaggaaccttgccttctgtgggaacattccacggaccgggaagtggctcaccncagcctgttctgcgcgtggtctcactaagggtccatcttcctctatctgccccggaggggaccatctccaagcatcccttgctttccttctcccacctccacccctcactgttcaataacttgagtgcatcccatttgtagagcacatgctggggccgtgggagtgaaagacgaatcagacgacacacatccacattcaaagggactcagggctcctggggaagtaagaaatgaatatcaataaccacgacatcccacaggcctgggtttcacatctgtttagcagcagtgtgaccctggggaggtcactaactggtctctgcctcagcttcttccactgaaaaacaggaatggtcccttctacatcatgggattactgtgaaggtgagaaggagctgatcatggcccatcaacctcagcacaccagtccccccagaggctgctggggaggaagaagcagggagcacccactcctgacccagattcacattcactgcttctcctcccctgcctctgtcatgaccccagggaagcagacgctgaacctgggctcttgccttcatctttatcttctccactctgggataattaagaatgacttgctaattatgcagtgatctagtgcaatgtgtaaccttcggggccaccaggtgccatcagtagagagaacaggggagaaggaaggatgagaagcgaggacaggggaaaggggacctttgcatacc

SEQ ID NO: 360079 - DNA, 647 bp, Homo Sapiens
ccccaccagtctttagtcacagcagaaactgggatcagggagtaaaaagcatattatgggacaaaacagatacatgatgtgcaaaacactgtctgcaatttaaatgtgatgtgatggaatttgggagccattacaaatctgatttaaagagaaggaactggcccaatgatgcccaagcaggaggactcctgcttctgtggtcacttatccagagaagctgacaactagtgagagcaagagttggtttcatctggcatttcccccactatctctggtggcattgtctagggcagtgaatgcctcaaaaggcaggcagcattaaagagaacacaatggatggatgagatccaagagcgaaccccaaataaatgagagtttactacatattaaaaggtacaactttagtttataaaaaattttactataaagattttcataccttttctaataggagcttggatctttttcaagtccatctgcttttccctcctttcatcaaaactgatttttaaagtaacaaactaggttagcaaaatgtaaatattttcagaaggaaaaagtgctgcaggagccatcagatttgtataaaggaatacagctccctctatatatgttattattttggacagctacacaatcaaggaaga

SEQ ID NO: 360080 - DNA, 1271 bp, Homo Sapiens
  misc_feature (47)..(83): n is a, c, g, or t
tgtatcgatcactatagggcgactggagttcaccggcggggcggcgnnnnnnnnnnnnnnnnnnnnnnnnnnnnnnnnnnnnnatcaggccaaatcggccgagctcgaattcgtcgagagcggggcaacggcagcggcgctgagttttgtctccccggccgtctgggcgcgcgcgggtgtcccagaatgaaatatgactgaggactctcagagaaactttcgttcagtatattatgagaaagtggggtttcgtggagttgaagaaaagaaatcattagaaattctcctaaaagatgaccgtctggatactgagaaactttgtacttttagtcagaggttccctctcccgtccatgtaccgtgcattggtatggaaggtgcttctaggaatcttgcctccacaccacgagtcccatgccaaggtgatgatgtatcgtaaggagcagtacttggatgtccttcatgccctgaaagtcgttcgctttgttagtgatgccacacctcaggctgaagtctatctccgcatgtatcagctggagtctgggaagttacctcgaagtccctcttttccactggagccagatgatgaagtgtttcttgccatagctaaagccatggaggaaatggtggaagatagtgtcgactgttactggatcacccgacgctttgtgaaccaattaaataccaagtaccgggattccttgccccagttgccaaaagcgtttgaacaatacttgaatctggaagatggcagactgctgactcatctgaggatgtgttccgcggcgcccaaacttccttatgatctctggttcaagaggtgctttgcgggatgtttgcctgaatccagtttacagagggtttgggataaagttgtgagtggatcctgtaagatcctagtttttgtagctgtcgaaattttattaacctttaaaataaaagttatggcactgaacagtgcagagaagataacaaagtttctggaaaatattccccaggacagctcagacgcgatcgtgagcaaggccattgacttgtggcacaaacactgtgggaccccggtccattcaagctgaacgcacccgctggttgtggaccgtctgccaggcaccacagtgagcattgtgttcttggcatgtgatctgggaaactgattgaataatacacttttcttgctttggtgctcaaagtggtttttttcccccaataaaattatttaattgaaatgcctggtgttgctgtgttggcgagcagcatcttgcagttacatag

SEQ ID NO: 360081 - DNA, 976 bp, Homo Sapiens
ggcataccgggcctcccgggaatttcgggatggcggcggcagcggcagcggcagcggcgcttgagttttgtctccccggccgtctgggcgcgcgcgggtgtcccaggtaccccgccgcctccctccttcccgcaggactcgtccctcctggccctgggccccaacggtgcccgcctgcccggcggtcggtcagcgcacagggcacggcttcctctgcttctcccggaccacttagtctcaacccgggtgtgtttgcactactagagaatgaaatatgactgaggactctcagagaaactttcgttcagtatattatgagaaagtggggtttcgtggagttgaagaaaagaaatcattagaaattctcctaaaagatgaccgtctgggaatcttgcctccacaccacgagtcccatgccaaggtgatgatgtatcgtaaggagcagtacttggatgtccttcatgccctgaaagtcgttcgctttgttagtgatgccacacctcaggctgaagtctatctccgcatgtatcagctggagtctgggaagttacctcgaagtccctcttttccactggagccagatgatgaagtgtttcttgccatagctaaagccatggaggaaatggtggaagatagtgtcgactgttactggatcacccgacgctttgtgaaccaattaaataccaagtaccgggattccttgccccagttgccaaaagcgtttgaacaatacttgaatctggaagatggcagactgctgactcatctgaggatgtgttccgcggagcccaaacttccttatgatctctggttccaagaggtgcttttgcgggatgttttgcctgaatccagttacagaggggttgggataaagttgtgagtggatcctgtagaactagttttgtaagtgtcacaatttataaccttaaaataaaggtatggactgaacatgcgaaaatacaaatttggaaattcc

SEQ ID NO: 360082 - DNA, 929 bp, Homo Sapiens
  misc_feature (51)..(82): n is a, c, g, or t
tctcgggatcgcccggcgcccgcccggcgacctggagttgatgtcacgtcnnnnnnnnnnnnnnnnnnnnnnnnnnnnnnnnctgagttttgtctcccgggccgtctgggcgcgcgcgggtgtcccaggtaccccgccgcctccctccttcccgcaggactcgtccctcctggccctgggccccaacggtgcccgcctgcccggcggtcggtcagcgcacagggcacggcttcctctgcttctcccggaccacttagtctcaacccgggtgtgtttgcactactagagaatgaaatatgactgaggactctcagagaaactttcgttcagtatattatgagaaagtggggtttcgtggagttgaagaaaagaaatcattagaaattctcctaaaagatgaccgtctggatactgagaaactttgtacttttagtcagaggttcccctctcccgtccatgtaccgtgcattggtatggaaggtgcttctaggaatcttgcctccacaccacgagtcccatgcccaaggtgatgaatgtatcgtaaggagcagtacttggatgtccttcatgccctgaaagtcgttcgctttgttagtgatgccacacctcaggctgaagtctatctccgcatgtatcagctggagtctgggaagttacctcgaagtccctcttttccactgccaaaagcgtttgaacaatacttgaatctggaagatggcagactgctgactcatctgaggatgtgttccgggcgcccaaacttccttatgatctctggttcaagaggtgctttgcgggatgtatgcctgaatccagtttacagaggggttgggataaagttgtgagtggaatactgtagatcctagtatggtagctgtcgaaatttataaactttaaataaaagtaaggcactgaacagtgagagaaat

SEQ ID NO: 360083 - DNA, 717 bp, Homo Sapiens
cccttctccagaaagcgataggcactggcggctactcctccgaaacgtcagtagcctgttttccttccgtgaaggtacgacaggtacggatgcgcatgtctaggtgcgagcatatataccaccctcattatgctgacgtggggtccatcttatggcagtagacagaagctggactcacagcaagttacgattccaaagctcacagttgaaaaaaaattgtataaacagtccccaacaaagaacattatcaaccttccctcatgaccactgagagggagccctgtttgaaaagaatatcttgtttgggatatttgtgaagtgatggcccaggatttctctctctgtttttgacacctgtttcccgaggacttttatgttaaatgcaaaacacctgaaaaatacagtactctattggaaggatgcacataagaaagttaactgcagctttatttttcccttttctgggatctattaggaaccaacagaggagatttaagagtgttaaaagcaagaaaaaaccctgaagcctcaggcagttcgtcgtgggagtcacgttatttacaagaagtttctgcttcctttcacacatttctgttgttccatctcaagtattcccaaagatcctcactgaggaaagtaggccatcaaagagacattgatgtatactcaggataggccctctagttttcaaactgagatatcaccatgttcaccgct

SEQ ID NO: 360084 - DNA, 1021 bp, Homo Sapiens
ctggtaccggtccggaattcccgggatgaggagcttgcagcattgagcggaaccggacttgagcccgtgatgtccggcaccaaattggaggactcccccccttgtcgcaactggtcatctgcttcggagctgaatgaaactcaagagccctttttaaaccccaccgactatgacgacgaggaattcctgcggtacctgtggagggaatacctgcacccgaaagaatatgagtgggtcctgatcgccgggtacatcatcgtgttcgtcgtggctctcattgggaacgtcctggtttgtgtggcagtgtggaagaaccaccacatgaggacggtaaccaactacttcatagtcaatctttctctggctgatgtgctcgtgaccatcacctgccttccagccacactggtcgtggatatcactgagacctggttttttggacagtccctttgcaaagtgattccttatctacagaccgtgtcggtgtctgtgtctgtcctcacactgagctgtatcgccttggatcggtggtatgcaatctgtcaccctttgatgtttaagagcacagcaaagcgggcccgtaacagcattgtcatcatctggattgtctcctgcattataatgattcctcaggccatcgtcatggagtgcagcaccgtgttcccaggcttagccaataaaaccaccctctttacggtgtgtgatgagcgctggggtggtgaaatttatcccaagatgtaccacatctgtttctttctggtgacatacatggcaccactgtgtctcatggtgttggcttatctgcaaatatttcgcaaactctggtgtcgacagatccctggaacatcatctgtagttcagagaaaatggaaagcccctggagcctgttttcacagccctccagggcccaagaaacgcccaacgaaactccccggaatgaacgcctttgggccggcttgaaaataaagaaagaatccccagccacaaaaggaaaaaacagccccccgcaatggtttctaatggc

SEQ ID NO: 360085 - DNA, 1312 bp, Homo Sapiens
atgcacagtgaagaggaaagaaaagcgaggggaaaaaaccttatttattcaaacagtgcaaatggccccagcgtcagccccgaccctagacccctcagttgcagctcccagcagcccagacagagctgccggcgcccctgcctgccccacatcccttcctgtcagggccacgcctggcacccatcccttggagcctgtgctggttctcccagctgctgtgggtgtgctggggccagggtgcactgctgaaacctggcctctctggccctaggccccagggtgacgtcggccccccactctgcagccttggcgggtgcctgggactgggtgtggaaggaaaggagctgaggccggggtgtagcaggcaggcagggccactccagtgcttctggagccctgagcagtcagggcctgggttgtctgagcagtggtggctctgtgccctccctggaggatgggatctgggagtctgagctccccgcatctggccctgggctgtgtggcacttgctgagcccaccttctcaagtgcttgctcctgtgagatggcatcggggagccccttccccaaggtgccacagatccaccctccagggagctgccagccctgtgttctggttcccaagggcaggatggacacacgtcacatccctaccacgtggcctccaaagggagccacggaggaaaggcttctgtggttgctaggtgggggagtcctgtgtgggagggcctgaagacccctgcttgtgcctggtgaggggggtgctgcctcccccagcccccaacaacctctcagacccccaccctccaacatagctgagttctgaagatggtgctccggacctgtcctcttaagtggtgaccaagtgccctccccaccccacgttggtgctctcagatagaaggtgctgtgcccatctgcatgagccccaagccccgagcctggccttcaggacaggcagcctgctctgtgtcgccacgggccggatacgccacagggataatgatggcagagacggccgagatccctggactaaaacaagacacattcttataaacactgtaattaccatacttgcactccctctagggtgacagtggcacagacacggagtgcacaatcaacgaggtaccatgcagaatgtgccaatggacgaggatcctgccccacgacatgcagtcaaacgaaatgttcacaggaacaacgcacatgaagatatcaacaagccacatggcccatagcaatgaaatcctcctatgtaacaccaacatgaggtcaaaatagcgtagtaccaaaatgatgaacatagata

SEQ ID NO: 360086 - DNA, 695 bp, Homo Sapiens
acagtgctgatgccctggctgagtgagcctgtgtgtcggggctgagggccccctgtgatgtgggtatgcagcagaccgactggtttgaatgggtaagaaagagctgtagcatcccttcaagggtgtctctgaaactggatgatgaatgttggaacccttggtttcatgtttttcttttgccttgtgtttgaaagtcgtttcctcaacaagcctacatataagtttaactgatgcgtctaggctgccgtgcatgtcgactctcggtgcggggctggctgtctggctggcgaggagctctgcgcttccttcacatgctcttgttttccagctgctttcctgggggatcagactgcctgaagacggatcctccaaaaggaactcagctgtcatgaatcgcctcccaaggaatctcgtcaatctcccctggaagccccgggaacttcgaagtaggcttctgtggactcctgccacttcatcagtagctggggccctggtaccagcacaaactgcttgcatccaactgacttcaccagacatacgggcgtctttggtaagaccgctctcaggttttgaatctcccaggtttgggctgagattcagattttatttaagtaaatgaatttcatgctcagtggggctgatattgaagccgccatttagggctttaaggcaggagtttcgcgtcattccccgct

SEQ ID NO: 360087 - DNA, 1740 bp, Homo Sapiens
  misc_feature (77)..(78): n is a, c, g, or t
ggcacgaggcgcaccttctctgtgagagtcaagtcagcagcgcgtatgcacaggcaataagagaaagaaagagatgnntgttactggcacactggttaaacacagtcttaaagaagaagaaaatggtaccgccgcaccgagcccttcacttcccagtggccttcccaccaggaggaaagccatgttcacagcatattatttctgtgactggatttgttgatagtgacagagatgacctaaaattaatggcttatttggcaggtgccaaatatacgggttatctatgccgcagcaacacagtcctcatctgtaaagaaccaactggtttaaagtatgaaaaagccaaagagtggaggataccctgtgtcaacgcccagtggcttggcgacattcttctgggaaactttgaggcactgaggcagattcagtatagtcgctacacggcattcagtctgcaggatccatttgcccctacccagcatttagttttaaatcttttagatgcttggagagttcccttaaaagtgtctgcagagttgttgatgagtataagactacctcccaaactgaaacagaatgaagtagctaatgtccagccttcttccaaaagagccagaattgaagacgtaccacctcccactaaaaagctaactccagaatggacccctttgtgcttttcactggattcgagcctgtccaggttcaacagtatattaagaagctctacattcttggtggagaggttgcggagtctgcacagaagtgcacacacctcattgccagcaaagtgactcgccaccggaaagttcctgacggcgattttctgtcgttgaaagcacatagtgacgccagagtggctggaagaatgcttcaggtgtcagaagttcattgatgagcagaactacattctccgagatgctgaggcagaagtacttttctctttcagcttggaagaatccttaaaacgggcacacgtttctccactctttaaggcaaaatatttttacatcacacctggaatctgcccaagtcttcccactatgaaggcaatcgtagagtgtgcaggaggaaaggtgttatccaagcagccatctttccggaagctcatggagcacaagcagaactcgagtttgtcggaaataattttaatatcctgtgaaaatgaccttcatttatgccgagaatattttgccagaggcatagatgttcacaatgcagagttcgttctgactggagtgctcactcaaacgctggactatgaatcatataagtttaactgatggcgtctaggctgccgtgcatgtcgactcctgcggtgcggggctggctgtctggctggcgaggagctgctgcgcttccttcacatgctcttgttttccagctgctttcctgggggatcagactgtgaagcaggaagacagatataataaatatactgcatctttttaagatgtgcaattttattctgaggaaacataaattatgttttgtattatatgactttaagagcccacattaggttttatgattcatttgccaggtttttaaatgttttcacaaaactgttacgggacttcaactagaaataaaatggtgtaaataaagaccttgctatctctaaattatggatgttaaagatttgaaatgttttgtactttgattatttttatttcttatactctgttttcttttatattgatatcttgcccacattttaaataaatgtacttttgaacttag

SEQ ID NO: 360088 - DNA, 531 bp, Homo Sapiens
  misc_feature (269)..(314): n is a, c, g, or t
  misc_feature (371)..(371): n is a, c, g, or t
  misc_feature (402)..(459): n is a, c, g, or t
  misc_feature (492)..(493): n is a, c, g, or t
gtgtccttagggtttcaagaattttaatgcctagcagctgagtaacaggcattagttctgatagatagtgaaggggagaaagtgccacctgttgtgagatcacctctccagggcagcagctgccttgttatcaccagcaaccttagccctggtcagtaatatttctgctaagaaaggttttgaagcatggcctccaatgactttcataagcccttggaggcaggactgtgtctcatccatctttgtatcttcagtaccatcttgtaagnnnnnnnnnnnnnnnnnnnnnnnnnnnnnnnnnnnnnnnnnnnnnnttagctgtcgtccagccccacagagttatgctccatttgccaccatgtgatattttntgagaaacaatagtgatttggatgccagctnnnnnnnnnnnnnnnnnnnnnnnnnnnnnnnnnnnnnnnnnnnnnnnnnnnnnnnnnnaagtgagtagattcaatgctccctaaggtcccnnccagctccaatacttgacaagcttgtgattctaaatcg

SEQ ID NO: 360089 - DNA, 719 bp, Homo Sapiens
  misc_feature (515)..(515): n is a, c, g, or t
  misc_feature (535)..(535): n is a, c, g, or t
  misc_feature (586)..(659): n is a, c, g, or t
ccagtgttggtctgtggcacttgggctgaaaggtgataatggcattgcgtggtagctgacaatgagcaccttcggttccatgtggagcggggtttagctcatgcaaaagacttgcaattgtctccatgggacgatcccagtgggactgtcagcccacagctcgagtgggttggatgcttgcctctttcctaacagttatttccccgggtccagcttaaagactcgatggaaggaggtagaacctctgctgttactgcttgaacttaacctgggaaaggagaggaagacaccatctccaaagctattaatgtcactccttttgcgagcatgattaggccccggagatttccaagtccccccatctacacttacaaacgattagaagggtttaattttaaagactttctggttacactactccacgaactcctccaaagatccgttattcaataactgcctagaaaatgtttccatctcctctaaatccctgtgttctcctctgtggaaatgaaggncagcaagaagcacctgaggnccttggttcatgcagtgttctcttttgactaaatcacctaggttcctttannnnnnnnnnnnnnnnnnnnnnnnnnnnnnnnnnnnnnnnnnnnnnnnnnnnnnnnnnnnnnnnnnnnnnnnnnggctttgggcctagtagttcgagtccagcctgggcagcatagtgtgagaccctgtctctt

SEQ ID NO: 360090 - DNA, 1068 bp, Homo Sapiens
cgggggaacctggattggcacatgtgaagccaggccttgagggcgggagaagatgggagaggaaatggcggaaccccattggtgctgtaacagagacacaacttggcagaaactggcaggactgcggaatctgcgggatcaggaagcgcgtaggcactcccggggcgtgctggtgcaggtgctgctggagagagagctggcctgagctgagccgccgagctggacaaggacctgcgggcaaattgatgacccgactgccggtcccccaagagctcgcctggctggcccccgacgggcccccggagcaaggtgggtcccccggggcctgggccgggccctcagccttgggagctccagactacccaacagttgcaccttacctggggttccgccccggtccctgatgttcccaacatagaattggcttgattggacgggacgcccctttcctaggtacgtgaggggaccttttgtactaagccctttcctccaagcccgtaggatccctaagttgcgctcttaaccgtgcagtggtggggtcaagtcccctattcccacggggacgggcacacgatggacagtcatcggagtgcacatggggcccgcccagtggtcttccaggttttggaacctatccccaggtgctcggcagatttcctcccccgaaggtgaaggcctatggaacctccttgtcgggcacacggtgttgaacactttggtttcttacactctccctaccgagggtcagcgggttggcgaaccaccgcaaaaccttgggggctacggtaaatgtggggaggaaaggccacctcactcggtgtctcctgctccttttggtgtcggatatactttattactccgttgcggtaaataataattagtttggttgaagaaggcttaactgtttagcaccccgtgtgtgtaatgttagcaaaatttcagcctaaaagctgccgcattcaatagagggcgccccgtgaaagcgttattaccaagtgagtttgtcagttgaaggtaattgtgcgtagacagcactcgtgtccacccagtataagtactccatctacg

SEQ ID NO: 360091 - DNA, 815 bp, Homo Sapiens
agcgggggtgggtcggaggcggggcccaggtggtgttgatacacaaagagaaggcgcccgggcggccgcggtcccgcccactgacgcgtccccggtggtgccgctataacccgccgctcgcagggctgctccacagccgcgcgacgccgccgccttagaacgcctttccagtactgctagcagcagcccgaccacgcgttaccgcacgctcgcgcctttcccttgacacggcggacgccggaggattggggcggcaatttgtcttttccttttttattaaaattatttttcctgcactgttgtcggatatggggaacatttccatgtatgtatttttatgatttgtatttgactggagagaaacccactgaagacgtctgcgtgagaatagagaccaccgaggccgactcgcgggccgctgcacccaccgccaaggacaaaaggagcccagcgctactagctgcacccgattcctcccagtgcttagcatgaagaaggccgaaatgggacgattcagtatttccccggatgaagacagcagcagctacagttccaacagcgacttcagactactcctaaccccaccaagcaagctgctctgaaaagccattatgcagatgtagatcctgaaaaccagaactttttacttgaatcgaatttggggaagaagaagtatgaaccagaatttcatccaggtactacttccttgggaatgtcagtatttaatctgagcaatgcgattgtgggcagtggaatccttgggctttcttatgccatggctagtactggaactgctctttgataattctcttgac

SEQ ID NO: 360092 - DNA, 390 bp, Homo Sapiens
gaaggcaggagcaaactagagagagagagaagaaaagtcgtggccttaccaacaacccaaaagccctgaattctctggtgagataggcaactctggaggttgaggcagctgtagctcagccaagaattagaaggatgattctagatatttaaaatcaacagcatccccacccacgtaacccaccttcaggaaccagtagctttaaccaagagaacaagaaactcaatgagcagcagcctcaacaactggctctttcctcctgggtaaggagagggcagtggggaaggacggtgcctcaaagggaagtggaggcgctatcaatctggcctagacaggtaggttgactgcttttacatgggtgggctggggcctggtctgggacccctgctc

SEQ ID NO: 360093 - DNA, 652 bp, Homo Sapiens
ccgacttcccctcgaaacgcctgcccaactggaggaccagagggttggaacagcgccggcagggcttggaggcttacatccagggcatcctgtacctgaaccaggaggtgcccaaggagttactggaattcctgagacttcggcacttccccacagaccccaaggctagcaactggggcaccctgagggagttcctgcctggcgacagcagctcccagcagcaccagcggcctgtcctgagcttccatgtggatccctatgtttgcaacccctccccagagtcgctgcccaacgtggtggtgaatggtgtgctccagggcctctacagcttcagcatcagcccagataaagcccagccaaaggcggcctgtcaccctgctcctctgccaccgatgccctgatcagtccagaggcctttggctgcctcctaagaaagtcatgtgcctctgtcctatgaactccatataaggctgggtcctcctttggcctggacccaggacttaattacccagtgcccagttgtgccacattcccactcaaggctcagaacttggctcgcattggtagctggaggtggtagaatttgtatgctcttagagcccaacagccaaggcagggtcaagaagataagtaataaaagaggaagtcagcc

SEQ ID NO: 360094 - DNA, 930 bp, Homo Sapiens
agcgggagccgagcgcgcggagcagctggggccggggcgcggatgctggaagttcacatcccgtcggtggggcccgaggccgaggggcccaggcagagcccggagaaaagccacatggtgttccgagtggaggtgctgtgcagcgggcgcagacacacggtgccaaggcgctacagcgagttccacgcgctgcacaagcgggtgaggcggcgccgacctcccaccggccccggcccagcctctgtccagcccccgcccaggccctgtgaggcgggcgggcgagccccagcctcctgcaccccattactgcctcagtccctgcgcagccggtcagcccccgggtctctgtgggtgggttggggccttcctcgccctcggccggtccaccactcaaccagggtctgtcccagtagagcccgaaggcgggggcgcgggagggcttctggctggggcgaagagggcttgagggctcagctcgggatgcttgtgatcgcacgcggtaaaacctccagtagatcaagaagctgtacaaaagtgcccgacttccccgtcgaaacgcctgcccaactggaggaccagagggttggaaacagcgccggcagggcttggaggcttacatccagggtatgcgagagccacagctggttgcccacaccggcacttctgtgccaggggtgatggcccagacagagaggtgctggcggcatggcaggaaggcaacccaaaactagcggatgtatacagcgactccaagcatcaaatggtctgaggtctagtaataggtccaaaacgaccgccctctggattggctgaacaggactgaacagagcgtaccggcacccggtagtcccaggtccatgaacaccaggtcagtacgccactgctgacgtactggtgcctccgatgctgaacgcaaggagctcaccaaca

SEQ ID NO: 360095 - DNA, 638 bp, Homo Sapiens
  misc_feature (299)..(331): n is a, c, g, or t
ggtattatgtgtgaagtaatatattgtacaagtaataaatgtattgttgagatatattgacactgaggagcttataaaaacaagtcatcttaagttcacaattgctacaagaagaaagttgtggataactaggaaattattgtaagtaatgttttatttcagtacttagcaattagagttcttttattaagatgtatctgctggattaagggtacaggttgaaatagttctgtggctgtcctaagaaataatgggaaaagaatctctggatgtaagtctttctgttgaaactagagggnnnnnnnnnnnnnnnnnnnnnnnnnnnnnnnnnaatagcaatgtgtttttattaaacatgctgtgtgccacaggccagtgttgctggtgaaatatataaacatttatttaaagagaaaagttaccagtatctacacctcttaaaaaacattgattggtctaaaaaatatatagataacatcctaagttaacatatggcttcttaaaacttgggcacttttatttgtttttatcccaaattcatgttttaaggcctttaaagaatagtcagaactgataaagaagtgccaacagataagctatagcggtggttggctttagtttccctctggagcagctat

SEQ ID NO: 360096 - DNA, 502 bp, Homo Sapiens
  misc_feature (237)..(237): n is a, c, g, or t
caggctcggccccgttctgctctgaaactgggcacttttatttgtttttatcccaaatcatgttttaaggcctttaaagaatagtcagactgataaagaagtgctaacagataagctatagtgggggaaattggggggttttttttaaaataaagaaatgtttaatttttgtcccttatatttaaacatggatggaatttgtaaaccttggcattgattgtaattcctgcccttttngggaagaattttttcctccccagcatgttagctgagaatattcctctattttataaataatatgaagtaggttggtctctctgcttctctataccaggacttcttagctcagtatcatctcccttcatgtaagcagcacgttttaactcttaggaagctgaatgttgtgttatcactaatactttgtacaggtcacctgcctactctaattgtccttagtacttggacaggctttatccattaaagagtgttctcctaaaaaaaa

SEQ ID NO: 360097 - DNA, 1547 bp, Homo Sapiens
  misc_feature (54)..(54): n is a, c, g, or t
  misc_feature (147)..(147): n is a, c, g, or t
gggaccccggacccggaggtcgcggagagctgggcagtgttggccgctggcggnagcgctggggcagcatgaagtgcctggtcacgggcggcaacgtgaaagtgctcggcaaggccgtccactccctgtcccgcatcggggacgaanctctacctggaacccttggaggacgggctctccctccggacggtgaactcctcccgctctgcctatgcctgctttctctttgccccgctcttcttccagcaataccaggcagccacccctggtcaggacctgctgcgctgtaagatcctgatgaagtctttcctgtctgtcttccgctcactggcgatgctggagaagacggtggaaaaatgctgcatctccctgaatggccggagcagccgcctggtggtccagctgcattgcaagttcggggtgcggaagactcacaacctgtccttccaggactgtgagtccctgcaggccgtcttcgacccagcctcgtgcccccacatgctccgcgccccagcacgggttctgggggaggctgttctgcccttctctcctgcactggctgaagtgacgctgggcattggccgtggccgcagggtcatcctgcgcactaccacgaggaggaggcagacagcactgccaaagccatggtgactgagatgtgccttggagaggaggatttccagcagctgcaggcccaggaaggggtggccatcactttctgcctcaaggaattccgggggctcctgagctttgcagagtcagcaaacttgaatcttagcattcattttgatgctccaggcaggcccgccatcttcaccatcaaggactctttgctggacggccactttgtcttgcccacactctcagacaccgactcgcactcccaggacctgggctccccagagcgtcaccagccaagtgcctcagctccaggctcaacagcacaccccacccggacgaatttgccaatgacgacattgactcttacatgatcgccatggaaaccactataggcaatgagggctcgcgggtgctgccctccatttccctttcacctggcccccagccccccaagagccccggtccccactccgaggaggaagatgaggctgagcccagtacagtgcctggaactcccccacccaagaagttccgctcactgttcttcggctccatcctggcccctgtacgctccccccagggccccagcccttgtgctggcggaaaacagtgaggggtgaaggctgaaccaagaacctgaagcctgtacccagaggccttggactagacgaagccccggccagtggcagaactgggtctctcagccctgggggatcacgaaaggtgggcttgcctggagctgagctgtttcactgcctctcgcagggcccagcctggctgtcactgtaaagctgtccccagcggtcgggcctgggccgttttctccccccaaccccaggcatcaggacttcccgactggccctgaactatgacgtctacccctatttctcctgagcccagggttatcccgggccaggtgaaccttt

SEQ ID NO: 360098 - DNA, 2128 bp, Homo Sapiens
  misc_feature (666)..(679): n is a, c, g, or t
  misc_feature (1003)..(1015): n is a, c, g, or t
ttccagagcatagccttttggtaactttctaggtaatcttgcaatctctccatactggctccatgttgaaattgctttttccctcaggaccctgggtaagatggctacatttgaggtgactctgaatggtggggttctagcttggtcactttcatttcttgccatcataaaaactagtaggctgtggagtgcgcttcctgtttgtgtcatctggtcgtagaaccttttccaaacagaagcatctgcctttggctgttctgtgacctttgaagccagtctcagtggtttaggcagctttgcagttctaactctagctagaggccaggctgtgtgcagagctaaagcacaaatgagcagtacatcagcatgggcagagaaaatacaggactccagatgggaaggttttaagagtcacactggcatggaaggcttatctgccattctatttatagcctgaaatgattctggcctaccctgtcctgtctgtatgatctaaaaaccagccttttccccagaaggctctgagcacatccagaagtgataacctgaccctccacaccaaagacaccctggtgctgctgctggtgagactggtgtccaaggcagggcccagcagaaactgcagcctgctgtctaccaaaggaggtacccgagttgggtactttnnnnnnnnnnnnnncctgcccttacccctctccctaatgggattttttttacctgttcctgggcccattacagagcctctgaagtttgcagtatgctttcaaatgaaataatatacttccattgattcaggaagcagattttttgatgtgcctatatgtgagacagtgtgctggttgaaggcctgatgctgttattccaggagactgcaggcccttgatgccaggactctctctactaaggccagttcaggtctgggaaagggagctggcctattgcccaccacctgttgtcagtaggttaggagctgttgactcaggatgaggaagtatggtctttnnnnnnnnnnnnntatattttagatttctcccctaaagttagttagagaaaaaggtctattcttcagcagatcactgtggcccctcttggagctgggtgttttcaaattttcttgaaaagtgagttgtgtcacagaatgtggatagtgagatttgcttctgggcctgtggttggacgcccacagcttcctttggaggggcaagaagttggcctctcggttgacattccagagaaatggccagacttgcccctacccttttgcccctggtgtagctgcctcacatgaggttattgcaagagttccccttgcaataccctttgtgccctcaagaattaaaagcctctatgatccagagttgctatgcaccaaattttgatgccttctaaataccttgatgcctgtagcactagaaatgctttcctatttaaaataaacattaaattttaaaatagagctttgtatactatgtaagcagttttatatcagctttgtaaaagctttggtgttaagagtcaatattttttggctttgtagataaagacttaaatttttgtgcaacatagtggtgttaaagcacacatccattggactatgcaaatcaatttctactagcagcactgagcaactgggcacgtgctagtacgcaccccctcctactctaactgtgctagctcttgggttgaggaattggaatgggtagccttctgcttactggagatgcacagagaaacatggctgaaaacagctttaaaaagaacatgtctttgggttcatgtgtggtgctgctgcccgggtgtaaactatccccacccagggccagccattatcaccagacctcttctgggcctggctgtgaagccctgtttttggtattcagaatggatctttaaggctcagatgggctcaaattgaaaccttgtgttttataaaatggatgtttagtaaaggaactggttctcagttatgtttacagcacttggaattgtgtgttcttgtacattttgtattttaaaaccttttatgggagtgcagtgctccttacacaaatacaaagggaagaagagccagcagttgaggctcctcagttttagtgctgaaataataaacagtgacaggtcaacagta

SEQ ID NO: 360099 - DNA, 1076 bp, Homo Sapiens
  misc_feature (501)..(559): n is a, c, g, or t
  misc_feature (1008)..(1008): n is a, c, g, or t
caagggacactggactggttcaaggggaaggaaacaggaagtgtctcagctcagccaaaggaaggcctctgtctacctggattggcaaggaaaaggctcaggtggccaaaaactccctctttccttcccccctggggaagcagtggttccacaggaaaggcaatcccactcttgctggctagggggcctcccgggatggcaaaagccagggccaacctgagctcctgcctggggcctcttctgggatgcactctgagtttggggattgtggattgtgggttcactgcttccataacgttctaattacctgcatgtgagcctagacctcaaatccttaattatttttaaaagggcagggtgggggagtggcttaagagggaatgagacacagaacaatctttccacagcccccatctgcctaggctggggctgtcaagggtctccttcaccctgtctcctagggatatttaaaggcagcttttatgagactctatactgtcnnnnnnnnnnnnnnnnnnnnnnnnnnnnnnnnnnnnnnnnnnnnnnnnnnnnnnnnnnntatagatatatatattcttaaaaaagcaatagtcctttggtccctaaactctaaggaatgatatgattttgaaagaagtaaatctgggcttcccttgcggagaagcccttggcacccccaacgccctctgctggttcccctggacagtcactcctcaccagccctatttgctctgccagcctgcgctctatgctgcaggcacagaacaacccacttgataaaaacaatccttagagtggccttagccccaggcaccagccttgggtccgatccacctccgtccgcagctgctccttcgggaagggctgctcaagcgtttctgtgcttttcctctcctttcttctcactcttctgtttctttctgtggctggtcagtgaaagcaggtcagtaaggccggttggcatccttgggccgctttagctggaccttgagcctcttcatgccaatntgaaagccattcatcgcctgaaatgcagtctgggcactaggttgattgtcaaaactaacaaacccaaa

SEQ ID NO: 360100 - DNA, 1140 bp, Homo Sapiens
  misc_feature (54)..(85): n is a, c, g, or t
  misc_feature (1040)..(1040): n is a, c, g, or t
gctggaccggtccggaattcctgcgatcgcgggcggaatggggactgctgctcnnnnnnnnnnnnnnnnnnnnnnnnnnnnnnnncggggagggggcgcgtagtccgacccccgccgccgtgtcgctcggcctgggcgtggccgtcgtgtcgagcctggtgaacgggtccacgttcgtgctacagaagaagggcatcgtgcgtgccaagcggcgaggtacttcctatttaacagacattgtgtggtgggctggcacaatcgcaatggctgttggccagattggaaacttcctggcttacacggcggtccccacggtcctggtaacccccctgggcgcccttggagtaccgttcgggtccattttagcttcctatctcctgaaggaaaagctcaacatcttgggcaagttggggtgcctgctaagctgtgcaggctccgtcgtgctgattatccactccccaaagtctgagagtgtgacgactcaggctgagctggaggaaaagctgaccaatccagtgtttgtgggctacctgtgcatcgtgctgctcatgctgctgctgctcatcttctggatcgcgccggcccatgggcccaccaacatcatggtctacatcagcatctgctccttgctgggcagtttcaccgtgccttccaccaagggcatcgggctggctggcccaagacatcttgcataacaacccgtccagtcagagagcccctctgccttgtgcctggtactcctggccgggctccggctgcagcatcatcgtccagttcaggtacattcaacaaggcgctgggagtgctttcaactccctcggtggtccggggccattctactacgtcgttgtttaccacgctgggtcctggctggcctcaacccttcccccttccggaaggggaacaacccggggccccggtgcaacttccttggggatggcccggtggaatatccgacccgctctccttggggatttgttctttttgccggggcttaaacgagtttcgtttcccactcttggggggaaatcgaccagacnctatttttctgcacagatttgcaattgcctctgcagcgcttcgaaggtactccagggaatttggccttctgacgcggggatttccgggcccgtctacttg

SEQ ID NO: 360101 - DNA, 1301 bp, Homo Sapiens
  misc_feature (15)..(15): n is a, c, g, or t
  misc_feature (39)..(39): n is a, c, g, or t
  misc_feature (46)..(46): n is a, c, g, or t
  misc_feature (59)..(59): n is a, c, g, or t
  misc_feature (75)..(75): n is a, c, g, or t
  misc_feature (80)..(88): n is a, c, g, or t
  misc_feature (95)..(95): n is a, c, g, or t
  misc_feature (105)..(105): n is a, c, g, or t
  misc_feature (121)..(121): n is a, c, g, or t
  misc_feature (159)..(159): n is a, c, g, or t
  misc_feature (166)..(166): n is a, c, g, or t
  misc_feature (242)..(242): n is a, c, g, or t
  misc_feature (405)..(449): n is a, c, g, or t
aaccccaggcctacnccagggtcctcagggtgtttgccnggaagtnccccagtaccatnagaaagtggcctccanagttnnnnnnnnnagattgnccctcgcacnggtcaggtttccatcnacgccctgttatgttgtgaaatgtataactgaagaagnggacagnctttgatttccataggtggctttgactcttatggctatcaagggcctcagaagacatcctcatttacaactacagncctatgtacatgtcaaaataatacagatgacttcagtatgtcagcccatggacctttcaaagaacttttttcgcagtggcctcctgcatttcatgaagagcaagaagcaactgagtttaaatacatacacgtattaacaaaacaaatgcaaagcctctacatnnnnnnnnnnnnnnnnnnnnnnnnnnnnnnnnnnnnnnnnnnnnncaattccacttgacctcctctttctaactgaaacagacaaatatgcaggacacgcccatcttggatttcctgaaagcaggcccctttctcccaggccttcggaaagttcagaaggagatgtgttgatgcccaacggttcccggcccattgctaactcctctgcaggcccagcgggttggcctctgtgagctgggaagtcatccaaggcacattagtttgagagctctgtcttctgcactccatacatcttgacagcaccacggctacttaggcaatgtaattgcaaaaacaaacgaaacatgccatgatgaccttgtacccgaagtccgaaatggcagattgtttgccctaaaggctgtaccgtacatacttgccttaacccacctacattgtgtgcccaagaatcccagtgcagacagccccaagccacttcctttaggctaacacactgctattaattctaaatgagttcaagcctgtgtgtttcatgtcaaggaacaagactgaatagctcagcagctccagtgtgtctgtataagaaaagtgccagctgtcagcaaagtgctttaccatagagcctccatggtggcccaaaagagacaagtaacaataacaatatctgtcatctttataattctaaaatatggtcttctgatggggttgggggtgggacagagtaaaacattaatctactaaactcactaatctactggaagcagaaagcagaaatggcttaactcgctgattttatttatagcactctaggtgcttttataagtatctacaattgtcttttactaacacagaaacagacaattgtagatacttataatcccagggaattccggaccg

SEQ ID NO: 360102 - DNA, 789 bp, Homo Sapiens
ggagatcagatgtttttatacccttcacttgatcaatatatttggaaagaatgtttatcaaaagtctatgtcactgcttctacagaagaatgaaattaatgcttaggtgatggtacctccacctacatctttttgagtgcattcaattatgtattttggtttagcttctgatttaacatttaattgattcagtttaaacatgttacttaattagcaaatgtagaggaaccaaaaaaaggtgaaaataatatgttttgattcaaacctaaagacataaaaacataaagacattttaactttgggttctctttagctgggatctggccagaaggaggcttaaagttagaaattgctattattttagaataggttgggtgggttggggggcaagggtgtctatttgcagcagagatattttgaaaagaagaaaattgttttatataaaaaggaaagccatgaccacctttctacctcagatccatcttcatccattgcattggaaactgctttatgctgctgcagtctgcaaagtctagagcttttatcaggccatgtcatacccaagaaagcacctatttaaagaaaaaacaattccctgagctctcaactccaagttgtagatttggtgtcttccttgttcttactttaaaaagtcatgtgttaattttttttctgcctgtatttgtatgcaaaatgtcctctatctgctattaaagaaaagctacgtaaaacactacattgtaaccttctaagtaataataaataaaaagaaatatattgcagtaacaa

SEQ ID NO: 360103 - DNA, 835 bp, Homo Sapiens
gctggtactggcccggaattccgggatatgtcgaccacgctgtcgggtatgcatataagctgcgtgctcgggctgcgcctccctgcgggggaccggtccggctcctggccgccctgttggggcaatgctccccggggccgctgggaatgagccagcgatcctgaactgtgttcctgcccacagtgactcggccggtccgggcatggcagacccagtggcgggcatcgcgggttcggcggccaagagcgtgcggccatttcgctccagtgaggcctacgtggaggccatgaaggaggacctggccgagtggctcaatgccttgtacggcctgggtctcccgggtggtggcgatggcttcctgacagggctggccacgggcacgaccctgtgccaacatgccaacgccgtgaccgaggctgcccgtgcattggcatgccgcccgcccggcccgaggtgtggccttccaggcgcacagtgtagtgcctggctccttcatggcgcgcgacaacgtggccaccttcatcggctggtgccgcgtggagctgggtgtgccggaggtgctcatgtatgagacctgaggacctggtgctgcgcaagaacgagaagagcggtggtgctgtgcctgctggaggtggcgcggcgtggggcacgcctgggcctgctggccccacgcctcgtgcagtttgagcaggagattgagcgggagctgcgtgctggcaccccgcagacccacaaagccccatgacgatggggaggacaaccactgaaaccgaccccgaaacagcggaatcctgcccgaggacccgaaatgaaaaccagagaaactgcgcaacct

SEQ ID NO: 360104 - DNA, 1743 bp, Homo Sapiens
  misc_feature (1529)..(1543): n is a, c, g, or t
  misc_feature (1626)..(1662): n is a, c, g, or t
cgcggcggtgccgtttatctggccaggcgaggtccacccgggaggaggtgactttgcagcctccagccgctatcgcttcctgacttcatcttgggaacaggccgtgctgtgcgccagcccggggagcccaccgtctggggaggggggcgattaaaaggtcccaacctcctccccaggagaccaaagaggttggacggggccccgggtactaggctgggtgggggttgggcgcctgggccggtcgcagttgtctgggggccctggggctctctgcgtcgagagcgctcgaagacccgggattcctggcccgatcgcgggcggggggagaccccagctcctccccagctcccgccggctcggggaaggggcggcccctttaagagcgcgcggccccgcccgccccctccgggcaggatccgaattccagggaggcggggcggagacggcggcgaggaggaggccgcggcgcgggacgcatagagctgcggctcgggcggcgcctccctgcggcggcccggcccggctccggcccccgctggggcaatgctccccggggccgcgggatgagccagtgactcggccggtccgggcatggcagacccagtggcgggcatcgcgggctcggcggccaagagcgtgcggccatttcgctccagtgaggcctacgtggaggccatgaaggaggacctggccgagtggctcaatgccttgtacggcctgggtctcccgggtggtggcgatggcttcctgacagggctggccacgggcacgaccctgtgccaacatgccaacgccgtgaccgaggctgcccgtgcattggcagccgcccgcccggcccgaggtgtggccttccaggcgcacagtgtagtgcctggctccttcatggcgcgcgacaacgtggccaccttcatcggctggtgccgcgtggagctgggtgtgccggaggtgctcatgtttgagactgaggacctggtgctgcgcaagaacgagaagagcgtggtgctgtgcctgctggaggtggcgcggcgtggggcacgcctgggcctgctggccccacgcctcgtgcagtttgagcaggagattgagcgggagctgcgtgctgcacccccaggccccaacgcccctgccgctggggaggacaccactgaaaccgcccccgcaccagggactcctgcccgcggcccccgcatgacaccccagagacctgcgcaacctccgacgagctggtgagggatattctgggccgctgcacctgccctgaccggtttccatgatcaaggtctcaaagcggaagtaccgggtggggggatccacgctcgttcatcttttggctgtcgccgaggacccaccctaatgtttgccaacgggcggcgggatgcgtacccccccgacgttttacccaggcccgccccatatccctacgcccgccgcctccccgccctggttcttgaccccaaccccaaccccgagcctctgttcccacccacccccatcatcagggccgcccgctcaccattattccctcgctnnnnnnnnnnnnnnnattctcgccccgaaccctccaatataccctcctttcccccgcgatcgtcacttccccgctcgttccccctactgccaagcctnnnnnnnnnnnnnnnnnnnnnnnnnnnnnnnnnnnnnaccatacgcccttattagcccgtcgcctatccccgccccacatggattataagaagccccaccatgccgttttagtttata

SEQ ID NO: 360105 - DNA, 754 bp, Homo Sapiens
  misc_feature (285)..(285): n is a, c, g, or t
aaacaatcttctatttgaactgttcatcagccaaagtagtccactgaggtgacaaagctttcagaaatacaaagatgggaagataaaggtaacactggcccacttggggctttgacattggattgggtggactgaataaacacagcctaggtggcctgggcttgagcctcacttacttctccttgatacatagttcctggtctaccttctgaccctttttctaaaatagccagtgtctatttcactaggccatttacttacaagttcccagcttttagggaaaangagggaggggggagcatctagttttgaattagatatacatcttagaagtaatgagctattggcagctgttaaatcagattcagccacaaaccagaattctttcttgttgaacaagaccaatgagttagatgactttaataattccacttttctctccctctcttctcctcttcctgaaatcagagagatgagaaactactctttgaaatacctccagaggcgttttattgtgttcctttcccctccaagcagctccctttatacaattttgctcaggcaaccaaggacagagtatcggcagaaacatggagtgcttttgtataggccacctgtacataaaagtgtaattatttatttaattttcccatttgtatcatattaaagctttgtacagtgttttaagttctgttttaaaattattttgtattttatttttataacctagtaataaaatattcattccgcatgc

SEQ ID NO: 360106 - DNA, 421 bp, Homo Sapiens
  misc_feature (200)..(228): n is a, c, g, or t
  misc_feature (392)..(392): n is a, c, g, or t
cgcttccttccgaacggtaagccacttcgctctcgggcaggacaggtcctccctgcagagagagacaactcatcccccgaccttccatactacagaccaaaatacccaggtgtggcctaaggactatattaaatgcctcctatagaaattcaaggaatgttagaaccagggaaactagctgtttaaagttttaaagaagnnnnnnnnnnnnnnnnnnnnnnnnnnnnngaaatcatatcgagtgtgaggatgagcagagtgccaaatattcagcatctgtacaaagtcattcactgggaattcaactattttatgtcattctctttctcacggtttttatgggttcttttgataaaattcctatttagtaggctggcagggttacctaatcnggaatgtggcatttggtatttcatcacca

SEQ ID NO: 360107 - DNA, 1260 bp, Homo Sapiens
  misc_feature (807)..(835): n is a, c, g, or t
taaccctggcgtttttatccagtgttaaaataaattattgcaagtttcaatgtaaacacttaacagatgacttctttgcagaagaaatgttcgttacctactatcaaactactttttaacagattttgtatatacacacacaagttgacagaggtttacctccctactttcttagattttatgtaactcttttcattggtgcttattcagaacctgaaagccttgggcatccaagctttcacctactcaatggaggagaggtgataatgaatgaaaagattgacaccaggtttcttggacaaatttaagttcaaatttatctctttcaagtagaaccatggtctccctagagagtgtgttggcttgtgtctgccagtacgacaaaggacgctcccagcttgatcgtggtaccttatggaagccactcacgcattctctgatttacccccaaaacactaccatgccccagccccactcatttaaataatacaatcatatcactttcaaagggctcagcacgaatgttcccctcactccactttttaactcgtttgctgaactcgacaaggcttccccttacgagcagtgagacctaggctactttcgaacgcttccttccgaacggtaagccacttcgctctcgggcaggacaggtcctccctgcagagagagacaactcatcccccgaccttccatactacagaccaaaatacccaggtgtggcctaaggactatattaaatgcctcctatagaaattcaaggaatgttagaaccaggaaactagctgtttaaagttttaaagaagnnnnnnnnnnnnnnnnnnnnnnnnnnnnngaaatcatatcgagtgtgaggatggagcagagtgccaaatattcagcatctgtacaaagtcattcactggaattcaactattttatgtcattctctttctcacgcttttatggttcttttgataaattctatttagtagcatgcaggatacctaatctgaatgtgcaatatgctattcatcaccacgacaatttcttacttcctcttaataacttaccagaatgttggtcattcctttaaggcagttaaggattgctttatttgtgttcttttttcccatgactttttttcactctcagctgactgtaagaaactgtgcaccgtttccgccataaccgtcctgtgacgatgcctccatttgacttctgtatcgctgatgttcacctcctgtaaatagtttggcaattaaattttttgagaaaagt

SEQ ID NO: 360108 - DNA, 856 bp, Homo Sapiens
  misc_feature (376)..(376): n is a, c, g, or t
  misc_feature (385)..(385): n is a, c, g, or t
  misc_feature (696)..(723): n is a, c, g, or t
ttggttataaccatgaaaataatgaccatacctccccagccagcagggtctggaaggcctgaggaggctcatttttaaacactgcactttaaaaattggaaaccgtgagatgaagaaaaattcaattaagcggaaatgagttttgttttattgcctgctgctgaagggctctgggcatgctgaaagctaaatgaaaagcacatcactggctctctctttcttggattggtcaattggccctttttgcagtagttgctccaactgttctaaacagtgagtgactggagccaaaaagagagagctcagcaaagccatcccatccacactctgcttggtaggaccacactaaaagcacagtttcatgctgctagctctnggttaaggnagacagctgcaggtttgggaggtgcaccaagcattcctttgcttagggaggcagagcacaggtgaacagaggaaggacacccccactctcatctattgcccaccgagaggcaagaatcacaccaactttcccacttgaggactgtgttcggccaaacaagcaggttcagggctgcgggattccagaagttgctctgagcttgcaatcagacctcaaagccccagatcccctcagctctggatcgttgccctcatccttcacaatgtaaattttgtacagttaaagagaaatgaagtctcgtttcctggggnnnnnnnnnnnnnnnnnnnnnnnnnnnngacccacccatccttatttattgccatatgactttggaaaacagaagctggtgcgtttgtttgtatatgcctcctgtgtgttggcatgagatgtgtacggtaaaattatgtaaaataaatatggaaattcttt

SEQ ID NO: 360109 - DNA, 901 bp, Homo Sapiens
agcgggagactagggggcggcgaggagtgggacccgctcgcggccattggttgtgcggccaggaggggcggagggacgacgcgcgggctgtgcgtgggccgtgcagcccggatccactcccgctgcgcctgctgtccgccgtgcgcccagactgcgcgccgcgccgctgcgcccaacattcccgaggacggcttcgcgggcgcgtatcgtccagaccggagcaccgccccaccgctagcgcaggagacctgccggggaagtcgcgtgtcctgacctgcagtctcaatgcacatctgatacctgctgcctttgagaaacaagttttgttgtgctgatttaacagcctgtgaattctgcaaacacgatcgtgaaaaaatgccaatctgtcctgtgtaagccctgtgtgaaagtttgactttaatctaccagatcactccttcaccctccataaagatgtctgaacctgacacttcctcaggattttcgggaagtgtggagaatggaacttttcttgagcttgtttcccacatccctgtccacgtcagtggacccatcctcaggccacctgtcaaacgtctaccatctatgtgtccatattcctcagccttttagcgtttctgcttctgcttttaatcaattgccctccaggaggctcaaaaatatcatctcctccagttcctcctacccagagtatccaagcgacgctggaagttctttcaccaatttggaagtctgcagcatttcctctcagaggtccactttttcaaacctttcatcctgaggaaaattggaagagtccttgagtgtggcagcagttttgacatccccttacggaagtgtcccgtgaggcattgctcatgaaagaaatgatcctttggtgtagacctgcttctccttcttc

SEQ ID NO: 360110 - DNA, 305 bp, Homo Sapiens
caagtgcaaagaggaagtgaagagaaaggaagtacagaaaacatgcagaaagcacagaaaggaaaaccaaggttctcatgaatctccaaccttaaatcctgaaacagtggcaataaatttatctgatgttgacttgagtaaatatatcaccactattgctggagtcatgacactaagtcaagttaaaggctttgttcgaaagaatggtgtcaatgaagccaaaatagatgagatcaagaatgacaatgtccaagacacagcagaacagaaagttcaactgcttcgtaattggcatcaacttcatg

SEQ ID NO: 360111 - DNA, 353 bp, Homo Sapiens
aaaagaagtgtgccgactatcaaataaatggtgaaatcatctgcaaatgtggccaggctggggaacaatgatggtgcacaaaggcttagattgccttgtctcaaaataaggaatttgtagtggttttcaaaaataattcaacaaagaaacaatacaaaaagtgggtagaattacctatcacatttcccaatcttgactattcagaatgctgtttatttagtgatgaggattagcacttgattgaagattcttttaaaatactatcagttaaacatttaatatgattatgattaatgtattcattatgctacagaactgacataagaatcaataaaatgattgttttactctgc

SEQ ID NO: 360112 - DNA, 406 bp, Homo Sapiens
cctgattcattcttcttgggctttgctagcctgtacaaccctacatgtcttttcttccactgcctgaaagacttgggttgaactataactgttggagagagatgttcctctttaatcatgaaacaccttaagaagtctataatgcaatccttagtcctaccctgaacctatgtgtcctctaagtcaggccctgatctagtgcagtaaagggaagggtgggcttaatgggagctttgcctgggacctgaacctggagcacttaccgcattaggaagaaaggagctccccataatcgttcctgacccttgtgtctcatataccctatcctggtggaaatgaccctatttgatatgctgtcccttaaaataacttgtatcaatattaaaatgactatttctaccctttg

SEQ ID NO: 360113 - DNA, 762 bp, Homo Sapiens
ggcttcagcataaaagctgatccacaaacaagaggagcaccagacctcctcttggcttcgagatggcttcgccacaccaagagcccaaacctggagacctgattgagattttccgccttggctatgagcactgggccctgtatataggagatggctacgtgatccatctggctcctccaagtgagtaccccggggctggctcctccagtgtcttctcagtcctgagcaacagtgcagaggtgaaacgggagcgcctggaagatgtggtgggaggctgttgctatcgggtcaacaacagcttggaccatgagtaccaaccacggcccgtggaggtgatcatcagttctgcgaaggagatggttggtcagaagatgaagtacagtattgtgagcaggaactgtgagcactttgtcacccagctgagatatggcaagtcccgctgtaaacaggtggaaaaggccaaggttgaagtcggtgtggccacggcgcttggaatcctggttgttgctggatgctcttttgcgattaggagataccaaaaaaaagcgacagcctgaagcagccacaaaatcctgtgttagaagcagctgtgggggtcccagtggagatgagcctcccccatgcctccagcagcctgaccctcgtgccctgtctcaggcgttctctagatcctttcctctgtttccctctctcgctggcaaaagtatgatctaattgaaacaagactgaaggatcaataaacagccatctgccccttcaaaa

SEQ ID NO: 360114 - DNA, 278 bp, Homo Sapiens
ctcaacgacatgctccgttcctccgtaacaagacatttttcttcacataacggatttttttcctttctcctttacccctgatgcgaacagagaaaaagctgagatgtcaccactatcctcaagatacagaggctgctccgcgcatgcctttttatcacatttctcccggcacctgttggaaagcccggagacttttgctcgtctccattttatttccccctttctaaacgaaaaccttaattggaacttttcttacgctgtctccaccttgcgttgag

SEQ ID NO: 360115 - DNA, 357 bp, Homo Sapiens
  misc_feature (16)..(16): n is a, c, g, or t
aaaaagtctgttcctncagccaaggcctgggtcccaggtgactaggagtagccataggaaggtgaggaaggagaagtgggcatgtggtgtcatctgtagtccaaggtctctgcgtctcgtcagtgggtgcagtgccttccccctcaggtgtgagcgtgatggactctagactgccttccatgagtgttggtcatgctatgatgtcatcatttgccattaaaacccagtttgtatgatgccaagaggattaattgtgcaagtgactgattcatttaaattgtaatcacatcccttttctgcttcaccaacctgaactgtttttaaaaatatcattaaaagtctgttctctttcctttt

SEQ ID NO: 360116 - DNA, 947 bp, Homo Sapiens
  misc_feature (100)..(100): n is a, c, g, or t
  misc_feature (152)..(153): n is a, c, g, or t
  misc_feature (192)..(192): n is a, c, g, or t
  misc_feature (279)..(279): n is a, c, g, or t
gaagagcgtgatctgccccatagggatcacacaggccccttttggtcagtttgctttttcagcaagaacatatttattggtggatcaattggacgagagnaacgtgtgttggatggcttgctggtgatgcccatgaccaacatcgagagatnntgtactatccagtccagtggtgggataatgctactaaangatcagtttctgagatgcagtaaaatcgctggtgtgaaagtagcagaaattacagagctaatattgaaagctttggagaatgaccanaaagtaaggaaagaaggtggaaagtttggttttgcagagtctatagcaaatcaaaggatcacagcatctaaaatggaaaaggccccaattgatacctcggatgtagaagaaaaagcagaagaaatcattgctgaagcagaacctccctcagaagttgtttctacacctgtgctatggactcctggaactgcccaaattggagagggagtagaaaactcctggggtgatcttgaagactctgagaaggaagatgatgaaggcggtggtgatcaagctatcattcttgatggtataaaaatggacactggagtagaagtctctgatattggaagccaagatgctcccataatactctcagatagtgaagaagaagaaatgatcattttggaaccagacaagaatccaaagaaaataagaactccgccccccagttgcaaaacaagaaaaagcaccaagtaaaaagccagtgaaaagaagaaaaaagaagagagctgccaattaaagctaacagttgtatatctgtatatataactattaaaagggatatttattccattctgagaaccctgggtattttttattcacaaatccattataaaatctagcaggattttaaaaatagttttttgcctttaatgtgctttaaaataataaaccttatagagcaa

SEQ ID NO: 360117 - DNA, 1147 bp, Homo Sapiens
gaatcaatatgtgggaaaaccataatttagtaattttccaacccgtcggggaaaaataaaattaaaaagggttttataccctaaatatttttaaagaaaaagggttgtgcgtttctggaaaggggctttcccccggcacagcaaatatgtttgtttcaaagttgggaagacatccgttcaaaaatccatcaaggggaattttggcattcattttgaagggaaatatcaaagggcctctgttagcagcaattccgcaaatatttagggttttttggccattaaaatcagagcaaggcaaccaatgcaattggtacaggcaatttttcccaaaaagtttcaaaggcagaccaattggaaatgaatgcctgttggggaaggaaattaaagcaacctcccagattcctcaattttagaaattaatcttcaaaaagagggcatgctgatcaccatcaccctttgtgaggggttagacaagaatcctaatacatgtatgtgtttttaatgccttataaacttttaagctcctaaaattaacccacaggctagtcccacctccccactgagactgcaaatgtagttgtgatgcagttcccagtaagtttagctacaaaagcactaaaacaggaaaacaaacactataccacataaataattctgcgttcactatcttgcctttcttagtggcattaagaaatatgtaccatggtaagtgtgttgtgaggtgcacgaagagaaaaaagttctaaacaaaggatttgtttatagatcttcatattggcatcagtgatgtttctttaccctccctaagtgagagtctaagagctaactagtatgcttttaggtatatttcacaagttaaatagagtatttcttaaaattacataaaataagacatgcttgaagcataaatgtcaataaataatgccaacatatatacctctacaaaggttaacctgtattaatttgggcatgacccttgtagatttcaggggcagagttacatcagccatcattctttaatagtgacataacaggaagctcaccagctactttaagttttccagcaactattatataaaccttaggtatccaccataaaacagaatccatagttcaaaacaatagactatgaaaaatctaatttaaa

SEQ ID NO: 360118 - DNA, 1768 bp, Homo Sapiens
  misc_feature (239)..(282): n is a, c, g, or t
cgggatttctggagagtgatgatgcgggtgtgctggttggtgagacaggtacagccggcaccagcgaatcagacttccacatttggaagcagttgtgattgggcgtggcccagagaccaagatcactgataagaaatgttctcgacagcaagagtttgaggaagaggcaaagaaccctggcctggaaacacacaggaagagaaagagatcaggcaacagtgattctatagaaagggatnnnnnnnnnnnnnnnnnnnnnnnnnnnnnnnnnnnnnnnnnnnncaactctggccaatgctctgtgcccctaaagaagggaaaagatgcacctatcaaaaaggaatccctgggccactggagtcaaggcttgaagatttctatgcaggaccccaaaatgcaggtttacaaagatgagcaggtggtggtgataaaggataaatacccaaaggcccgttaccattggctggtcttaccgtggacctccatttccagtctgaaggctgtggccagggaacaccttgaactccttaagcatatgcacactgtgggggaaaaggtgattgtagattttgctgggtccagcaaactccgcttccgattgggctaccacgccattccgagtatgagccatgtacatcttcatgtgatcagccaggattttgattctccttgccttaaaaacaaaaaacattggaattctttcaatacagaatacttcctagaatcacaagctgtgatcgagatggtacaagaggctggtagagtaactgtccgagatgggatgcctgagctcttgaagctgccccttcgttgtcatgagtgccagcagctgctgccttccattcctcagctgaaagaacatctcaggaagcactggacacagtgattctgcagagcctgagctgctgctgtggtgtggcccactggagcaaactgctggcacctattctgggttgcttgtgaacttctactcatttcctaaattaaaacatgcagctttttcacaaatttattctattattgagtggccacaatgtagagtggctcaaagtacttcaggattaggaatttgggtttgtcatagatgtattctctggtgagggtggctgggatatacctgacccaccatcttcagaaggacccatgtcaggtctgaccattgggagcaaagccatgttcacactgacctaatgcagagtatggaagcattgggctggttatacatttctgtttcttagatttatcctccgcctctgtaggcatggacaacctttaatcagagcatctagagtggcctcttgtttatcctgaagatactgatgggtcttgttttctgttagtctgttttgtaatattcttttcccttccttcatggggaggcttagtttgtccagtccttccatgcccttctatcccagattacctaaatgttcccttctcaggaattctgtctcatcagttcttcacagtgagaaaagaggctagatgatggtgtggggggttggagttttcttctaataccgagggttcctggctgtgaggaaacagccacatgttcgtcatgattgagctgtgaagtcttcttggacctgttgtctgaaaataaagttaatttgtttgaggcatctctcttaagtaggtggaaactattgaagttcagctaacaatcacagcataggttctgatgcatggaaaggtggttggtgaatgaaaaagttgcgtagagccactactttctttttccctgagaataaatttggataaaaca

SEQ ID NO: 360119 - DNA, 901 bp, Homo Sapiens
  misc_feature (397)..(440): n is a, c, g, or t
aaagccagggagaatcatatcctggctggatcacatgaagatgtacatggctcatactcggaatggcgtggtagcccaatcggaagcggagtttgctggacccagcaaaatctacaatcaccttttccccccacagtgtgcatatgcttaaggagttcaaggtgttccctggccacagccttcagactggaaatggaggtccacggtaagaccagccaatggtaacgggcctttgggtatttatcctttatcaccaccacctgctcatctttgtaaacctgcattttggggtcctgcatagaaatcttcaagccttgactccagtggcccagggattcctttttgataggtgcatcttttcccttctttaggggcacagagcattggccagagttgnnnnnnnnnnnnnnnnnnnnnnnnnnnnnnnnnnnnnnnnnnnnatccctttctatagaatcactgttgcctgatctctttctcttcctgtgtgtttccaggccagggttctttgcctcttcctcaaactctacaatatatggataaagttcattcaccatgtggagaacctggccaggctgcagcttcacctcttggtccttcccaattacgactgagtcaatgctggtgggattgactcctacctgctttaccttgacatatcccttgttacactctgctttcaactgtacttgctgtcgagaacatttcttatcagtgatcttggtctctgggccacgcccaatcacaactgcttccaaatgtggaagtctgattcgctggtgccggctgtcctgtctcaccaaccagcacacccgcatcatcactctccagaagtcggagacggacaaattcacgttactcatctgtgcctcaccgatcccgggaattccggaccggtcca

SEQ ID NO: 360120 - DNA, 650 bp, Homo Sapiens
  misc_feature (16)..(16): n is a, c, g, or t
  misc_feature (52)..(52): n is a, c, g, or t
  misc_feature (72)..(72): n is a, c, g, or t
  misc_feature (81)..(81): n is a, c, g, or t
  misc_feature (525)..(540): n is a, c, g, or t
ctttaacccagttttncaatctagctgaaaaagtggtttctgtatccaaagncatgaaaattatgatgaccncatttcaancttccactccaagttgaaaaaggaaaacccggacatatatgaagaaacccttcattacccgcttctgcttattttgaccaaacatggatagaagattaagcttctcaaagacgaagaaacgtatcaagtgcatagggaatatttttacaaaaacgggaaatctgtaaggggtataatcgcctgcctgcgccctttgcagcatttcacgtgtgggctatggactccacctgtcctcacccacgttattccccagctgccctctccagctccctccccgcctctttttacactctgcttgttgctcgtcctgccctaaacctttgtttgtctttaaatgtgtataagctgcctgtctgtgacttgaatttgactggtgaacaaactaaatatttttccctgtaattgagacagaatttcttttgatgatacccatccctccttcannnnnnnnnnnnnnnnggtctttgttctgttttggtggtggtagtttttaatcagtaaacccagcaaatatcatgattctttcctggttagaaaaataaataaagtgtatctttttatctcccccc

SEQ ID NO: 360121 - DNA, 831 bp, Homo Sapiens
  misc_feature (199)..(199): n is a, c, g, or t
accttaaatttaacaaacctaaagtttacacttctaagagtacagttaaaagtatgtggacctgcagttcttgtaactctccactctgtgttaatgatatatttgtactaggatccttttacttgaatctaaatttactggttgatttccttctccagcctatcccctacagggaaaagctgatacttcccctatagtncaataaataattatttaaaagtcatagctccagtcactactgaaaacataattttggtgataaacataatttgagaaacttaatttctgaatgtttttatagaaaattactgaaagtctattactcatggaagacttttaaagaataaccttttttcctgttttataaattcccattgttatatggtagtatttcagctacacaatattttagcttttagctagacatttatagcttttcatttgttgaaatggtaatcatctgcatgtttttgtcacttatttcaggttagtgattgcctaacacttataagccaaaataatctttgcaaaattccatacctaaaattttgaaagcccctaatgttttcacacatctttctgtattagttatagttttgtgaaatctttgtgtgatcttcaaacattatcatttaatgtacaatactgtaaataaactgtgcatggcttttatacagctttagtaaatgtcaaataaagtggtacagactcattacaacaagtttctcataaaaatacaataaataggaaaatgaaattcagaaacccatagactgggaataggttccagttacagcttggatctggcataaaataaatttgaaataaaat

SEQ ID NO: 360122 - DNA, 1330 bp, Homo Sapiens
ctgttgagttaccataattgcagttcaactatctgccatgattattcttttcacgtatcattcattctgtacatttgtgtacattgagaagtatagcaatctatgtaaatgtaatcctcagtgaggttcctcagtgctaggtcccataggattgtcgttgcccttgttaatgaggtttctctgttcagcggcttcaatttttttctctttgtacatctagttttgaagatttacttcaagtttgaatcttctagaatgcttgtaagtccagttttaatttttagagtcaatttgtagttacatgtagtttaacttttgggaaacgtcttaacattgttctgaataaacttgctaatgaggtcaggtcatggtacagactgatgcagtcaacatgatttcattgcagagtttattagtatcagcaagtttttgctttgctaaataaaagtactcaatgaacacaattctacataaattttgacataccatctaatttataaaaatcaataaaaaaggttttggtaaaactttttcatgccagatgctgtttacaacaatgaacatgccaataaaacatttgttcattctgttgtgttattttagtcattaaacttctgtggatgaagaatctgggttaagaatagatttgtcatctttaaatatgacattttgtaatgtgtattggatatctcatttctatgataaaggtatatttacagtaaagttctcataagagaaatgaaaagctgtgttaatatctaactttggggaaccctgtcagtatttcagatccgatttttaccctttttttcttataagaaagataaaattagaaaatactgttagcaaatgtggctctgccatttgaatataatcaccgagaattccatgtcttaaaagtctcctggaatccacaatgaaaagaaaaatcttttctaagatattattctggctaatttttatttgaagaaagctatagcatttagcgaaatttgactgaagtaatgttctgagtttgcattagtgggattggtgatgttctcagaagaaaattggaaacacttgtgatgaattgtctttcagatcacttagattttctgatgtaagaggacagctgtttggttctgatacaggcctgcttacttgggatgtagggttagtaaatggggtttctgctttaaaggactgacttgctatcacacaaaagaggcagactctgtaaacacaatgggctttgggagtttggtctgattgggtttggtttagtattcctatgagcgtaaatggtaaaattcttctgatacccactctttagactgtgccttctgct

SEQ ID NO: 360123 - DNA, 444 bp, Homo Sapiens
  misc_feature (40)..(40): n is a, c, g, or t
  misc_feature (49)..(49): n is a, c, g, or t
  misc_feature (77)..(77): n is a, c, g, or t
  misc_feature (92)..(92): n is a, c, g, or t
  misc_feature (99)..(99): n is a, c, g, or t
  misc_feature (109)..(109): n is a, c, g, or t
  misc_feature (133)..(133): n is a, c, g, or t
  misc_feature (172)..(172): n is a, c, g, or t
aaaaaggggtaaaaaggggaccgaaaaaccggacggggtnccccccaangttagatattaaaccacagcctttccanttccccctatgaganccttacngtaaataatncccttatccatagaaatgagatancccaatacacattaacaaaatgtccatatttaaagatgnacaaatcctaatccttaaccccagattccttccatcccacagaagtttaatgacctaaaataacacaacagaatgaacaaatgttttattggcatgttcattgttgtaaacagcatctggcatgaaaaagttttaccaaaaccttttttattgatttttataaattagatggtatgtcaaaatttatgtagaattgtgttcattgagtacttttatttagcaaagcaaaaacttgctgatactaataaactctgcaatgaaatcaaaaaaaa

SEQ ID NO: 360124 - DNA, 700 bp, Homo Sapiens
atttcttagatcctaaggaattaatggaattattaaaatctagagattatgaagggaaattaaaggatcaagagagaaggtcattagtgataaagatctagagttgttgttagatcgaagtgatcttattgatcaaatgaatgcttcaggaccaattaaagagaagatggggatattcaagatattagaaaattctgaagattccagtcctgaatgtttgttttaaagtggagctcaagaatagcttttaaaagttcttatttacatctagtgatttccctgtattgggtttgaaatactgattgtccacttcaccttttttattatatcagttgacatgtaactagtaccatgcgtacttaaatagatggtaattttctgagccttaccaagaacaaagaagtatccatattaagtttagattttcagttaatttttgagactgagtagtattcttggatacaggctgatgtgtacttaaccacttccagatttatacagtcttcctgtggaagtttagtaaatgtctttttccctcctttcttctagtaatgcagttcatgggctttaggtacttcagttatgaagtaggcttttcatggggagagattgggattatgctttctgttgtttaagaaactgtttgattttagagtctatttctatgagatagtttaccaaataaatgttccttataaaa

SEQ ID NO: 360125 - DNA, 1069 bp, Homo Sapiens
aaaataatcaaattttatttccaattgtttgttccaccctcaggtgacatgctaataaaaggaaacagagcccaagccctacacgctgaaaagaaaaaacaaaacacacccacaaagtagataattagcccttcaaaaattgagagtgattgtatttatgcacaatttagaaattggggccagtagtaagaaaagctcaagtatgactccagtggccctagtggttcttccctgcagatccaagcttgactgcacctctacttcagctttaaagctttctaagtggaagaaaattttcttgatatattattttccctcacaaaaataaacagaaatgaatattgaaagccattcatcccttttttgctatagagagtatctatatgttagagtataaagccaatgataaaagaaattaatctggggtgaactcttgtctctcacatcataaaaggtctttggggccagttggggatttagtgtttagtttttgtactttcctgaatgctatgtaatccgcaaaggacagccatgaccaagagcatttggattaaaggaccaatttcatacttaagaatgtttggtaagaaatggtaaacttgagtcagacccaactgtcttccaatgccacagtggatggcatttgtaaaacaaattgattcattaatgaaatcccattatcacttgccacaggaagggtagagtgtacagaatcaatgagcctgtttaaattctgtcaatccctcagattgaagtgagaggctgtcagtcccagtaagctcaaaattttgaagcatgccagctacaataacatgaaagacaaaatctcatccttcactttttactgaagacaaagtaatatagatcaaggttctatgacaggtttaagctttattatagtgtgtgattcctcaaatgtgctgaatgttgttatacacgtacataaacattgtccctttacttgatttcaaatcatataaaaaaacatttattagtgaaacccacttgagaatttctgcttatcagctcatctgcagtggttcatgcactcaaattaagaatgaaaatg

SEQ ID NO: 360126 - DNA, 800 bp, Homo Sapiens
  misc_feature (176)..(195): n is a, c, g, or t
  misc_feature (329)..(366): n is a, c, g, or t
  misc_feature (691)..(691): n is a, c, g, or t
  misc_feature (738)..(738): n is a, c, g, or t
  misc_feature (756)..(756): n is a, c, g, or t
  misc_feature (769)..(769): n is a, c, g, or t
  misc_feature (776)..(776): n is a, c, g, or t
agagctggcagcaacttgggattcctttcctttttcctgcctaacttttcattgaaatgtctagtaggagagtgagaaaagagaacaaaggctgggtcacagtcatagaatgttacagctggaatgggcatggaaatcatccaagttaaacttcttctctgccccccgcccccacnnnnnnnnnnnnnnnnnnnnaaccaaacgaacttgtgatccagtgccctattttatagtgtggttttccagggtctgaataaataatcattaaagtttgacacacgcagacacacgcaccaatgatggggatacccccaaatgatttaggaggnnnnnnnnnnnnnnnnnnnnnnnnnnnnnnnnnnnnnncagttagtcagagttaaatgtacctatagcccctgaatacatgctcaggtagagaaagtctccatagtataagtaagtaatatgaatgtggaatcttggaaagtgatatattttgattggaataattttaattaaatttaatgattttaattaagaattaaaagccagctagccaaattttctttaaaaattgggaaactcattatgggtcttaaattgtcctcagggcagccttttcctcatcaacccataggagtgggtcttttgaactgggtatcctaaacataccggggttatggaattctcaaaagaggaaggcagggtntgggggccggggttggtcagggagacaggatctagggggaaagtgcntgaaggagattttcttcntggaggatgatcntgggggnatgcctccttttataccatggatt

SEQ ID NO: 360127 - DNA, 337 bp, Homo Sapiens
  misc_feature (165)..(201): n is a, c, g, or t
ggcttttaattcttaattaaaatcattaaatttaattaaaattattccaatcaaaatatatcactttccaagattccacattcatattacttacttatactatggagactttctctacctgagcatgtattcaggggctataggtacatttaactctaactaacnnnnnnnnnnnnnnnnnnnnnnnnnnnnnnnnnnnnntaacctcctaaatcatttgggggtatccccatcattggtgcgtgtgtctgcgtgtgtcaaactttaatgattatttattcagaccctggaaaaccacactataaaatagggcactggatcacaagttcgtttggtt

SEQ ID NO: 360128 - DNA, 779 bp, Homo Sapiens
  misc_feature (17)..(17): n is a, c, g, or t
  misc_feature (44)..(44): n is a, c, g, or t
  misc_feature (84)..(84): n is a, c, g, or t
  misc_feature (183)..(183): n is a, c, g, or t
ccagaggatttgttccngctaaatttaggttgaagtaaaatccnttatgtggaccatgggggtaaactattttattgcctatanaaacttggtttctaataaagtgccttaggttctagtgagacctgtctactttgaattgccatttactccctttcctccttggcccgatatgctcttggnctagctttttataagttaatgtgtttccccaaaaagtttcactactttatattcatttgagtgtgatcctaaaacacctggatcaacagtacatctcatatgcaatctgcatcagctcctattctgtctggatgtctagaactgttggaagattttgacgtcttaagccctaggttttgctttgggaaataaggtttgaaatattgttcattgcattaagatttgtgtgtgtgtgctttgtaagcccagaaccaggttttggaaaatgcctgtactgtgaaagcaaattaggactctttctgagcctctttcattgtcagaaatagaatcactttccatcagcttccaggaaattgtgtatctggagtcgaagagatttaacatcaagaatccagatttttaaatgtaattgttttttaaatgctaatgtttgtaaagcaccttcagttcttcggatgaaaggtgctatattccctcagtgtaaattaataaaaagattacaggaagtttgtcaaaaaattcaatgcatagtctgtagtatgtcctgacaagaagttagcattttatataagaaattaaaaaatgcttattcctcc

SEQ ID NO: 360129 - DNA, 422 bp, Homo Sapiens
tggaggaataagcattttttaatttcttatataaaatgctaacttcttgtcaggacatactacagactatgcattgaattttttgacaaacttcctgtaatctttttattaatttacactgagggaatatagcatttaaaaaacaattacatttaaaaatctggattcttgatgttaaatctcttcgactccagatacacaatttcctggaagctgatggaaagtgattctatttctgacaatgaaagaggctcagaaagagtcctaatttgctttcacagtacaggcattttccaaaacctggttctgggcttacaaagcacacacacacaaatcttaatgcaatgaacaatatttcaaaccttatttcccaaagcaaaacctagggcttaagacgtcaaaatcttccaacagttctagac

SEQ ID NO: 360130 - DNA, 1246 bp, Homo Sapiens
aggttggacatccaacaagatagactctaattcagcctccccagtctctggccacccagctcactcagggattcagctacccttggctacccaagtagtctaaacattttatctttatcaggcacatatacagtctggttctctgtagccaaatttagatacccatgacatttatctaatgatttcaaaccaaacaggttcctaaaaaaacattcagcctacttctagaacttccccattttgcttggctgtgaaaatgtatttgtcccatgcaggcccttgctccagcccagtggaagcattagtacctcttcctagcgggaactcagtccagctacacaccagagccaggccagtggttgtctgggaaatcttcaaaggccgtgaccactcagcaagggtcagtggcacctctccccactgtctcctcaccaggtcggcacgaagcccatccatccatgcattcactcaccctccgtgttgtccagcactatgtatagtgctgcagaaacaagaagaatatagtgcttgccttcaaagacctcccaaagtggggagatagtctggatgacaggtgctgtaatagaagtgtgccccggatgctataggagcacagaaagagggcaactgatgaacacttgggggttgaagaagtggaagaggagaccctggaagactccctaaggaagttgtcttactctggtcaagcaggaggccctgtagagggagtggtgcagacccaccagcatatgcagcttcacaggggcaaaacacctgtaggtccatcacgtgttggggactagcaagtattcagcttggctggagcagaggcaggagtggggaactggggacaggtgagactagaggttggcagaaaccagccatagtagtttttgcctcatttggacaacaaggagccatccaagagagagcggtgaagctgatggtgacacagccatggcgcattgaaatacccccagtggctgtgttgtagggtatattgggttggggagggacaaggtcaggaggcatagactcgacatcatctgatgtgattcaggacagaatggcgagcctgaagtgaagtgtctgtaggataagttggaaaggaaggaaccaatatgagatattaagaagtgaaagctataggtccaggcttataagggaggggtagaaaaatcgagatggtccaaacccagtcggggctggggaggaaaagtggcccgggtgcaaagaaacacgggtg

SEQ ID NO: 360131 - DNA, 598 bp, Homo Sapiens
  misc_feature (22)..(22): n is a, c, g, or t
  misc_feature (31)..(31): n is a, c, g, or t
  misc_feature (59)..(59): n is a, c, g, or t
  misc_feature (93)..(93): n is a, c, g, or t
  misc_feature (98)..(98): n is a, c, g, or t
  misc_feature (122)..(122): n is a, c, g, or t
accaaccaaagggtgtccaaanaagccaaancaggaaaaaagggctccccagcctggtnttggcagcccagtcacaggttggttttgcctttnttggntgcactgtcctaaagcaggaaatnttagaaaaccaagtaaagggaaaacaagtccagttggagctatgataacattatctgcaaggccaggcaggggccccaaagaaatgggatccaagagcagggacgagaaaagcaagttcttagtctccccctggaattctttccccatgccatcattctttgttctgctcttataactatttttgtaactatttctgcaagtttgcaaggattttataagttcatgttttcccatctatgcaggatggcaaaggtcacaagacatgcctgaattgcaaaacctgtcacagtttgattaactgcctttgttctgcttctgtaagctcgctttccccaccccgcaagttttgcaccactggctagccactccccttcagtcgcctgaataaaagtcaagcctgatctttgttcgttgctcagcctctggatattaatccgctgggccagtggccacctgaataaaatcctcctatttc

SEQ ID NO: 360132 - DNA, 649 bp, Homo Sapiens
  misc_feature (500)..(500): n is a, c, g, or t
  misc_feature (502)..(502): n is a, c, g, or t
  misc_feature (508)..(508): n is a, c, g, or t
  misc_feature (566)..(566): n is a, c, g, or t
  misc_feature (595)..(595): n is a, c, g, or t
  misc_feature (605)..(605): n is a, c, g, or t
  misc_feature (610)..(610): n is a, c, g, or t
ctgtgtgaatcctgtacaccctgggttggctgcagttttcctttcaatctcgtggatgctgtgtccttcttacttggtttttcccaggcagccctttcctgtagagccagtatgaggtagccaggttctcagctgtttcgagtgctttgccttctctggttatctcaagcatcaggaaaattatatgttgcatacattccacagaggtcccatggtgatggggaaaggtcagctcaggcattccctctgcttagccacacttcatcatactgcttggatacatgttgctgcctaggagactttcttaacccaaacaggccccactgcctttagcagtttcttcatcttctctgacatacaattcagctttggcccagagtggagattaagatatgggtctgactctgcctctcttttcctgtgtgactgctcaagtgctctaactgaatgccctgtacttccaacttgcagctctgccatgggatgcctgggaaaggaangnacttgnactctttcatttttggctggatgataccagtgtctggctcttcttccattattcatgnaaatgcaagagaaaaaagccctttaatanttttaaaaanttctnaaatacatctctatgggctgctctgaagtaggttttggg

SEQ ID NO: 360133 - DNA, 880 bp, Homo Sapiens
cctattgataattaaatatgtacataatatagacactgttgtatagaactaaatgaattgggttgctatgcttgagtgggtagtgaaatggaaatatttgatgaatactgagagttcctaaaatgctagagcaaatttccgagggaaaggggggcatcgtgtgtcttgggaaggttgcagcaggttgtttcttcaactccctaagaaatcattgggaaggactcaactgcaaactcgggatcagatacaaaatgggtctttccttccccctctcccccaaaaaataggagcactaaattttaaaatctactcaggtgacagttgctttgcaatgaaacttatcccattgaaattttcagtgttaaataaaaagagatttgtgatatttttaaatataaacttttacatcagtagtcagcagcctgacaattgaaatttggtaagtcgatatattttaaaatattttgctctccaaatagaattgtttttaaacaattgggaggttttttgttctttaaatatgttttaattgtcattgtaaaaacaaaatcttgcttgaccctatattatgccatgaatgaattgctgagcctttataatacagtgacagcttgtttcatgcatagtcatggaacatagagatgttctttaaactgacctattgataagaggtttaatgagtttcacggctttcaacactattgtcatatagttatctttgccatttggagtttataaaaccattttatgtattgtgatactaaaggaagttgttttgctttactttaaattgaattattagactaatatttgcaaattctgcattttaaatgtggacactggctgtttgaaaaataaaatatagaatacagtttaaaaa

SEQ ID NO: 360134 - DNA, 579 bp, Homo Sapiens
tagtaatatagccacaaactggacaagaggctgggtatttgggtttaaaatagattttcttgactctgagcttgtatcagtatttctagcttttgttttgtctgacagtattgcagtcttgaaaatcctgagagctaaaaaactgaaaggaatttttccacaccttgaagtcacagtgttttagagtaaaactattttgtgtacaattgtgtttttaaaatagttagtagatcactatggtatttcaattttctttagttttaattgaaaatgtttgcttttaaaactgataggtattgttggaaagcaggatgaagcctgagccagtggaaaagcttgttacagaaaaaacattttgtgttattgctgtggtgtgcatgatttgcaaagattaagtgcattttctctgtctatactgattattgtatatagaggatgttataaatatacatatacatttttgccattatgtaaatcccatgatttcaactgtaaacatctggccattggtgtaactttacaaaccattcactgattttgggtaatttaacaatagatatgaaataaaggttaaattac

SEQ ID NO: 360135 - DNA, 730 bp, Homo Sapiens
atttgaattcctttgcactgttcgcctactggtagtatgcaggatgcctgcttttttatgcagttgtggaaagaatgtaaaatgttttaatatattctttgttaatctgagaacttgatactgaatcgttttctttatgtgggagaaggaaggagtaacataaaacatgtttttatcactcaaagtaagcaatggaggtaacaaatattgtgcattttaacagtaatatttgaagatttgtagaatattcacctttaaaactagttagtatgcatttataattttaccagaatatacaactaacaattcaacagtgatgttctttgcatttgtggggagatgtgtgatgttcttggttttctggtttggaatggaacgtttatagccttgcctgtaaaaatgtgccccagcacttaatgagtgacccgtttgaatccatatgtagtcccattggtgctaatgagagtagctgctgtgaaacaggaataaaatgtgtctgttcacggaggtgcggtgtggatgcacctacaaggccaactctctgatcagggtgagggagagatggaaagaattaacagatctaaagttggcctttggtgtctcaaattgggtttgtacacacatgcatgcatgtgtgataacaactgtaatctggaacttcaggaagtaaaattatttgaagtttcttagtaaaaagtaattaggtataattccaaatagatttctgttc

SEQ ID NO: 360136 - DNA, 667 bp, Homo Sapiens
  misc_feature (32)..(32): n is a, c, g, or t
  misc_feature (74)..(74): n is a, c, g, or t
catgcccattattccatgggcttaaatgatanttccttaatccagttcagaagaaaaagaatgaaattgggtanctgtcattgcgtaagctttatgttgaattggaaattgtggcataaagcttaaattcgtgtttatcaaatgtgacccatagtagtataatgctgctttgtatataatgtaagtgctacaaatagtctcagcactgaaaatgtattgatacctcttaaatgaatgccaacttttgatgtaggtgttttgctatgcctcagaaaatatctgtctgagaatttgttaatctgtttgataatgaagatacttcctgttttcttgtttcatattttcatgttcaaaatttaagttttacatttttactactgttaatttaaataaaatttgttctgtggataaaatgaggttggcagtgaagaaaattaaaaacagcctcattcatgtaactggttaagtaaaaatacattttcactatgtgttcataaacttttaatgaagctgtttgtctttcagttcaaatataagtgatgtttaggctttatttctgttaataaggctttttaccattgattaaatgaaggaatgtatctttttgaagagatttatattctgtaaataaaaattcgttgtaacaataaagttgagttctaactac

SEQ ID NO: 360137 - DNA, 282 bp, Homo Sapiens
  misc_feature (16)..(16): n is a, c, g, or t
  misc_feature (21)..(21): n is a, c, g, or t
  misc_feature (51)..(51): n is a, c, g, or t
accacaccaacaattnttaangtatttttgctttagtgcattttgtttagngattgcaagtgtttgtcccttatttaataggctttttacttcattctattaaattttagtgtttagaagaggcggggtactgtcactgtgtaaaatatgtaatattttatatgttacaccatgtcatatatacttgcaatatcagaccttgcattcaatatacaatgcaattgactctttgcagacctgcatttttcagtgaacaataaaaagattgtctggcactcctca

SEQ ID NO: 360138 - DNA, 933 bp, Homo Sapiens
tttgattcctcggcctgttggcctactggctgagcatcagactaattctgaagcatatttgctagaggagctactttgcttttcacaatggggtggagaggattctttcacttgtcccattaaccctcttctagtctagatgagatgaaatctgttaatgtgtgtgtagaagaaaacgtatgttcttctactcagcattgcccttttccacctcctcacttcacctccgagtagcttgtttatcaagaatgaatgaatgtctttgtcttaaattttgcccatgtgttaaaagatgtaattctcagaatgggagagaaatgactacctttgttcctactcttttatataattatccttttagggaaagacttggtcaactctaatatatctagaaggaagactatatctggtgtagactaatatgagatgttttagaagagttaacctgaacactttgagggagagattattcttgccagcaaaaagctagccaggaatgagcctaccacattatttgagaatatcaaacctcaggcctggggggatgaggggaagaagattaccagaagtgcaggaaagagaagtttgaggaacacccttggcttagcaacatgtgataatgcaaagctgttataacctgttaatcctacgtactatgtgttctgtacctttacatgtttttaaaatttaagatagtttggtaaggaactgtacaaaaaaatgcttctgggagatttctttgggcaggaaatgccctttcatctataattttcatgggagaaactgctttttaatttagccctaaggtggaaaaaggtagtccctaggcaggtggtaaaattatgtaattaaatttagaagtttttttcctaaattttccccctggttgaagaattcctccttaaactttttttgtaagtttggggcaaaaaa

SEQ ID NO: 360139 - DNA, 902 bp, Homo Sapiens
aaagccagggggaattcccccgtggttcgggaattcgggtatgggaaaaaatttccccaaccggccaaaaccaggaccctgggattggatatattcccccttgtaatttttactccccaaaccatttttccttggaagccaaatgtccccttaaggaggagttggattcagcaaaccaggggcagggtacaaacccctgggatagcatttcagcccttaaaaataagggaaatcttgaaaaagtactccaataaggaccaaatctttcaaaacattctggtaaggtaaaataggccagtcaaaaaaggaaagctgtataattacactcatgtaaaatatttagtcaaactcaaagaaaccaagtgtcatagtctcagcagtgcaccaagatgtaacagtctctcgtagtctgagataacatccagagttctttgttctacctccaaggagattaaggagcgtgaacacaaaggtgagcttggagtgaaagtttaagaagcaagagaagaaagctctttgccagcagagataggtgtctgaaagtggtgccctctacgaggctgggtccagggtttttatggactgggaagggaaggatatgtgcctagttcacaggctgtcttgaaaaacgtgtggctcagcttggcccaggcctttggcccgggatcaatcaggagctgaagggatgattgatagatgctgcttagcttggcccaagacttatcagaagctaaggtgaaagtttggccaaggagcttggcccgggagcactcaggggctgaagtaattattcatagaggtcagacttacagtccaaataaacaagagtgtcgaccggaatgcaccagatcccacagtgcccatgccaaccaaaagagaaggacaattttcctggggccctc

SEQ ID NO: 360140 - DNA, 334 bp, Homo Sapiens
  misc_feature (36)..(36): n is a, c, g, or t
gtcctgaatatagagacagaagttttttgttgttgntgttgttgttttaacatgtttaacccaacagaagttatttacagaaattcatatatccaggcaacacaaaactcctttattcaaaatcactgctatctttgggactaaacacaggctactttctgtttactcctaacaaaataaagcaagcaaatttgagtcaaatattggtgcactttaatactatcacatctttgaaaactcaatttgagttttaccaattaatgtgtctcatgaagagaagacaccagttttaaaatgagccacaaacagtaaagccctatcagtataaaatttg

SEQ ID NO: 360141 - DNA, 815 bp, Homo Sapiens
  misc_feature (53)..(89): n is a, c, g, or t
  misc_feature (209)..(223): n is a, c, g, or t
  misc_feature (469)..(480): n is a, c, g, or t
  misc_feature (756)..(756): n is a, c, g, or t
ggatgtataacgactcactataggcgaacttggagctcacgcggtggcggcgnnnnnnnnnnnnnnnnnnnnnnnnnnnnnnnnnnnnnatcaggccaaatcggccgagctcgaattcgtcgagagcggaatgcgagctgagcagacagggctacaaggaaatctggcgcggttcaatacctcgtctagcctgggttccagtatctaannnnnnnnnnnnnnnaactgacaaactcatttctctactgggacaggatgctgtgctggctggaagttccatttctacagcaagaatcctatctggaaacacagaagttgtcctctagccacagcagctcgaacttttttgattgtcgttgctgctttctcccatcacccccatccccttttgacaaagatccaactgtaaaaagtcttacgtaacagttcaggactacttcggttcttttactgggtaagcactttcaannnnnnnnnnnnaactaaaagccattttaaaattgaatctgttgaggggcttgactaaaatcttttaagtaattggtgtaatggaatactgtcaggggatttttccgtctcatttctgcacgtgctcctttgttctcagaacagaagctttttatacacatcccataacgcagctggagagaagttatgaagtcagttattataacggaacacaaaggttgctttccattctttggcctttagataacttacattttttggtttctcttaacagtggcgtactttaanccgaacggaacgaaatccaccaagaaataaacctgtcggagactttccccaaacaaacc

SEQ ID NO: 360142 - DNA, 867 bp, Homo Sapiens
ttaacatttaagacagcttttattaaatacaaaagcaaaataagctctaaggagtaaggtagggctacttaagggcgttttctgtggacagcggacacagcaccattaaggttagcttagatttgaacaaaccatgagcagacagctaactacatgttatgtttctcttagtagttttagggtctgcccagtaatcaagaaattttacttctccagaatacatgaacatgggaaccaaagaaatgtaaatatttcgaaaaagcactacacaataaaatgagacgcaatccttatgcaggtcaagatgttctccacatctacaatgtgcattaacaaaattaatgcagataagaccttcactccaaccccaaagatcttacatggttaatactattttccaaaatcagcagaacaagctgcagttacttcttttagacatttagctttggaactttgaatttcaaagtaaaattgttataagaaagctagtcaatatatttagcaatagaaccactcttttacttttgatatcattctgaggtattaattcagaaccatcttccaagctatactggtagcaccacagacttactagctgctggtcatactgcacatcaatgattgggtttgagccaaaggagcttaaaatgatctaaggctaacatgattaatagtttccaaaaaggatgaacatgagtacttttatgagcaatgctagataaggtatccatgtttttctttcccctgaagaatgttgttttagaatatttttgccatcaaaatttctgatttacaatcatgatatacaactgagagatgtacatttatggatgttaaatgacataaataagtaaactagacacatcc

SEQ ID NO: 360143 - DNA, 953 bp, Homo Sapiens
ggggcttcccattgggtagggccgggaaacacgataaaggggacatgccgggagttgcagtaccctcaggaaggtagcgtcttgatctgcgtggcgtggttctgtgccttgggaagagatgaatgggaagcggccagcggagcccggcccagcccgggtgggaaaaaagggaaagaaggaggtgatggcggagttttcggacgctgttacggaagaaaccttgaaaaagcaggtggctgaggcctggagccgcaggacgccgttcagtcacgaagtcattgtcatggacatggacccttttcttcactgtgtgatcccaaacttcatccaaagccaagacttcttagaagggcttcagaaggaactgatgaacttggacttccatgagaagtataatgatttatataagttccagcagtctgatgatttgaagaagagaagagagcctcacatctccactttaaggaaaattctgtttgaagatttccggtcctggctttctgatatttctaaaattgacctggaatcaaccattgacatgtcctgtgctaaatatgaattcactgatgccctgctgtgccatgatgatgagctggaagggcgccggattgccttcatcctgtacctggttcctccctgggacaggagcatgggtggtaccctggacctgtacagcattgatgaacactttcagccgaagcagattgtcaagtctcttatcccttcgtggaacaaactggttttctttgaagtatctcctgtgtcctttcaccaggtgtctgaagtgctgtctgaagaaaagtcacgtttgtctataagtggctggtttcatggtccatcattgactcgggctcccaactaatttgaaccccccataactcggaaccctaaattccaacaagatctgaaattcgatgattgggtcaacctacatatctggacttggttaccag

SEQ ID NO: 360144 - DNA, 1193 bp, Homo Sapiens
  misc_feature (20)..(20): n is a, c, g, or t
  misc_feature (64)..(64): n is a, c, g, or t
  misc_feature (662)..(744): n is a, c, g, or t
atagcacctaccctagttgncgctgcttgaagtctgttatattcaaagggatggatcttttccncaagataccaatggctctttgaatattaaaataagagatattcaggccaattcagttttggtgtcctgaaaagcaagttctaaaattctcaaatctagtgttaaatggcagcctttgtcaagactgaaaattctcatgctgcgcaaagtgctcgaataccatctgatgtcaaggtatataatcttactcatctgaatccatcaactgagtataaaatttgtattgatattcccaccatctatcagaaaaacagaaaaaaatgtgtaaatgtcaccaccaaaggtttgcaccctgatcaaaaagagtatgaaaagaataataccacaacacttatggcctgtcttggaggccttctggggattattggtgtgatatgtcttatcagctgcctctctccagaaatgaactgtgatggtggacacagctatgtgaggaattacttacagaaaccaacctttgcattaggtgagctttatcctcctctgataaatctctgggaagcaggaaaagaaaaaagtacatcactgaaagtaaaagcaactgttataggtttaccaacaaatatgtcctaaaaaccaccaaggaaacctactccaannnnnnnnnnnnnnnnnnnnnnnnnnnnnnnnnnnnnnnnnnnnnnnnnnnnnnnnnnnnnnnnnnnnnnnnnnnnnnnnnnngattactttcgagagagaagtttaagcttcaccaatgctgctcctgaccaatggaaatatgtacaacttcagcattttaagtaactggcttcaaggggtactgtggcaaccaaataaaataactccattttctaaaactttcatgtaacttttatgtctggactacagttcaagtggacaaaaacatttctgtattttttttaagtaaataagagtagttgaactgagcaatacctcctcctgtgttgtattacacatattagccacgagtttttgcagtgaccagataaacttgaattgacacgtggtgtaataaaatggacaaattctgtagagtagacacagtgagtatgtggacctcttttataaggaaaaatacattttggattaaaatcaattgcttctgtcttgttttgtttctaaataaagaataatttctgggaaaaaaa

SEQ ID NO: 360145 - DNA, 1111 bp, Homo Sapiens
gcggccgccgctcctcccggcaaagcacatactcgctgaactgggaggagtccacaccgcccccacaggacgcagccacgctgaaacccctctggaacagccgctccaggacctgtaccgagttgagccggcagtagccattgagcgggaagcggatgacgtgcgtggggtcctggttccagccggcgttgacggagttgcacatgacgtctccggtctcggggaagacctcctcgatgagggccttctcgccgctgagtgcgatccgctcgcccaagtcggggcgtgacgcgcaccaccaggcagtcacaggcccggctgcggcgccgctgctcctgctcctgctgccagcgctccagctcgcgcaccatgggctggagctgatagtagcgcgcctcctcgtacagcagactgaagtccttaaagtcatccggaagcagcagcttggacgtccgcaggaagctcaggacgtagcggaaaatctccccatcccggtcaatgaaataatgttgcttcaaactgtccaggacgatgggttcagtgccattgaagaggcggcttatcctggagtcagggtacttggtgagcgtggccaggctgctggtgtacatgtggccgcccacatcgatgtgcacaggtgcattggacttggtgagctgggctggcagggggatgccctgggcagccaggggagacacaggcgaccgggtgagagacagccgggacatgtttcctccctccgcggtgccggtgctgccgtgtgtgtgaagcgaggacccgctcggccgctccttgcggtgaggcatctaggcttccatccctgcccagagtatcgttggaagccccaggctttacgccttgccgtgaatctccaaggtttctcccaacaagcgcatccgtgcgggaccacgaccctctttccgagaccactgctcggagccggcagatcgggctcgggcgcagcccccgccccacgcagctgccggtctcgggcgccgggcgcagcttcgccgcctatgctcgctgcgcgggtcgctccggtctcgtcctggagttaccctcgtgccgaattaacacccaggcctcgtacctagccgtagttgcttcccgg

SEQ ID NO: 360146 - DNA, 880 bp, Homo Sapiens
tgcaaagcagtggacggtccggatttcgggatcggtcaggagtccactcctggaattgttccagatgcggttcaagtccacactgaagagcaacagaagagtcatccctcagaaagtcttgacacagatagtcttcttattgctgtatcatcccaacatacagtgaatactgaattggaaaaacagatttctaatgaagttgatagtgaagacctgaaaatgtcttctgaagtgaagcatatttgtggcgaagatcaaattgaagataaaatggaagtgacagaaaacattgaagtcgttacacaccagatcactgtgcagcaagaacaactgcagttgttagaggaacctgaaacagtggtatccagagaagaatcaaggcctccaaaattagtcatggaatctgtcactcttccactagaaaccttagtgtccccacatgaggaaagtatttcattatgtcctgaggaacagttggttatagaaaggctacaaggagaaaaggaacagaaagaaaattctgaactttctactggattgatggactctgaaatgactcctacaattgagggttgtgtgaaagatgtttcataccaaggaggcaaatctataaagttatcatctgagacagagtcatcattttcatcatcagcagacataagcaaggcagatgtgtcttcctccccaacaccttcttcagacttgccttcgcatgacatgctgcataattacccttcagctcttagttcctctgctggaaacatcatgccaacaacttacatctcagtcactccaaaaattggcatgggtaaaccagctattactaagagaaaattttctcctggtagacctccggtccaaacagggggctttggagtac

SEQ ID NO: 360147 - DNA, 504 bp, Homo Sapiens
aaactccgagtgagccagtattcataaaaaatgttaaaaagcagaagaaaggacacaagataaacaataatttggataattcgtaaattggtatttcattcttgacttcttgagaattcattgtatacgctactcctcaaaaataaggaaaaccataaacaaaaattctggtctgaaatatcttggcagtaatgtgtttgctctcccctgtcctgaatattttaggctaactttcaattaaaatggattgcaattaaattattttgggcagaaatgtgtcttaacctttgacaaagttgatcatttcagcattttcaaatgcttaaactatttcttaaaatgacacaaattgtggcgttgccatttaccgaggtttacatgctcttgatgcttaaggattcggctttcttttttcccccgcatttattcactgaaaacatgattgattcagttttgtacctatgcagaatgccactgacgtgatgccaaatatgccctatttag

SEQ ID NO: 360148 - DNA, 817 bp, Homo Sapiens
  misc_feature (39)..(39): n is a, c, g, or t
  misc_feature (44)..(44): n is a, c, g, or t
  misc_feature (92)..(92): n is a, c, g, or t
  misc_feature (487)..(517): n is a, c, g, or t
agacttgaaccacacatagcaatggatcatgattttctntaaanttccatttaatggaacactcaagtttgattatttgtctcctgttgccntaagcgatgcacactacttaatacttgaagtacattaaataaatttgaagagcagaagtctaatagactgcaattaccctgttcaaatgactttttactttatttacttacgtattttctgatcctctggacaatcactataccagttccctttttctgctgatttagggcctgcttaattatatttcaaaatgtgaattctcagttaaataaattcaagccctatctttccaagaaggaagaagtgttcaactcctaaaattcctttccaaattgaatgaatgaacatgaaaaagataggcatgtacgtaccttttaataattaaagataatctaattttcctgcagaaatcatgaatatatctcaaatgatttttcaaaaacctattataaannnnnnnnnnnnnnnnnnnnnnnnnnnnnnntgcatgcacgtcccagatgtaaaaagcattttctaaccagccacctatattccaaatgcccctcaaaagatagctgtgcgatatcaattgcagtcacttgggaatggcaacagaggcccacaacatatgaagttgctagtgatgctgtggaagtattatacaaatctgaaccgtgtgggcaaggaaggtgtaacacgcaggagtcaaacacttagctgaccagtaggaggacaagtaagagtttccttcttgaagaatcttttgctctcacatcttttcctcagtagagtattctccact

SEQ ID NO: 360149 - DNA, 746 bp, Homo Sapiens
cttaaccaatattattgattaccagacttttatgaaagccaaagactgcttgctagtaggaaaaaatttcaaataataaccaaagctgaaaaatggtctgtcataaattatttccccggtaatttttgaaaggaaaaatgtataacaagtactatttacatatctgcatttaaaaaagcaattcttagaatacttcctttacattattctcctattttagacattttgtgaaagagaacaaattgtccagtggcctcctgtcagatcaacaattattatactccttaattccatgcaaatttaaatgaatgctataaaattttaaatctgtagcctgggtgtacgtttcactcaagttctcctactgaggactcttgactaacagcatactggcagtttcaccttaacctgctcgttaaataatgtgttggtgtgagatatcaggaatgtctcatgatatcacgtttaccatttacaccatctgcaaccatatgctattaataaaatggaaaaaaacaaaatggtcattttgcatatacttcactctgacctagtttagtccatgatactataattgtgagagcatatccagatgctgtgttctctatgtaaaacagtattgtccattcagaaatgtgtgacccttcatttatggatattgactatatgtaatgcagtgctatcccaatattttcaataaaggactttatgcatttaaaaacacacacaaaaaactacacagaaag

SEQ ID NO: 360150 - DNA, 3001 bp, Homo Sapiens
agcggggtgagcgccgagccgggcgcgcagcgacggagctggggccggcctgggaccatgggcggacatgttcccgatttgaggtgaaaccatgaagagaaaatagaatacttaataatgcttttccgcaacagcttcttgctgctgctggccctggctgcgctgctggcctttgtgagcctcagcctgcagttcttccacctgatcccggtgtcgactcctaagaatggaatgagtagcaagagtcgaaagagaatcatgcccgaccctgtgacggagccccctgtgacagaccccgtttatgaagctcttttgtactgcaacatccccagcgtggccgagcgcagcatggaaggtcatgccccgcatcattttaagctggtctcagtgcatgtgttcattcgccacggagacaggtacccactgtatgtcattcccaaaacaaagcgaccagaaattgactgcactctggtggctaacaggaaaccgtatcacccaaaactggaagctttcattagtcacatgtcaaaaggatccggagcctctttcgaaagccccttgaactccttgcctctttacccaaatcacccattgtgtgagatgggagagctcacacagacaggagtagtgcagcatttgcagaacggtcagctgctgagggatatctatctaaagaaacacaaactcctgcccaatgattggtctgcagaccagctctatttagagaccactgcgacaaagccggaccctacaaagtgggctggccttgctttatggctttctcccagattttgactggaagaagatttatttcaggcaccagccaagtgcgctgttctgctctggaagctgctattgcccggtaagaaaccagtatctggaaacaggagcagcgctcgtcagtacctcctacgtttgaaaaacagccagctggagaagacctacggggagatggccaagatcgtggatgtccccaccaagcagcttagagctgccaaccccatagactccatgctctgccacttctgccacaatgtcagctttccctgtaccagaaatggctgtgttgacatggagcacttcaaggtaattaagacccatcagatcgaggatgaaagggaaagacgggagaagaaattgtacttcgggtattctctcctgggtgcccaccccatcctgaaccaaaccatcggccggatgcagcgtgccaccgagggcaggaaagaagagctctttgccctctactctgctcatgatgtcactctgtcaccagttctcagtgccttgggcctttcagaagccaggttcccaaggtttgcagccaggttgatctttgagctttggcaagacagagaaaagcccagtgaacattccgtccggattctttacaatggcgtcgatgtcacattccacacctctttctgccaagaccaccacaagcgttctcccaagcccatgtgcccgcttgaaaacttggtccgctttgtgaaaagggacatgtttgtagccctgggtggcagtggtacaaattattatgatgcatgtcacagggaaggattctaaaaggtatgcagtacagcagtatagaatccatgccaatacagagcatagggaaaaggtccacttctagtttagtctgttactaagggtagaagattattgctttttaaaggctaaatatcgtctgtgggaaccacagatggttggggttgaacagtaagcacattgctgcaatgtggtacgtgaattgcttggtacaaaatggcagttcacagaggaatagaaggtactttatcatagccagacttcgcttagaatgccagaataatatagttcaagacctgaagttgccaatccaagtttgcactcttctggcctgccccatgttactatgtgatggaaccagcacacctcaaccaaaatttttttaatcttagacatttttaccttgtccttgttaagaatttcttgaagtgatttatctaaaataacaggttggcaaactttttctgtaaagggccagattgtaacatatttcagactgtgtggaccaaaaaggccacatacagtctctgtcataactactcaactctgtttctgaagcagggaaagccaccacagacagtacataaaggaatatgtgtagctgggttcccaggccggacaaaacagatggtgaccagatttggcccccgggctgtagtttgctgacccctcatctaaaaaataggctatactacaattgcacttccagcactttgagaacgagttgaataccaagaattattcaatggttcctccagtaacttctgctagaaacacagaatttggtctgtatctgacactagaacaaaacttgagggtaaataaacattgaattagaatgaatcatagaaaactgattagaagaatacttgatgtttatgatgattgtggtacaagatagttttaagtatgttctaaatatttgtctgctgtagtctatttgctgtatatgctgaaatttttgtatgccatttagtatttttatagtttaggaaaatattttctaagaccagttttagatgactcttattcctgtagtaatattcaatttgctgtacctgcttggtggttagaaggaggctagaagatgaattcaggcactttcttccaataaaactaattatggctcattccctttgacaagctgtagaactggattcatttttaaaccattttcatcagtttcaaatggtaaattctgattgatttttaaatgcgtttttggaagaactttgctattagatagtttacagatctttataaggtgttttatatattagaagcaattataattacatctgtgatttctgaactaatggtgctaattcagagaaatggaaagtgaaagtgagattctctgttgtcatcggcattccaactttttctctttgtttttgtccagtgttgcatttgaatatgtctgtttctataaataaattttttaagaatacctata

SEQ ID NO: 360151 - DNA, 2662 bp, Homo Sapiens
  misc_feature (44)..(44): n is a, c, g, or t
  misc_feature (93)..(93): n is a, c, g, or t
  misc_feature (225)..(225): n is a, c, g, or t
agtgtgccatcttatcgcctgctttcaaagtcagagaattttcnatcactgatgtagcccatatccaatatctctgagatggaattctccagntaagaagggcaaggtatcatgtttattaatcatttacatatctaaagttaattgactattaggtctgagtaatatgttgcttttcatttcagtttacataaatctgtaacattttatcatagtgcatgaagnaagtggtcatttattttagtcagaataaatttgtgtccttaattagtttctcacacttgattctgctgaaatcatcggtgccttttatgtgcagattgacgtatattccttttttactgactttatatataaagattcttgggaactcttataatctggaaataataccaattgaaaagagagagaaactaacactgtacaataattacaaacctagaacacatgggtaaaagtgttaggaatatcctgaatttgtgtttttgtctttttcctccattcagtgactgtgaagtcttttccaaaaatcatgctgctcctttctctaaagttcttacattttatagaaaggaacctttcactcttgaggcctactacagctctcctcaggatttgccctatccagatcctgctatagctcagttttcagttcagaaagtcactcctcagtctgatggctccagttcaaaagtgaaagtcaaagttcgagtaaatgtccatggcattttcagtgtgtccagtgcatctttagtggaggttcacaagtctgaggaaaatgaggagccaatggaaacagatcagaatgcaaaggaggaagagaagatgcaagtggaccaggaggaaccacatgttgaagagcaacagcagcagacaccagcagaaaataaggcagagtctgaagaaatggagacctctcaagctggatccaaggataaaaagatggaccaaccaccccaagccaagaaggcaaaagtgaagaccagtactgtggacctgccaatcgagaatcagctattatggcagatagacagagagatgctcaacttgtacattgaaaatgagggtaagatgatcatgcaggataaactggagaaggagcggaatgatgctaagaacgcagtggaggaatatgtgtatgaaatgagagacaagcttagtggtgaatatgagaaagtttgtgagtgaagatgatcgtaacagtttttactttgaaactggaagatactgaaaattggttgtatgaggatggagaagaccagccaaagcaagtttatgttgataagttggctgaattaaaaaatctaggtcaacctattaagatacgtttccaggaatctgaagaacgaccaaaattatttgaagaactagggaaacagatccaacagtatatgaaaataatcagctctttcaaaaacaaggaggaccagtatgatcatttggatgctgctgacatgacaaaggtagaaaaaagcacaaatgaagcaatggagtggatgaataacaagctaaatctgcagaacaagcagagtttgaccatggatccagttgtcaagtcaaaagagattgaagctaaaattaaggagctgacaagtacttgtagccctataatttcaaagcccaaacccaaagtggaacctccaaaagaggaacaaaaaaatgcagagcagaatggaccagtggatggacaaggagacaacccaggcccccaggctgctgagcagggtacagacacagctgtgccttcggattcagacaagaagcttcctgaaatggacattgattgattccaacacttgtttctattaaaacagactattataaagctttaagttgtcaactttgttctaaatatcaactagcgcaagtgaatactgaagatttcttagtcagtttttaggggattttcggggaggggaaataggtaatgtatggagcattttcacttctaaatagttagatacagaaattaagtgcattgtatctttttcataatggtactatttagaagcccagttagtcttactgagcttatgcttcactcctttatgtttaaccatgtgtctacaagaataagtttgttttggaaagttgagctatagctacagctctagctatccagcagacttttcattatggacttacatggcaggagctctaattatgctttaaaaatctgttgtggagattgctttaaatgctccctgcctggtgtggggatggggtccccctctttgtgagggctggagcatggcacggcatggattaacacggcagaggaacaaaggtgtgctctgagcttcttcatatttcaccttcaccctcacctgtgttctcttccctctctcccaataaaagggctcccattataaatgccatgtacttctcttgggaaaatagacccccttgcctagagtaagttgttaactgagggctttaaacctggaggctcttcctgaaagtatgttcatgaataccccaagcatcaaggtctaaataattttcagaagattagaattgggtagatatactgttggatatagccatggtaaatttaactgaggaattaaatccttgttaattttggtgtaaagatttgtatcctggcctgtttattcaggtgggagatgttctgtataatgttagagatacggaccgagcc

SEQ ID NO: 360152 - DNA, 966 bp, Homo Sapiens
  misc_feature (85)..(85): n is a, c, g, or t
aaattaaaaaggaaaataaaagatattgaggtcttcctagtgttacttaaattaagatcaaggtaagaaacattgtaaaaaaaanttacaaaagtgctatttgtttcctaaaaacagtgatttctattaaaaaggtgtcagaactggagaaaatgccgtgtagttataattttttagcacagaccctgctgatcacgatgacattttgccgtgtgtgtgtctctagactggtgggccagtctccttgaaggacagaggcggagctccccacccttctctctcctcagaaaagaccgtgctctcttcttggtgcagggatcttgtctcctgttgtgaagcccaaatggaagcgtggatggtatcagggccctacccgtggtcttctcagattctgctagagcaaaaggctggtgcctaaataagatcccttcctttggtgctgcttttggtctttcagccaccagcattatgaagtgcctgggggacacctccgagggaactggccagcggagctctgtggtgcgcacgcaccctggccgtgacaggagggtgcgggagtacggctgcatcaacccttggtgcttagaacagaggaagagtgacatgttttgagggtaccgtctctgagacagaaccccaacgtggccttcgctctggcttgcctttggggagaggtctgaagctcccactcctttctctgcctgttggctccaggccaccagaaatttactccactccacccacccaaaagcctccctggggtgaccctggggctagaaattgctgccccttgcctcggctttggccgggttttggccctctcccttgacaaaaaccaagggttggggaaagaactcccagaccattctcttccttctttggcctcggcccaaaaagaaaatttggcggtcaacaattttggggcttctccgctggggaaaacccttttgctgccctttgcggtga

SEQ ID NO: 360153 - DNA, 776 bp, Homo Sapiens
  misc_feature (220)..(220): n is a, c, g, or t
  misc_feature (272)..(272): n is a, c, g, or t
  misc_feature (358)..(358): n is a, c, g, or t
  misc_feature (372)..(372): n is a, c, g, or t
  misc_feature (538)..(538): n is a, c, g, or t
  misc_feature (608)..(608): n is a, c, g, or t
  misc_feature (764)..(764): n is a, c, g, or t
ttcaaaagaactgctgcccagtgactccgtgctgcacggaagaatatcagctccagaaacagaaaagatagtcctagaggcaggaaatggattaccatcctggaaattcaatgaccagctttttccctgtgacgtgtgtgggaaagtgtttggccgacagcagacattgtcccgacacctctcgctgcacacagaggaaagaaaatcaaatgccacttgngccccttatgctgctaagtgcccgtgcaaatcttgaccagcacttgaccgtncattccgtgaagctggtgaagtacagacaccgaggacattgtcaagcggccgtcaccttttgaaggcagtgatgggaagaaacatncttattattacagntgtcacgtgtgtggatttgagaccgagctcaatgtccagtttggcagccacatgtcactccacgtggacaaggagcaatggatggtttcgatctgctgcactgcctgcgacttcgtcaccatggaggaagcagagataaagactcacattggcaccaagcacacanggggaagacaggaagaaccccaacgaatcaaataacccctcttcatcctccctctcagctcttgagtganttaagccaacagcaaagatgattcaaatggctcccagaaaaacaagggcgggaacaatctgctggtcatctctgtcatgcctgggagccagccctcactggaacagtgagggaaaagccagagaaagggttcgaatgtgtttttttggcaactttntctggcaagacg

SEQ ID NO: 360154 - DNA, 1500 bp, Homo Sapiens
  misc_feature (255)..(290): n is a, c, g, or t
  misc_feature (906)..(956): n is a, c, g, or t
  misc_feature (1296)..(1394): n is a, c, g, or t
  misc_feature (1408)..(1408): n is a, c, g, or t
gggggggactaggagcgctctgccgacgtcagcttttgtctccagtattttcgggggctggtggacgcgtgggcgatagggtgctgtccttggggtgctgtgtatatgggatgatgacgcttatcagcattatctagtcctttccaccccgaaattcgccccgattaaagactgtgttgcattatcaggtaatgagatgtgagggagggtctttgaaagtggaaaacctgggcgtcgaggccactgtgccatctnnnnnnnnnnnnnnnnnnnnnnnnnnnnnnnnnnnnatgtaaagctgctatgtaaaatgtaaagctctacataaaccactctctgcattactttggatatatgagaatattaacgtttgacgtctacgagactagatcccattcgagcatcacctcccataaccttacagactaacccctcttttaaatctcagtggttcgtaatcttacagactaacccctcttttatgtctcaatggttcttgcagctggcttttgtttcattaagttctcaatttctgtcactggtgtttgtactttattaaggaactcttaatggaataggcttttggggtttttctaagtttgcaggatgatgaaaaacatggctgctgtatttgttggctttcctgagtttattcatatagtaacaggtaactccaaaccttcagtggtttacagccacagaagtttatttctcactcacgtgatctgtgagctgggagatggctgtggctctgtgctccatgtattttcttcattctaggatccaggctttcgtgagtaaatacagaaagatttttgtaatatatcaactgtttaaagtttgagtgaaacgtttaaaacagtacagaacttttatgaataccctgtccattagtagacactactnnnnnnnnnnnnnnnnnnnnnnnnnnnnnnnnnnnnnnnnnnnnnnnnnnnaaaagcccatcctctctgattttgccaatggctcaggaccatcgtctagaaaagtcttacagcaggtggcttgcctcagttatttcagggcatccagaaagacacattaaccaaagactgctgaatgctttgggagagaattctggtgactgaaaatgtgtgtgaagagagtaaacttttctcaggatgtctgcactcggggaattacccttggcagcaagggcttctctcactgtgggttgctgtgctgggtcctgccagctccattcataacctcaagagaccaggggtcctctgcccaatcttgcatggcaaaagaaagttaacgtgaggaggccgnnnnnnnnnnnnnnnnnnnnnnnnnnnnnnnnnnnnnnnnnnnnnnnnnnnnnnnnnnnnnnnnnnnnnnnnnnnnnnnnnnnnnnnnnnnnnnnnnnntccgaaaccccatnctctgtcaacctgttagttcccagcctatctcggggaaggcttgaggggggggagaaatccgctttgaaaacccaggggagggcaaaaaggc

SEQ ID NO: 360155 - DNA, 681 bp, Homo Sapiens
gttgctagggaccgggcggtttgcggcaacccgtgggcactgctgaatttgaattgaggggcgagggaaaagttttcctcaggtgtggtggggagagggaggcggatgccgggaaaccgtagggacgcggtcagaaaggcgacgggctgtcggagttggaaaggtaaagttggaggctcggcggcgtcctgcctccgcgctggccacacccgccgcggctgcccggggcagggagggatctggctgattctccctgtaccctgtgccctcggagctgcccctccgagcgcccagaggtccccgcctgcctgcttcctggaggcagggctaccatcagtcccacgcctcgcgtgtccgccccccgcaccccggggccaaggaaagggatcgcggtctggactccccggggagttccattgatgaggggaagggcaggtttggggacggcgaggacacgcggcgaacggagagaggctacctgacccgcgcagcccggactcccttcccttcccttcaaggacgcctggtttccccccaagcgaaccgggatgggaagtgacttcaaatgagattgaacttcagactggattgaaagagaggctagaagttccgcttgccaacagcctccttagtagagcgggaatgagtaatacccacaacggtgcttgtctcactacccca

SEQ ID NO: 360156 - DNA, 2248 bp, Homo Sapiens
  misc_feature (1897)..(1988): n is a, c, g, or t
ttttataaaatgccagggctgtaccggtccggaattctcgggatatcgtcgaccacgcgtcgggtcttacaggagggcagctctgcagtagggaggggcaccgtccggaggagaccaggtctctacacaccccccactctacttatcatccctgcgtcacacaccctggtccaaggcttatgcatcggattatttttccaaatcaagaggacagtgatagatgcattttccccaggctgtctcagaaaggtcgctaaatgtatactgttgtcagaattgctgagatctccccccacttttagtttttgcagcagtaaaaactctttccactgtgacttattttctctctcaggcagccagccacctggtcccttgtgctgactctagcacagtggccaggatccaatacgagtccaggggtgaccgcaggatggtgggggcagcgggcttctccacctaccccagccaccaaggccctgacgcactgcctcctgcaccttcagcacatccctgtgcacagctggaagggtgcatggcccgctcacctttgttcagatgggtggaaacgctgatgataccagctcctccctgccgtgcccctgccacggagcaggcattgtgaactggctggtgtttgcagtcccacgtggcatggcctccagcccaacccacagtggagactggagacagggcaatgagtctggtcgggggcacgtggacatgccccataggggccccacccagacttaacaggcaaggtcctgggcattgcgcgacgcaggactcaatgctaaagcaagcctgcctggctctgtgccagggcccctcttctgatttacacatcccatttttacacagacccttccttcttaataaaggctgacagttctgttggcagccaagaacccacaccatgaagacagggagtgaggggcctttgtgcccaactccagcacagctgcgttctggggtgtgtgagaggcatgttcgtgtctgtgcgctggtggtctcgtgagacagttccgaggacggggaaattgcagggtggtgggggcgtgaggcttatatgtggaactgatgcagagttcgcctgcagacggatctggatatacactatgtataattgttacgtgtaatttaaaatatatctgtttgccatcgtcatgagaagattatatgtaaggctctgaagggagagggagatgtacattctgccaggctcctggggaccttatccgagtcatgaaattgatgactgttgatccagtggtgcaagaagctacactccatgtgtcatcacgcttatgactcctaatgtatttttaaggcaaaaaatgtcagccgactccatcttcacccctcgattcctcgagtccagcctttctgtgccagtgcttcactgagccacaacgctctcgccatcgggacccggctgggcctgggagtctccggggcacagttgccatggaagccctcctgggttcattcttacaaatgtgctggagtgccagctggaaaaccccacagggagatgggagttaccttgggccaagcttaaagagaagattttctcagggtatttattagtgtgtccagcagggtcaggaagcaggatggaaagatgcattcagactgttaatttattaacaaggcaaatgattttgtgtttcttgatgacagactattaagtttgggacttattttcccatttgagaagttataatatatatttaagatgataagtttcctgcttaagttgtgcctttcagcttcaatgagtttaaggagcactaagggtaatgataccaatgagggttggtttattatcaaacctgaatagctgtggtttctccagtaaatattttcttctactgaacatggagccattattaagagnnnnnnnnnnnnnnnnnnnnnnnnnnnnnnnnnnnnnnnnnnnnnnnnnnnnnnnnnnnnnnnnnnnnnnnnnnnnnnnnnnnnnnnnnnnngatactagatttagattctgatgctaactgcaaatcaggttggtctctgctgggtctctcctgcttttattttactttaaggacaagtgtagttgtcgtccaccacctttcaaaaaatgtgaaactgccctgcctcccctttttgctgacaacactgtgtacattgaccacttcctaccatactttatgttgtaaaatcaaactcttttgtggtacattatctcatgcttctgcaaattcgaataaattctatggcttcc

SEQ ID NO: 360157 - DNA, 461 bp, Homo Sapiens
  misc_feature (107)..(168): n is a, c, g, or t
ctaagggtaatgataccaatgagggttggtttattatcaaacctgaatagctgtggtttctccagtaaatattttcttctactgaacatggagccattattaagagnnnnnnnnnnnnnnnnnnnnnnnnnnnnnnnnnnnnnnnnnnnnnnnnnnnnnnnnnnnnnnaatagttttcttttagtttcttaaagttgtgatactagatttagattctgatgctaactgcaaatcaggttggtctctgctgggtctctcctgcttttattttactttaaggacaagtgtagttgtcgtccaccacctttcaaaaaatgtgaaactgccctgcctcccctttttgctgacaacactgtgtacattgaccacttcctaccatactttatgttgtaaaatcaaactcttttgtggtacattatctcatgcttctgcaaattcgaataaattctatggcttccaaa

SEQ ID NO: 360158 - DNA, 556 bp, Homo Sapiens
gagaagttataatatatatttaagatgataagtttcctgcttaagttgtgcctttcagcttcaatgagtttaaggagcactaagggtaatgataccaatgagggttggtttattatcaaacctgaatagctgtggtttctccagtaaatattttcttctactgaacatggagccattattaagagttgtgtgttttttaaatatgtacatttgtaaaaattttttgcttgtttgaatgttcctatttttgctaaaagttttcttgttagtttccttaaagttgtgatactagatttagattctgatgcctaactgcaaatcaggttggtctctgctgggtctctcctgcttttattttactttaaggacaagtgtagttgtcgtccaccacctttcaaaaaatgtgaaactgccctgcctcccctttttgctgacaacactgtgtacattgaccacttcctaccatactttatgttgtaaaatcaaactcttttgtggtacattatctcatgcttctacaaattcaaataaattctatggcttccatgaaaaaaaa

SEQ ID NO: 360159 - DNA, 728 bp, Homo Sapiens
  misc_feature (179)..(179): n is a, c, g, or t
aggtgggtggatgatacattggtgtttgacacgttaatctctatactttatgtattttgctagtctaacataagcaaaatgaatgtttcagttaggtaaccgaaattgaaaacaatataagcttcccatttcgaagaaggatagaatagttcacagtagggtaagccttaactaaaaanccaaatagaaaaattaattaattacaaaaatagcaagcagaacttttcagaagtgagcttgagaatctgcagtgttccctcaggggcagttactcaatctccacacaggttacaagttgcaaatatggactaggcccagagagaaggtcactgttaggaacaggaaacaagcagagctttttataaccctattgggctggagaaacaaaaatggagcttgagggttttcaaatgcatgtacatttttcaactctgacatttcatggattctaaagctgcacaagatttgaacaaaaactttgtgaaaacagagtgcatttcttgcatgtatgcactgttcaataaataaatacctgccaagggttggagcaagggaaggtacatgagatcaataaatgagagttgaaagtacttgtaggagtaccagtttgaccttgatcatctcctcaacctctttttccctaggttcacttaaaaatctgaacgtatttagagggtgataaaccaggcttgcaccttgagggaagaccattgctgtggtacagggag

SEQ ID NO: 360160 - DNA, 369 bp, Homo Sapiens
tcctttttacctgatttaaataagcatttaattaggatttcattactatttaatattgctttttcaattccaaaaagttaaattttcactttttagcagatattttaaagtacaatattaagtttatacaaaatgagcaattaagcaaacaccattatttcacattcttcaaaaatacaaattcatatttattcttttttgggtttggaggtttcttcctttggaagtactgaacctgtaacgttttcacatcgctcagtggaagtccgttgttcccatgtttcacacttacttttacataatccaaataaaactatttgggattttaaaagttgtcaccaagaccccggccaatgattagtgtatgtc

SEQ ID NO: 360161 - DNA, 1384 bp, Homo Sapiens
  misc_feature (18)..(18): n is a, c, g, or t
  misc_feature (24)..(24): n is a, c, g, or t
  misc_feature (48)..(48): n is a, c, g, or t
  misc_feature (69)..(69): n is a, c, g, or t
  misc_feature (71)..(71): n is a, c, g, or t
  misc_feature (110)..(110): n is a, c, g, or t
  misc_feature (115)..(115): n is a, c, g, or t
  misc_feature (119)..(119): n is a, c, g, or t
  misc_feature (127)..(127): n is a, c, g, or t
  misc_feature (151)..(151): n is a, c, g, or t
  misc_feature (161)..(161): n is a, c, g, or t
  misc_feature (174)..(174): n is a, c, g, or t
  misc_feature (176)..(176): n is a, c, g, or t
  misc_feature (276)..(276): n is a, c, g, or t
  misc_feature (280)..(280): n is a, c, g, or t
  misc_feature (347)..(359): n is a, c, g, or t
  misc_feature (1186)..(1186): n is a, c, g, or t
ccttaatttggttaaccntatccnttgagaactagcctcaggcttaanattctcattgcatttgcaagntntgaccaaattaggtttaagtaacccaatccattgtatanataangccnttttgtgnaccatgtagtttatagaaagtatnctttaaaggnaatttgccgaagncnttttactgattgaccagttgtgctacaatcaccttttcatagacatgacctgcattccacatctcaatctaacagtttagtagtgatgtaaagagaagtncaanccgaactccagtgctttgttatgttttattaactggccctgtctcaggaacatcttaacagatggcnnnnnnnnnnnnnctttttttcaactcctatgagtggcaactgaagttcttattgttgggaaagaacactagtcctacctctgccactaatgaggtgtttggaggaggtaccagccatataatagggggtgtatgtgtgaattttgtttaaactctactgtatattgaaatgaaattcatttatttgtcttgacaatgttcaaatgatgtagattgtcttagaatgaatattcataagtactcagaactcttaagatgcagatgccacccgtgaggagctaaattcctaatgtgtattgtattccaacccaattttactggaactattgaataaatcttttattttctttcaggtttacttgatagtggatacattggtgtcagaggaccttgactgggttcattttatgtccagacatcacccctgaaacactgtactgtactatcttgctctgagtagtatcaactggatcgtctcatatttgcctcattcatcctattaatttcaaatgatactgtgggggaaaaacagggttagaaaaacaagtggaaaaaatggagtgatgttgtaatctaaacaagtgccttatgtttattgctaagaactggtgttaccaacccttttgagaagaaagggtctcttgacctgtattaacataggaaagtaaagttctttttgtttttctttatattcagctactcttgtcatttctcgttgaaaaactaaaatctgactaggttagtttactcagctttaattagatagttgagtcatatattttcaacatttttctgtatcgtattttattatgcacaaaaataaagtgtgatctctaatgncacaacacatggacagaaattccccccgggataatcgtccattgaacaatataaagtttagcacgcgtggccgtttgtgcccaactaaaaacacctgccacgccgcccccctttagtgggaggcgctgtgtcgcccgcccccccaaaggctcttctttgagagaaagttttcttttgtagacacaataggaggagagt

SEQ ID NO: 360162 - DNA, 751 bp, Homo Sapiens
  misc_feature (417)..(417): n is a, c, g, or t
  misc_feature (703)..(703): n is a, c, g, or t
atttgaatcctttgagcctgctggcctactggcagatgctttttctttttctgttggaaactgaacacactacagacagtgaaaaaaggtacatattccattttctcattgcctgaagatctctgctgatgctcctggagaatgactttgggggctttagaaagaatattgccagtccgtctcggcaaggagatgatgggagcgctttatatggaggctttacatgacttgtaaattaaatgtgaatgagggcagttgattaaaattggtattacagaagggccctgctgaggtttgaaaacagctgagctgctgatgtctcaggcctttccctgaattagcactgcggttctccaggatatcagcaaagagggcaagtaatagaagcccctgataaggagcgtcaccgacagaagncttgggaggctgtgggaatgggtctgcccccagcttcacagacctcttcctccagcctctgaatcccattagccacagcctagaacattagctgagctgcacaagctcacccacccctgtgccagggggccctgacctccctccatgccatgtttttggctgtatctacggcacttaacaataggggctttttattttcattacagagatattttgaaaaatttaaaagacatgaactcacattaaacagttatgggatggattagtttaaaaggagaaacgggtnggaggtgggttgagaggttgttcttcctggaatataatttacttgaga

SEQ ID NO: 360163 - DNA, 1419 bp, Homo Sapiens
  misc_feature (160)..(160): n is a, c, g, or t
  misc_feature (565)..(624): n is a, c, g, or t
  misc_feature (764)..(811): n is a, c, g, or t
caggcccttttccccacaacacacttgaggttgaagaaggttgggaataaaacagcgtccaaccactttttaaatgggcgggggcaggtccaagacaagggagaaagggaaggacttgagagaaagaaattattagactttttagactggctgaaccccnaaccctttacattggttacaaaaatcatgcctggaggtgaaaaattcaatagcattataccaagtgtttgggcaacggtgtagagacaatagtagagacaagctacagctttagacagtggtagagagaagctacaactttagcttgtagaaacagctgttgggtgttcagcagatgcagtctaggtgcatgcaaacccactgtgtgcagcatgccttcactctcacgacaagggagccagaccttgtgtctgcggctggctgaatattgcatggaatctgtggattcacagaggcttctcctcagctaagagggagtgtggctggatgcatttctctgtggctcattcaatttggggtatactcatactactgagtctctatgaaggagtgataagctgggtcnnnnnnnnnnnnnnnnnnnnnnnnnnnnnnnnnnnnnnnnnnnnnnnnnnnnnnnnnnnngagagctaacggtaaacaacaacagtgaaaaaacatgtaacatcccaaccagtgcttctaaggatttaaaatatgctggtacttatgactttattcttacttctgtattatagatatgtatatggctttggggtatgtgnnnnnnnnnnnnnnnnnnnnnnnnnnnnnnnnnnnnnnnnnnnnnnnnatcagctgtccatagcctactcatctctgataatttatatttggtactcaaatttctcgaatacccctaccaaatcattctctcctccttaccaatattataatgtccctgacaataacataacaaacccagctctaacacctacagatttctttgagaacaaacaacttctacatgcaatttcttttctatactcaccaactggttttcttcaacctcctgcccaccctgtccagctcaggacatcaacaaccctttatggaaaccaccgaggtcagactggatgcagtcagttggactgattcatcatgactagttcaattaagagctgatcaccttcaaacagctctgactttggaagcaattgatttgactgcctctttggtcacatggccagatttacccataattttttgcaaacttggatgcatctttagatacagagcaatgctttggcatctgggggagggggttgttcctggtgctgtcacttgtacccactctcctgtttcctctccaactatgagtcacattttccctcaatatctcctatcttactttttgagtgatcagccctgactttcaagtctaaatttctcctccacgcc

SEQ ID NO: 360164 - DNA, 823 bp, Homo Sapiens
  misc_feature (139)..(198): n is a, c, g, or t
cacataccccaaagccatatacatatctataatacagaagtaagaataaagtcataagtaccagcatattttaaatccttagaagcactggttgggatgttacatgttttttcactgtgttgtttaccgttagctctcnnnnnnnnnnnnnnnnnnnnnnnnnnnnnnnnnnnnnnnnnnnnnnnnnnnnnnnnnnnngacccagcttatcactccttcatagagactcagtagtatgagtataccccaaattgaatgagccacagagaaatgcatccagccacactccctcttagctgagaagaagcctctgtgaatccacagattccatgcaatattcagccagccgcagacacaaggtctggctcccttgtcgtgagagtgaaggcatgctgcacacagtgggtttgcatgcacctagactgcatctgctgaacacccaacagctgtttctacaagctaaagttgtagcttctctctaccactgtctaaagctgtagcttgtctctactattgtctctacaccgttgcccaaacacttggtataatgctattgaatttttcacctccaggcatgattttgtaaccaatgtaaaggttctgggttcagccagtctaaaaagtctaataatttcttctctcagtccttcccttctcccttgtctggagctgccaccgccattttaaaagtgttgggacgctgtttattcccagcttctcaacctcagtgtgtgtggggaaaggccggggaaggagagaggtatgtttttcttctccttccagagttctctgtgggtgtttgagcacaggcaggagagaggga

SEQ ID NO: 360165 - DNA, 1018 bp, Homo Sapiens
  misc_feature (889)..(922): n is a, c, g, or t
ccccttttatacccgggtttttccaggggcgccctcctccgggaaaaaaagggggttaaggttaatttaaaaaaccctttcgggggttgggaaaaattccccggattccaattaggggtttttggaatttttcggggctagggggtttttaaaattttttgggacagcttggggcgggcttgccgttttgtcatttccagggaaaaatccttatttttttcatagttacccatcaagatctgaataaaatacacgttttttgaaagctctgtttatcccatgaattcttgtttggtggaaccctgaaattggagttgactgtgaacatggaacaaagtcttgactattttcaaaattatattctgaatctgattgaaaatgaggtgttggagagcatgttcttgaatgcctagagtcagataggctttgcaaggataatttttgtgaaggctggatgaagtcttcagaaagtgatctcagtgaaaaatcagactctgaagggtgactttctgccaaagatgttccccattttaacaaaatatcctgtgattttttggtaatctcagttgcaatgtccatttctttagcaatatcatcaaagagatcagcagaggcatcatagctaccttcataaccaatagaatagctctgtgttacgttgttattgatatgtccccaaggcatttctttcaatgtatttgtacttctatttggactattgcaaagagtttctaaaggatatgtaagtttcctgcaaattgtaaaactgtcatcttggttcttggaccacctacaatattgtttattttctaatttgcaaagatcagagacatcattatacttcctataacacagagttgtcaacttttcattcatttctgaaactgannnnnnnnnnnnnnnnnnnnnnnnnnnnnnnnnnagactagaatggtcactctccctgtgtggtgagattctgatagtcttcttaagagtaactattgtttctaaatcttttgaagatgaagacagagct

SEQ ID NO: 360166 - DNA, 769 bp, Homo Sapiens
  misc_feature (165)..(173): n is a, c, g, or t
  misc_feature (502)..(502): n is a, c, g, or t
tacttgctatatttctttgcactaaaaaagagctatgtgtttgttttataggacactttagtaccgtattgcctacaataactcagtttgctccttaaattccaaactctgggaagttgataaataacttccatgatcacttgtaaaagttacatgcacatctgnnnnnnnnntcacaaatctctatgacagtaggttatgttttgagcttgttaccttgcagtattcttctctgttccataggtgaaaacaaagggtgacagaggttatcaggcaggaaatgcctaaatacatacatctctgcatggtacaatttctcatattcatgtattccataaacagtgttttttctctgtttaagcagactgttgtttcttctgagtcagtgatatgtgatcttcgttggtttcattttgtgaagctcaagtctgtctctgtaacatactttaggatttgcaccttgtgctccccaggaattatgttagtgccttttctatgctgncttcaaggatggacagaggcctaaaccacaacaacaacaaaaattagaaaaaaagatacttagatttcggtaatcatccataggaactcatagcatcagtctcttttctctgggaataatatccttgggtaagttgtcataaaaaatcaacgttagaagacgacaattagaattcttcttaggtattgagggtaagaagttgtaaagaaagaaaattcgtgtttcaactaaaagattggattgcatatacctttgaagtggttttgt

SEQ ID NO: 360167 - DNA, 675 bp, Homo Sapiens
cctttgccaacaaaatatcagaatttacattaaacctttcttctacaaaagctgtttgagctctgcttttgcagctttcttggaggaacctgtagcttaaaagctggaagggggtgactgcaagaaatgaaaaaggaaagcaagggtggagaaggccaggtcatcccatgctacagctggaagttcttccaaagcccctggaaactccctgatgaacccacctgaagtctgtgttcactcacccccaccttccttactccctccccctgcagttaagacattgctgccctagaataaaaggacaggtgcttgtcacagagcctccagtaacccaacattatggatgcttcctggtcacgatggaaacagcactgccaaagttgagctccctgtggtaatgaggggagaaatcttcctctggccaaggattctgagaactctgttcccagagcagcttcaaaaagctacatgtctcagtgtgtaaccttgagatcaactcaaagcccagggttcttggtcccaagcaacttgaaatctctggaagagaagcctgggaaggagaacttggtagtatttcctcagctctgccactgagctgccccttttgctaagttttaatcttctcagtacatcaagtctgctatgtggaaatgagtaacgtacccggcggcgact

SEQ ID NO: 360168 - DNA, 899 bp, Homo Sapiens
  misc_feature (267)..(282): n is a, c, g, or t
  misc_feature (483)..(497): n is a, c, g, or t
cattggatgcctgaagacattctgcctgatgtgtgggtgaatgaaagtgaacgacatcagttaaaaactaaagtagttcatttatcaaagctacccaaagatactgccttgcttttggacccaaacatatacagaacaatgccgcagaagaggttgaagaggtaaaaaataaataaatacataaaaagcaaacaagcggggacacctgcagtcttagtcactgacaatgggtttagggaaagttgcacattagagtcaaccccttcnnnnnnnnnnnnnnnnaaatccagtatttaggataatatttatgcttagtgtaaacattctgtgaatgaagtagactcttcggtggaatatattaatatattactgtatatccacattttcatggaatggtactgtgggagactgagcaaacactcttttggcaacttagtagaacagcttcttaaaggctttgcatgcttgctgctttaagctgcnnnnnnnnnnnnnnncttccctttagtgatttcaagtagtttatattggaaagaaaaacaattacaacatgtgcccttacaaataccaaaagcactgtaaggatatttggcttgacaggggttattgatttgaaatcatattaggaaatatttagacaatgaaaattatcaagagataatttacctttcaattatgataaatagatgtgattggttgccatttgtgttcttttgcagaactctgataagaaaagtgttcaatttgtatttaagcaaacagtgaacgacgtttgcaatcaactaaaaattcgtctatcgaattagggctgaaaattactgttaaagagtgttgcagtatgtctggtggctcccttttcaggactagggctttctcatggagtacctgcccgggcggcc

SEQ ID NO: 360169 - DNA, 665 bp, Homo Sapiens
  misc_feature (556)..(556): n is a, c, g, or t
  misc_feature (558)..(558): n is a, c, g, or t
  misc_feature (654)..(654): n is a, c, g, or t
ctagtttatagttttttaaaaaatctctttattaacttgttacagtagaatacattttttaaaatatagtacaaaaaattctcggtgatcaccaaaaatgtaatcaataaggttacattcctttgtttctctgaatcttctttttcctataatgaaaagtgtattttttaaaccttaagaaattctttttgcactaccttttcctatccattgcatcatagtttatgtcccaccagttaggatcttggagaactgctcacattaatcttgtttcctgggttttatttcaaactgtcctgaactttatagtaatttttgctaaaggaagttcctagtaagcagttatttgcctttggtaaacttaattttagatgaaaactatgcacaaaaaaacaattgtcttatgattagaccttcaagttaggaggtgaatagtctatgcagcataagacaaaccataactcttacctttaaattttctcatttgacaagaactatcaaattcctttttaaaagagtacacatatacgtttttaatttggaaatttcatattcngnaaaaattcaaattttaattactggggaattttgacaacttcagcaatggcaaagctgaattatttcactattatctatcaaaaagcaggtacattntaggattccaa

SEQ ID NO: 360170 - DNA, 2063 bp, Homo Sapiens
tgcctgttggcctactgggttactagcttgtgtgaagacattcttttctccttccattcttgtttacagttagctgagcagatgacacagtcagatgcacaggataatgctgactacagattatttcagaaaacactcaaattgtgtcgtttttttgccaactcccttttgcactacgctaaggaatttcttcctttcctctctgattcttgctgtactttgcaccaactgtatcttcagatacacagcaagtttcctccaagcctttatgctaccaggatttctaaagcacaccaagaggaaatagcaggtgctttcctagtgacactggatccacttatcagtcagctgctcacatttcagcctttcatgcaggtggttttggacagtaaattagacctgccatgtgaactgcagtttccacaatgtcttcttctggttgttgtcatggataagctgccatctcagcctaaggaagtgcaaaccctgtggtgcacagacagccaggtctcagaaacgacaaccaggatatctctactcaaagccgttttctacagttctgagcagtgttctggtgaactctctctacctgttcatttacagggattaaagagtaaggggaaagctgaggtggctgtcaccttgtatcaagcatgtttgtgttcatctgtggtacatttattacttcctttcatccctcactgtttgctgaactggatgctgctctgctgaatgctgtacttagtgctaatatgatcacctctttgttagctatggatgcatggtgcttccttgctcgatatgggactgctgaactgtgtgcacaccatgtcaccatagtgtctcatctgataaagtcatgccctggagaatgttatcaactcatcaacctatcaatactgttgaagcgtctctttttcttcatggcaccaccccatcagctggagtttatccagaaattttccccaaaagaagcagaaaatctgcctctgtggcaacatatttccttccaggcgttacctcctgagcttagggaacaaactgtccatgaggtcaccacagtaggcactgcagaatgcaggaaatggctgagcaggagtcgtactttgggagaactagaatctctgaacacagtactgtctgctttgcttgcagtatgtaattctgctggtgaagctttggatacaggaaaacaaactgcaattatcgaagttgtgagtcagctttgggcttttttaaacattaaacaggtagcagatcaaccttatgttcaacagacattcagccttttacttccactgttgggatttttcattcaaactctagatcctaaactgatacttcaggcagtaactttgcagacctcgctacttaaattagagcttcctgactatgttcgtttggcaatgttggattttgtatcttctttaggaaaaactttttatacctgaagctatccaggacagaattctgcccaacctgtcctgtatgtttgccttactgctagctgacaggagttggctgctaaaacaacataccttggaggcgtttactcagttcgctgagggaacaaatcatgaagagatagttccacagtgtctcagttctgaagaaactaagaacaaagttgtatcctttctggaaaagactgggtttgtagatgaaactgaagctgccaaagtggaacgtgtgaaacaggaaaaaggtattttctgggaaccctttgctaatgtgactgtagaagaagcaaagaggtcatctttacagccttatgcaaaaagagctcgtcaggagttcccctgggaagaaaagtacaggtcagcgctgcatacaatagcaggggctttggaagcaactgagtcactactccaaaagggtcctgctccagcctggctttcaatggaaatggaggcgctccaagaaaggatggataagctaaaacgttacatacatactctagggtgaaacttatcactaggcagaactgggtttgatgctttgtcaactgaaaatacttatgtctgtacattttctaacagatataaaacaaattttgtaaagtt

SEQ ID NO: 360171 - DNA, 860 bp, Homo Sapiens
gtcctttacctgaacccacagaaagaaaaatgaaaagaaactttacttcctaaatgtttagtttgattccttgccttattaatcaaatgagtctcctaataatttttggcagtaactgaagatcacatctacttattaaaaggcagaatttgacaccaataaggatattcaaaatattgttttgagcactattagtatagtaattagtatagtagtaattcatgaagaacaacattctgataagttttagtcaaactctcataaaaagaaaatacatttatgaacttgtttataagacatgtaagcttggactatgcagcacttctcattgggagccctttgggacaggatacttgttgtataccacatacaaactaagacactggtagtagcactctgaattgctatgataaaccaaaatgcctttacatatttttctagatgactgtgtaggggttttggggtgcatcctcctacccttgtgatccaatgactagaataaaatttgcatgtaagctttactccagtccaaaaggaaggttctttatatttagaatggatattgtgatattacttatgttttttttccagccttatgcaaaaagagctcgtcaggagttcccctgggaagaagagtacaggtcagcgctgcatacaatagcaggggctttggaagcaactgagtcactactccaaaagggtcctgctccagcctggctttcaatggaaatggaggcgctccaagaaaggatggataagctaaaacgttacatacatactctagggtgaaacttatcactaggcagaactgggtttgatgctttgtcaactgaaaatacttatgtctgtacattttctat

SEQ ID NO: 360172 - DNA, 1183 bp, Homo Sapiens
  misc_feature (176)..(219): n is a, c, g, or t
  misc_feature (1020)..(1020): n is a, c, g, or t
  misc_feature (1033)..(1033): n is a, c, g, or t
  misc_feature (1036)..(1037): n is a, c, g, or t
  misc_feature (1039)..(1040): n is a, c, g, or t
cggcggctgtgggtaaggcgcggcgcgctggccccgagcgcgccaaccttgccctagccggagccctgctgcggcccagcgcacggccctcaccccgcatcgcgaccccgcgccccgccggccgagcatggtgcgcgctgcgcctcatggcgggcccctggcccgggccgggctcnnnnnnnnnnnnnnnnnnnnnnnnnnnnnnnnnnnnnnnnnnnngccccgtggcgcgcagggggcgcggggccgcggctggcgcggagaagaacagctaccgccgcacggtcaacaccttctcccagagcgtcagcagcctgttcggcgaggacaacgtgcgcgccgctcagaagttcttggccaggctgactgagagatttgtgctgggagtggatatgttcgtggagacactgtggaaagtctggaccgagctcttggatgttcttggacttgacgtctccaacctgtcccagtatttcagcccagcctcggtgtccagcagcccggcccgcgcgctcctgctggtcggcgtcgtcctcctggcctactggttcttgtccctgaccctgggcttcactttcagcgtcctgcacgtggtgttcggccgcttcttctggatcgtgcgggtcgtcctgttttccatgtcctgcgtgtacatcctgcacaagtacgagggcgagccggagaacgcggtgctgccgctgtgcttcgtggtggccgtctacttcatgaccgggcccatgggcttctactggcgaagcagtcccagcggccccagcaaccccagcaaccccagcgtggaggagaagctggagcacctggagaaacaggtcagactgctcaacatccgtctcaaccgggtgctcgagagcctggaccgctccaaggacaaagtgaaggtcagccggccgggcgggtccacaggttaccagcacgcttggctcaaaaaacgaaaacggaggaaaaaaaccccaaaccccaaacaatcttataaaccccaacggacccggaaaaacataaatngagaaaaccccanggnnanngggggcggcccgcctctaaaaagatcccctcgaggggggcccagtttttcacgtacccccgtttttcttgttaaaaggggggccccctataggggagcggtataataaaggctaggcagtgggccgtcggtttattcccgcga

SEQ ID NO: 360173 - DNA, 978 bp, Homo Sapiens
  misc_feature (494)..(494): n is a, c, g, or t
  misc_feature (878)..(878): n is a, c, g, or t
  misc_feature (898)..(934): n is a, c, g, or t
  misc_feature (944)..(944): n is a, c, g, or t
taggaagcgaggcctgggtggcgaattcggcacgaggctcctctgggggtgatattggtggtgatcacagctcctagcataatgagagttccatttggtattgtcacacgtctcctgcctcgcttgggttgccatgtttgagcgatggccctgttgatttcaccctgccttttactgaatctgtaaattgttgtgcaattgtggttatagtagactgtagcacattgccttttctaaactgctacatgtttataatcttcatttttaaagtatgtgtaatttttttaagtatgtattctattcatatggtctgcttgtcagtgagccagacttgcttactatattcctttataataatgctagccacttcctggattctttagtaatgtgctgtatgcaagaactttccagtagcagtgaaggagggttgcctctccaagcttcctaagggatgctgccctgtgtggggatgcattgcagaggcactagtagcnatgggggctagagtggggagcgaagatgtaaaagggtggggggataggagaattccagagtgcttccagcattagggtcctgagaacttctgagttcagagaaacatgcaaagtgactaacaaaatagctacttacctttgcagttctacagaccctgggagctgctttgggagtgagaaaggcaaccctccaatgtgtttcaactttaaaatgttgaattcttttcagacatggtatctcatttattctccttttctagcgtttggttgaatttcaggcagaatgtcttacagaatgtcctagaaccagattatcatttaatctgaaacagcttgagaagggacagagaaggtacaagggcaaggcagcacaaaacagatcangagaatgaagagggaatgcnnnnnnnnnnnnnnnnnnnnnnnnnnnnnnnnnnnnncaggtactanaacgcattctactttgtaaaaatgttgttggaaa

SEQ ID NO: 360174 - DNA, 623 bp, Homo Sapiens
  misc_feature (52)..(52): n is a, c, g, or t
  misc_feature (93)..(93): n is a, c, g, or t
  misc_feature (122)..(122): n is a, c, g, or t
  misc_feature (569)..(569): n is a, c, g, or t
ctgagttttttaagttgacattcatcagatgtgctaccagcacgttgaaatnaaagcaaaacagaaaaatacaagtcactgttaggtttaagnatagcatcaaagtacctgaattgagtganaagagtgtgtaaactgtccctgagggtttttaaacagtgtgtacaagctggattcctaagaacattagttttattcaacaatgtggactgataaaataccaatgtctgacagctttaagtggaggttataaagaattatatgcaaacactccaaatgtatagtttatacattttttttcaaagcagcaataaagctgctgtaaagtatacatcccatcacaacaagcaacatgtgggagtcagataaaggtttctatcttagtctggttttctgacagcacagcatatcaatatccaatgactattatctttcctagatcagaatgtaactaattttgactagtaatataggattagacttttaatcaaacactttgctattacatactaaaattccttaaacttactaatgctggtaatactaacctagttaatcatcccccctcnttttagaaatatacccttccacaacttaaaaacattaagatccattttcagtcc

SEQ ID NO: 360175 - DNA, 838 bp, Homo Sapiens
gcagggggacagaaatgtaagtttaaaaaagcagaataataagatgaaaatgttactgatatgaatgatggatatttctcagttttaaatatggacaatgtcctctttatgtggctatacagatgatacccctgaaatttaaattactttttaggagatggagttgaagggagtatgtgagacctgctcacttttgcaagcaagctattctccaactctctttggaatctttggggttgtcacagaccaggaaacgaggaaatttttgacttcctatttgtttctctctttggtccattgctaaggagggatgataaactgtcacagaattgccatccctgtccaaattatttttcctttgggtctctatgaagatgaataaaacattttctaaaaagattgaagcaagttagctttcagctttatcaaatacagtttctcttacaaagtttcatctgtcttctgatggattactggtaccaactagtagcatcagctcatctgtaagcttggggagctcacaccaggaaagacacaaaaccaacaaccaaacaaaaagaaaaactgattttctgtgattcattaaaatgttttcattgtaagttttgatcttcactgagtgtggaattctcttaggaagtaaagatgagctgctttattgtctggcaaaatatctgtttgattttgccactgagtagcccctaaagagaatacagtatttacaaacaaggcttctggcatgttctcctatacttccctgtcctctcacagttccaaacgcctcttaaaatagctttgcaagtgccttcccaacattccccaggaggacatcacgttc

SEQ ID NO: 360176 - DNA, 776 bp, Homo Sapiens
ctttcaggtctattagaatggtgcctccgccacacttaatccattctcccgaattcaagaatatttatctccctgaaatgaactcacaagttgccctagaggaaaacttggagaactagagctgctcactgtgcagatgccatcctgatgaccccagagatgtttacatcagtgaaacctctgggaatagtgagccccctggctagttttcaaaaggacttggggaagagggtagagctaaatcctgtgttctcaacacaggaaataatataacccccattgggatgaaaattcattcttgggtggtgacaaaatcttagacgttataatggtttgtggtctctaaggggccacagcattaaaatctcatggtgggtggagttgggctattaatttctcagaatgctcaggggcatgttgataatgaaaaagagactgagaaacgctgatctaaatgccagtgacatccttgggttattcgtatacctcatgctttagattcgcttctggttcatggtgccagcccttagaaactctgggttcctacctgaagccggtcttatcaaaacgccacccctggttccagtttgatcagggtaaccttgtgaattagcaagcagcagtccccagtgtgtgctgacatggaggttggagagaaaatagatatgtcccatgcctggtttccagccaatactgatgtcgcgggttagtccagcaggctgaggctgaggcctgtgacaaagtccctgcatggaggtcttcctgcgtcagagcct

SEQ ID NO: 360177 - DNA, 828 bp, Homo Sapiens
cagtctggtcattcttcatgtctcctggggttctctgaaccatgaaagcaatggggtccacgtctgttccatacgtgtccacacgttctaagcacgcacgagagagtagctttggtgggactagctctgtaaccatcagcttctgcaaagcccagggggtcaagcatgagatgtcaaacaaggatttttgtgctgggccctgaagtgagcacacaccccagtggctgacatcacaggccccttttggagtgcccccagatgcttctctcctcacctggggctccccattggccatcttgggctcccgaagccttcctgactgctcagtcttgaaggaagatgagtaccttcatccctaggtcacctcgccaggaacgggcagcaccctgtgcctaggatgtaggcttctatgagctggcaggggcatggaattctcggagagttcgtgtgtcgtgtccccattgcctgagggagctgggaggtcactagaagccggatgtagtagccgccaaacactgccagcagctggcgggccatttcctccggctcagcctcaggaacaagctgatgaagctcagtctgcatgagtggcctctcgttaggacaagaattgccgggcaggagaggagcatcctccaagttctcaggcccctccgctgttgcagggctcaccccagtctccatgacaacacacaactggctcaatctgcttctcagcaaggactcttggctagtcttcacctccttgaacatgatcagacaaaaactgcacacagttctcggacgcgtgggtcgacgatatcccggtactccggaccggtaccagcc

SEQ ID NO: 360178 - DNA, 661 bp, Homo Sapiens
cccgtccccgccatccctgccgatcctgttgctgccgccttcccgccgtgctcgggctgcccgggactctagccgccaggcttcgcgtcgcccagcggcagatcgggctcctgggagcctctcccctggccgtttgctcggcctcggccccagctgccctggggcctagccactagctcccctggcgctagcctaccctgtcttgaccgcaccctgaagatttgggaagtctttctccatcccaagagtcgtctctgcaaaagttggtgtccttcctggtgctgaaccacgcttctgctcaaaatgtgttgagcgtcgtctgtctgcaaagcacggtgccaggagcttcggtggagaagccatggggtacatgtgtaaagagtacaggcttatggttaaacctgaagtcctcctctactttctgggggaccctggccgtccttgctgagcctccgttgacttctctaatggggacggtaatgcctacctgaccacaagctgatgagtaaatgagctatgagtgcaaaagtgtggtgcaattctggcgtgtgccaacctctcaaagtgtcaagtttccgtctcattcctcttaatcttcactaaaatggacaagtattcattgagcacctaatgcgtgttcaatatggtgggagatgaggga

SEQ ID NO: 360179 - DNA, 862 bp, Homo Sapiens
  misc_feature (486)..(486): n is a, c, g, or t
ccttggccgttggcctactggcctggcaggggacgagctgcggcggtggcacctccgggtgtggaaggctccagtgagatggagtcgcgagtcgcggacgctgggaccggcgagaccgcgcgagcagcgggcgggagtccggcagttggctgcaccactcgggggcccgtagtctcggcgcccctgggagccgcccggtggaagctcctgcggcaggttctgaagcaaaaacacctggatgattgcctgcgacatgtatctgtacagaagatttgcaatcatttaatctggtttcagtaacagaaggcaaagaaaagggaaactgaaagaggagggttggtgcatgggtccaaatataccaagcatcttctgtcctgaatacagtatctccttaaggcataatagtggatccttgaatgttgaacgatgtccttaccagctttgacaatacaggaaatgtttgcatctgggccaatctgaagaggntttggcttactactgcctcaagcacaataatatattcagggcccttgctgtgtgtgaactaaggggtggcattgacatgcttggctggggctcatgggtgctatttctgcagattgtcaaaaaaagttctgttaactgatgggaatgaaaaggccatcagacaatgtgcaagacatcatcacaaggaactcagaaggctggtgtgttaagacccagaagatatcaagctgcttattacgatggggataatgagacagatgtctctcaacttggaaggaccatttggacactagttatgtgtgcctgacttgccttgtactggaccaagaacagagccagcccttgttgatgcaataaaagagatttactccaggcc

SEQ ID NO: 360180 - DNA, 649 bp, Homo Sapiens
  misc_feature (360)..(360): n is a, c, g, or t
  misc_feature (454)..(454): n is a, c, g, or t
  misc_feature (458)..(458): n is a, c, g, or t
  misc_feature (547)..(547): n is a, c, g, or t
  misc_feature (551)..(551): n is a, c, g, or t
  misc_feature (621)..(621): n is a, c, g, or t
aagggataaggcttcagtgctgttgggagccctttggctccaaatgtctgactatcttgagggagaaacaagcaggtttctactagtggtgtcttctgttgtattaacttctttcctttgtggtatcttgtatcctgttttaaaaactaaatgaagggaaccacattagggcccatgccagcatcccagtgaagttcgtccagctccagttaggtggattctggagttcggagagggtttaaagtttggctgaaatagcacctcaagtggggtttagttttatttttacctgcgggcatcatgggcgatttagggggaagcacaggatggtggtgtggtttaaacctgcagcaagcaggncatgttgaagagttgagtgatcacgctggagatgaagggttggacatggattgactgggaaaaggcctgggtccattagagtaaagataacctnagtncgattgaattggccatgggaagttaggtcacagtcttataaacaaagtaaataggacagagactaagttttagggagacatcttgcctnctangctaagtttactaaaccacactgaactatagtacctttcagatgggcaaaaagtgtacactacagttgangagctgaccttattaaggttggatgtcc

SEQ ID NO: 360181 - DNA, 1193 bp, Homo Sapiens
ctcgagaatcggtcttgtactttttttcctctggattcctacccagatatggtgtttctaccgggaataatttccctcaagctcttccactgaactgactttggtcaacctttagcacttagctatcatcttctctgggaagcctgtgacttctccagtctggactggatttctgaagcacttgatcataactctgagtcttagagtttgaaagagtctatcttgataatctccccagtgcatccatgtatgagcgcagttacatgcatagagatgttatcacccatgtggtatgcaccaaaacagattttattattactgccagtcatgatggacatgtcaagttctggaaaaaaatagaagagggaattgaatttgttaaacattttcgtagtcacctgggagttattgagagtattgcagttagctctgagggagcattgttctgttctgtgggtgatgataaagcaatgaaggtgtttgatgtagtgaactttgacatgatcaacatgctgaaacttggctattttcctggacagtgtgagtggatctattgcccaggggatgcaatttcttcagttgctgcttccgaaaagagtacaggaaaaattttcatttatgatggccgaggagataaccagccacttcatattttgtgacaaaactccatacatcacctcttactcagatacggcgtaaacccagtttacaaagcagtagtgtcttctgacaaatctgggatgattgaatactggactgggcctcctcatgaatataaattccccaaaaatgtgaactgggaaaataaaactgacactgatttatatgaatttgccaagtgtaaggcttatccaaccagcgtatgtttttcaccagatgggaagaaaatagctactaatggtcctgataaaaaagttaaaaattttcacatttggaactggaaaactcatgaaagccctttgatgaatcactaaacatgtttactgaactgcaacagaatgaggcaccgttacccaaactgggaattgggcccaacaatggttggaaaaacgtgaatttggaaaaagctcgagccttaaaaatttaataaccaaaccttctcgaagaaaacgggaccactccgggcctgaatggaaaaatggcgggcctttcacagtttaaacgggaaagacaccccgggggggtggcgaatt

SEQ ID NO: 360182 - DNA, 855 bp, Homo Sapiens
atcaggccaaatcggccgagctcgaattcgtcgagagcgggacgatgcgaacaacatggcggcggaaagtggtagcgattttcagcagagacgtagaaggcgccgggacccggaggaaccggaaaaaacagaactcagcgaaagagagctggcagtagcagtggcggtgtcccaggagaacgatgaggagaacgaagagcgctgggttggacctttacctgtggaggcaacactggccaagaagaggaaagtcttagagtttgaaagagtctatcttgataatctccccagtgcatccatgtatgagcgcagttacatgcatagagatgttatcacccatgtggtatgcaccaaaacagattttattattactgccagtcatgatggacatgtcaagttctggaaaaaaatagaagagggaattgaatttgttaaacattttcgtagtcacctgggagttattgagagtattgcagttagctctgagggagcattgttctgttctgtgggtgatgataaagcaatgaaggtgtttgatgtagtgaactttgacatgatcaacatgctgaaacttggctattttcctggacagtgtgagtggatctattgcccaggggatgcaatttcttcagttgctgcttccgaaaagagtacaggaaaaattttcatttatgatggcccgaggaagataaccaccccacttcatattttttgacaaacttccatacattcacctctttactcagatacgggttaaaccccagtttaccaaagcagtaagtgtcttcttgacaaatctgggattggattgaaatactgggactgggcttcctccattggaatttaattccccca

SEQ ID NO: 360183 - DNA, 699 bp, Homo Sapiens
  misc_feature (524)..(524): n is a, c, g, or t
  misc_feature (573)..(573): n is a, c, g, or t
  misc_feature (598)..(598): n is a, c, g, or t
  misc_feature (610)..(610): n is a, c, g, or t
  misc_feature (618)..(618): n is a, c, g, or t
  misc_feature (643)..(643): n is a, c, g, or t
  misc_feature (658)..(658): n is a, c, g, or t
  misc_feature (673)..(673): n is a, c, g, or t
  misc_feature (682)..(682): n is a, c, g, or t
cctttggctaggcttcttcaaatcgtgggaataaacacaatctttaaatacaaaataataacagatatatgactgatatgaacaaaatccttaaaagaccatgctagtgctagtttacattttctgaactaaaaggggttaaatgtctaaagaaaaggagcagcaaagaagcactgagggtgatctcttccttttctttctccctttagtacagaaagggaaggatttaaatctgcttatacacatcagctcacaagggagaggattaggaaggttggaacagagttggaaaatgctcagaacattctggactccaatattaatataacatttaacaaggaagcatctgtagtggggcttctgtgaaattaaacattttaacattacaacctacatgtatgcatatttgtgaaatttcctaataatcgatttatggtttcacaaaggagtctatgaaattagctcattttaagggaaagaaattgtcaattggaaacgtaaggtgggaagcagatgtagctcangaattgctttgagatttaaatggttggtgaggtcacaaaacaacttcgnaacttcacgatcttctttggatctncatatgaaatgnaggcattnctgtcctgtacccttgatgaaagcngaaagacagtactgngtccaacaggtcaantatagctgnaatggttcaaaatagta

SEQ ID NO: 360184 - DNA, 959 bp, Homo Sapiens
  misc_feature (799)..(799): n is a, c, g, or t
  misc_feature (898)..(898): n is a, c, g, or t
gggtggcgaattcggcacgaggcggccgcgtgaggacgaggctatttgaaaacacgctccgggagctagagcctgaggtcggcggcgcacgctgttgccccgtgggcttctgctccctcgcttgtcttctcgggcttctcgccccggccgcggccgggtcctcagtagtcgagaatgactaaaaaaagaaaacgccaacatgattttcaaaaagtaaaattgaaagttggtaaaaagaagcccaagttacaaaatgctactcctacaaactttaaaacaaagactatacatctgcctgagcaactcaaagaggatggaacacttccaacaaacaatagaaaacttaacataaaggatttgctgtcacagatgcatcactacaatgctggggttaaacaaagtgctcttcttggacttaaagaccttttgtctcaatacccatttataattgatgcacacctttcaaacatattaagtgaagtgactgctgtgtttacagataaagatgctaatgtacgattagcagcagttcaacttcttcaattcctggcccccaaaatacgagctgaacaaatttctccattttttcctttggtaaagtgcccatctctctagtgccatgactcacattactgaaggaattcaaggaggactctttaaaagttttggacattctgctggaacagtacccagctctaattactggccgtagcagcatattgcttaagaattttgtaaaacttatttctcatcagcagctgtccaaagggactgattaaataagagacaggatccccgntccctgggataactttttctgtaaaaatccctaaatccgggaaaaacttcaactttcctccagccaaatggaaagggcctggaaaaggttcccttaaantggaggaacctcccgggtaaaaaatttccccttttccaaggggccccctttggggccaaaa

SEQ ID NO: 360185 - DNA, 888 bp, Homo Sapiens
  misc_feature (705)..(760): n is a, c, g, or t
  misc_feature (791)..(791): n is a, c, g, or t
  misc_feature (830)..(830): n is a, c, g, or t
  misc_feature (837)..(837): n is a, c, g, or t
  misc_feature (842)..(842): n is a, c, g, or t
  misc_feature (866)..(866): n is a, c, g, or t
ctttatctagtactatgtggaaagggtttgcatcatagatttttcccagccttataatataccataagctcctacttccctgcccctccctaatcagtattctttcaagagttctttggtgaagccatctatctgaaactaaaatgaaccaaacccatatttcactggtggttggagaaaaccatggccaaaacgattgtggcaggtctcaatcttgggagtttttaagaaggaatgtgccagaggcagattcccaagaacagagttttcttttgttttgcagaggcattcaatgtgtctagtgcttgctggccacagcagttactaccacagagccttctgggaggggccgttgtgttgaaggaggctcctgcctgagggacagcatcaggcagtgggctctgtagagtgagaaccaggtggaggccttctgtgcccagctcagagttctgcaccacgccaggactgcccaggccaagggctactgacgcaagttccactcattccactctgtggggggcgccttgggcctctcctggaagggctcttggagaaggaattggagttacgtacaagtgacctaaatgggaagcttttctagatgagattggattaaattccatgtgatttctctttccctttaatccaggttggggacttcgtttctttctggtggatcacagcttgcccagatgttgcaatttnnnnnnnnnnnnnnnnnnnnnnnnnnnnnnnnnnnnnnnnnnnnnnnnnnnnnnnngccaccaaaagaaaacattgggaactctgtntttcccctttgaatgtgacttcccagtgtttgacagttnaagtccntagtntcgtagggcccagcccaccaatanatatcaaacactgttatgcaca

SEQ ID NO: 360186 - DNA, 930 bp, Homo Sapiens
  misc_feature (209)..(218): n is a, c, g, or t
  misc_feature (848)..(848): n is a, c, g, or t
acagatgttacccatacataatcttctaaaatctgtgcatttccatggtggctgacacacttgtcatgtggtctgttagtgtttgccaagaaccattgcaaataaattgaacatcaaagatccaagtttgtactatccctaaagactggagataagcattggaggctcttttaaaaaatgctagttactgaattttgtattgttttacnnnnnnnnnnatttcaatatatacagtttgatgatgtgcttgaaattggtgcaaatatatacacacccttgtaagtgcaaagtatgtaagaagttttaacatttacttcacaggacttgtgattgtgttaaattctcactattgtgttttcttttgctcactgtttaggacaatttttctttaaaatagttttgcagattaaaattgcttaaataagtggattaaaaaactgacaatgcatgctactgttctctttcaaaaggaagagcaaccgtgttgaatactaataatgatgaattagtattcagtgtttagaatcattgggactacccacaaagtgagcatttctttttaaattttcttgacatttccaagcttattatgaataatattgcagtgtgtcttgtcagctgtaggtggcaaaggtgcccttataaaaaaggaaactggcttttcaaatgggctatgggagcacaagctgaagctttagtgccttctacaatgtggtatactggtttctagaattttatatgtgctagtcattctcaattcatatggaatctagatggatatttcatgcatacccatagagaaatgtgtaagtgatatgtcaaaagagcttcttactgatttcacctanaatgagaaggaagtcctgtttttcaagaatgactttaaagatctggcgcttttggggacattcagttttaaactggggatac

SEQ ID NO: 360187 - DNA, 1469 bp, Homo Sapiens
  misc_feature (454)..(462): n is a, c, g, or t
gttgccggcctggatcgaggtggggagagatgggctggcgatttccctgtcgcggtacggtttatgttctctagggttggctgtttctggttgagttctgtatggcgtcaagtagggtaaccacatagtataattcagagccgagcacaagattaggtacaggcattgggtatacaggaacatgtatcactatacacgacacagacttattgtgtctagatagtcttttcgtatagacaagtttgatattcacgtgttcatacatcaaagtacaaatctgagtcaaagccttggagacgacataattcttaggacgtttagcatttaattttccattagtggagagaaccctgaaccttaccagtctgctagccaaatgtaaactggtaaagtatgaaatgcctcaaagccatcattatctcttacattatccaatttgaccattttacaggannnnnnnnnaatgaaagtaacaggatttcatgacagtgaggcaactttttactttaaaaataagcataagatttagagttctaaactttaattctaaccaacccatttacagtatttcacttagcctataccttattttagcatgagagtataatcttacactttcgtcaactcttctcaaacccagaaagaatgaataccttcttagatcatgttgccaaagcatatcatattgatctaaacaactctctggttaggaccccagattttatagtaggtcttggccctagagtatagttatgactcagaaaatacaagataagctgaaccacctaattaaaaggattggaggagaaatactcaatataccaaaagaattaacctctttctaggacagctttacaaataactactcttctgtcaaatttatttccacagcaagttttcaaaaacagcaccatgttaaaccatctatgcagatggcaggctacatcctatcaatgagacatggactggctaacaagtcctgacgatgatttgtatctgtgccatggaaatgagtttacaatcttctgaaaaaccccacttcttcatcgggatagtgattctgtactactttagataactagaagcaactcagtatttttggagtttggctgaattccattaaaggacagttgcatttcacatgctctatactaggttgaacagcagataccatgctagcagacatgaagcagatctttactccaaaaacctcttttagcttcaagaaagagcagttctaagtataactatgagagacctgagacatagtctaaagctgtttgaggctgccagttgatacttgcactaatggcaaaaataaaaacagttcattacagttagatcctttagagggatttttgatgacccaaccttgaaggcaaaggttccattcttgagacactccccagtctcactgaattgctaaactccaacgcacagaagagcagtgaaagagcataaagatacat

SEQ ID NO: 360188 - DNA, 504 bp, Homo Sapiens
  misc_feature (181)..(181): n is a, c, g, or t
  misc_feature (418)..(418): n is a, c, g, or t
  misc_feature (444)..(444): n is a, c, g, or t
  misc_feature (485)..(485): n is a, c, g, or t
ggttatattcaaagtaagtacagacggcaaataggcagacaaatacaggaatgtctttacaattagcccaccatggactgttttgagtctctgcatggtttccataattcattatgatgtatctttatgctctttcactgctcttctgtgcgttgggagtttagcaattcaagtgagactnggggagtgtctcaagaatggaacctttgccttcaaggttgggtcatcaaaaatccctctaaaggatctaactgtaatgaactgtttttatttttgccattagtgcaagtatcaactgggcagcctcaaacagctttagactatgtctcaggtctctcatagttatacttaggaactgctctttcttggaaggctaaaagaggtttttgggagtaaaggatctcgctttcatgttctngctaggcatgggtattctggctgttncaacctagttataggaggcatgtggaaatggcaactgtccntttaatggggatttcaggc

SEQ ID NO: 360189 - DNA, 1604 bp, Homo Sapiens
  misc_feature (358)..(358): n is a, c, g, or t
tcctctgcctgttggcctactggtatattacatgctgatggtgaaagacctaatgttctagaaaacctagacaactcaaaggaaaagactgttggatcagaagcagcaaaaactgaagatacagttctctgcagcagtgatacagatgaggagtgtttaatcattgatacagaatgtaaaaataatagtgatggaaagacagctgttgtgggttctaacttaagttccagaccagctagtccaaattcttcctcaggacaggcttctgtaggaaaccagactaatactgcttgtagtcctgaagagtcatgtgttttaaaaaaacctatcaaacgagtatataaaaaatttgatccanttggagagattttaaaaatgcaggatgagctcttaaagccaatttccagaaaagtaccagaattgccttaatgaatttagaaaattctaaacagccttctgtttctgagcaattgtctggtccttcagactcctctagttggccgaaatctggatggccttctgcatttcagaagccaaaaggacgattgccatatgaacttcaggactatgttgaagatacatcggaatacctaactcctcaggaaggaaattttggttataaggtatttagcctgcaagacctggtggtactcgtacgctgcagtgtccagaggatagagacaagaccacgttctaaaaaaacggaagaaaatcagaagacaatttccagtttatgtactaccaaaagtagagtatcaagcttgttatggagttgaagctctgactgaaagtgaactttgtcgcttatggactgaaagtttattgcattccaacagctcattttatgttgggcatatcgatgcatttacttcaaaactttttctactggaagaaattacctcagaagaattaaaagaaaagctttcagcactcaagatttccaatttatttaacatcctccaacacattctaaagaaactaagtagcttgcaggagggttcctacttgttatctcatgcagcaaaagattcttcactcctgatttataaggcctctgatggaaaagttactaggacagcatacaatttgtataaaacacattgcggccttcctggtgtaccttccagtctctcagttccctggggcccattagatcccagcctgttattaccatatcatatccatcatggaagaataccttgtacttttccaccgaaatcactggataccacaacacaacaaaagattggtggaacgagaatgcctacacgcagccacaggaatccagcttccatggaaaccaaaagcagttggcttgcctgctccgccagttgaaactgaaggagtggctccccctaaaagaaaaataactttgaggactgcaccatggacaaactaaattcccaaacaccgttatccccggtggttcctttccccccagtttgcggggaacaatcctcccgtcggccaagaggcacatgcccctcccggtaacccgccacgagtgcccttgaaaaaaatgggtttcggcctatgtggaaagcgacgcctttccccctaaaaagggcaactgcgccccgcctttttcaccccttgcatgtgtt

SEQ ID NO: 360190 - DNA, 572 bp, Homo Sapiens
  misc_feature (100)..(100): n is a, c, g, or t
  misc_feature (113)..(166): n is a, c, g, or t
gtacaggttcttgattctaatacatttcaaacatgcttttgtcccccctcgtgtcaatatttgttatagactaatcgccggggatttttcacctggttgnagggtgggggtgnnnnnnnnnnnnnnnnnnnnnnnnnnnnnnnnnnnnnnnnnnnnnnnnnnnnnnaggtcctggactgattaaagttcattgaggaaaaagcacattttacaacaaaaaaataaaagtgtagatttaatgtatgtgactggggtttggggttgcatacctggtggatcttgaggggctgggattagggtggttcaggaaaatgtgatgctgtttccccatgtttagccatggtcaaaaaatggatttctcctttttctaaaatgtccagcaactgcctactgttgatcaaatgttgaagtattcttgtttcccttttaagccaatccatgtgcccacataacattatgcccaagtggagagttcactttaatttccaaagtatgtttcatgcagccccctgtcagctgctctgtggaaaaggggttctgttatgaaataaatgttgcactccctgcaaaaa

SEQ ID NO: 360191 - DNA, 731 bp, Homo Sapiens
  misc_feature (721)..(721): n is a, c, g, or t
ctccataatgtgtgcccaaaagatgtaataacgtatttttaagtaatgtggaccaccttgattgggattccatcagtaaaatacttagtgtatacaaatttctacaatttaatagttttgaatttattataatggctaaaaagaagctaactgaaatgattcctctgtgtaatcatcctgctagctttgtaaaattgtttgtagcattgggacccatggcaggacctgaagaaaagaaacaacttaaatcaactatgttattgatgtcagaggacctaactggcgagcaagccctggcagtgttgggagcaatgggagatatggaaagcagaaactcatgtctgattaaaagagttacctcagttctgcataaacatttggatggctataaaccattagagttgttgaagataactcaagaattgacttttctgcatttccaaaggaaggagttttttgcgaaacttagagaattactgcttagttatttgaaaaatagtttcataccaactgaggtgtctgttctggtccgtgctatttccctgctcccttctcctcacttggacgaagtggggacatcccgaattgaagccgttttaccacagtgtgacctaaataacctgagtagttttgccacatctggtttaagatggattcagcatgatcacgtgtattttggataatatgactgcgaaacaactgaaactacttcaaaaattanatcactatgg

SEQ ID NO: 360192 - DNA, 646 bp, Homo Sapiens
tacacagaatagtattacctagtaattaatcatattaatgatagatagaagtttattctaagtttgatatgactacaacatggtattttggtaaatatgccatcatgctatgtcttcagagttcatttttgtatggagtatagttatctgttcataagtcaaaaagaaattagagaaaagggtcaatgatggaacttttatgtttatagattcattcttaaagataaattaatattggcccctttacaatctccactcagaggaaaagataaaactactgcttttatccatttcaaaatattagaaataagctattcttacatgaactctgatccaactcaagttttgttcttaattgttctcttcacagagacatggtttgaaaaagacccaacaaaccaacccttttatttttacatccactggctggaataagcccaggttaaatatttttaaataatcacaaccaattttgctttactcttcaacgcttttatgttgaatacagaattcaagagtcccttatgtttcaagagccccttttaagaaattcagatgaattatttcattagtcttaaccccaactcactcttcatattttagccaagtgtagaaacctagactggtttccaagtgtccttggctt

SEQ ID NO: 360193 - DNA, 866 bp, Homo Sapiens
  misc_feature (741)..(741): n is a, c, g, or t
  misc_feature (752)..(752): n is a, c, g, or t
gctcatcaagaattaacagccatcaggctgccgatgtgctgacagcagacccacttagagtcctgtgtttgtaattccatgcatttgttattttacctgttttgtccctgccccttctagtcctgtgcctcctgattgctgagtgttcacctggaccttctgactaccttccctgtgctattccatcagcctacagacctggtacctggatttttgcccgagatgattcctaccaccttactactgacgaagacacccattccagtggaccactgtgacccaggaggcattcagccatcatgatgtggcctttacctccactcctgtcttgttctacccagattcagcacagccctttgtagtgaagtcagagtcctcaagccaaatagctaaagctgttttatcacaacaaaggcctagtttgttccatgagtgtgcatttcatttcttcagttaaagccttcagagacacacaataaatttggaccaggggattttttagttattaatgctctctgaagaaaggcaacatctttttgagagcagcattggaccacaccccacaatctcaaatgattgaaattcatgaacatctaggatcccgtgaaggtcactggaccctggtttttctacttcaaatcctgtaggtagccctactgaaatgaggaaaccatattctgaccccattgggatccaaatccaaaggcacagtgaacctcctcatagcatcttctttggganttactcagganccagaactttttacacaaatgtaaggaaattctaccaaggagtccccttacctaacaggcatctcacaagggtggcaccagatttccaggaaaagggttcttcttggataacat

SEQ ID NO: 360194 - DNA, 1016 bp, Homo Sapiens
tactgacccagaccaatactgcccagaccataaatattatgtagaaatgttaagcaaatgaatctcttatatcttgctttttgccaatcaatatctttttgttgctttaattcattactgagatttcattctattctgctgtttgcattaccaaactggttgcaattttattattcccagattctgtcttttcagccagcataaatatattgtacatgctatgtgattattctagtggtgctagaattttactataaaacattctgtagattaaattaaaacatataaccataatttgctaaaatggtttctttcagaggtactttcctttcactagcccagtttttaaaaatcgtaactagcaaattttatctcctatacatagatatatgaaaatccctaggggactgtaagaatagctggactgaataaaattttcatttaaagtccaagggtggggagttgacaacttttaggagatacaacaggcttatagttctctgtcaaactcttagttgttaatagctttagtactgtcattcacgagacacaactcctaagagaaaacaaagaaaaggccaatcacgtaagatcttgttaactcaagactgtgacataatgaccccaaataaaaacaatttttaattaactcacagtagaaaacaccaataaaacaactctctaatttccactagtttactgcagcccaatgaagttgattacatacatcagtcattcaattggagtaatttttttcctacaaatttgttccagagatcatgccataagcctggttaagtaaaagaatgatgaaaatgccaaagttctatcaagtaagcaaatattctctttcgtgtggcagacagaactctggaagaaacagaatgcatgtcatgtaatacttacatttaaggctcaggtgactgtcagaaagtatttcttttacccagcaaagaactgtgagctgaaacacaaatggcagttcatctgaaagaactaaaaccatccactggccc

SEQ ID NO: 360195 - DNA, 1438 bp, Homo Sapiens
  misc_feature (1046)..(1196): n is a, c, g, or t
  misc_feature (1207)..(1223): n is a, c, g, or t
  misc_feature (1264)..(1327): n is a, c, g, or t
  misc_feature (1337)..(1345): n is a, c, g, or t
cggtccggaatttccgggatatttactgaggtatttttcacagaatgattgaattaaaaaaaactcaacttgcattttcattgtgggtgcttagagaagttctacaaaattcaaactgtgaaggtttatgcttcattaattatgaccatactttttcattttctgacgatccctgatttccttatggactcaataagaatcttttatatcaagtaaaatgaaagttgatgatagaatatcaaatagtgaatttgatatgaaatctaagagtgtgagtcacttgcatatgtaatgctttgggtttttgcatattttcttaggtcacagtgacaggtttctgagttgtttcccttttcaagtctctgggaggccagtggcagcagcaggtctgtgtttcaccttcttcccatgtgagcttggaaaactttggcatcttaattagtcttgaatcatacacctgatccccaaacattgcctgctctcaatgaaacatgctttggaaatggaagggactcagaaagtcgaaatcccaagaactccaagccaaaagtgttaggttttagtgaaatttgtgtcaggtataagcatacctgtttgggccagaattattatcacagcctttctgacccaaactttcaaaagcaaataaacagcatataaaacgttaattatctttccattgtaattgtgatgatctactctgtatgggtaccaaaatcaccttctctcttcaagtcaaagttgaatttagaactttgaatacaggtcaaaaaatgtagaaaatatcattttatattccctaatctatatagctgaaaaagggttgtattttcttagctgaatatgaatacctcttaaacataaattagttcctctccagtgaagtatcttattttaccaatccatttcaggaaagaggttctgctgccgtaaaggcagaaattttatttttatcccttttatttgaatgagagatttgaaaatcgaattatgtaaatatttcaatgcatctgctattattttgtggagtttattaaactactttnnnnnnnnnnnnnnnnnnnnnnnnnnnnnnnnnnnnnnnnnnnnnnnnnnnnnnnnnnnnnnnnnnnnnnnnnnnnnnnnnnnnnnnnnnnnnnnnnnnnnnnnnnnnnnnnnnnnnnnnnnnnnnnnnnnnnnnnnnnnnnnnnnnnnnncttttgggcgnnnnnnnnnnnnnnnnnaaaaaattttttaaaacttttttttgggggggggggccccnnnnnnnnnnnnnnnnnnnnnnnnnnnnnnnnnnnnnnnnnnnnnnnnnnnnnnnnnnnnnnnntttctccccnnnnnnnnnccgcccgggggaccacaagggttttgaaaaaaacccgagggggtgtttggggggttttttgggctttcaaccagggggcccccgggcgccttt

SEQ ID NO: 360196 - DNA, 1398 bp, Homo Sapiens
  misc_feature (40)..(40): n is a, c, g, or t
  misc_feature (1196)..(1196): n is a, c, g, or t
  misc_feature (1205)..(1205): n is a, c, g, or t
  misc_feature (1321)..(1321): n is a, c, g, or t
  misc_feature (1349)..(1349): n is a, c, g, or t
gccctcctcttttgcgcgcggccaacggccccttacaccncacaagtagcgaggcctgggtggcgaattccgcacgaggcggcggcgggaggcaggtgcacggcacccgccagtgggggtgcctcaacttccgcgggcgtttaaatagcagcctctctcccctcccaccggctgcctgctgtttcccggggagatcatgaaacgaggtcgccttcccagcagcagtgaggattctgacgacaatggcagcctgtcaactacttggtcccagaattcccgatcccagcataggagaagctcctgctccagacatgaagatcgaaagccttcagaggtgtttaggacagacctgatcactgccatgaagttgcatgactcctaccagctgaatccggatgagtactatgtgttggcagatccctggagacaggaatgggagaaaggggtccaggtgcctgtgagcccggggaccatccctcagcctgtggccagggttgtgtctgaagagaaatccctcatgttcatcaggcccaagaagtacatcgtgtcatcaggctctgagcctcccgagttgggctatgtggacatccggacgctggctgacagcgtgtgtcgctatgacctcaatgacatggatgctgcatggctggaactgaccaatgaagaatttaaggagatgggaatgcctgaactagatgaatacaccatggagagggtcctagaggaatttgagcagcgatgctacgacaatatgaatcatgccatagagactgaggaaggcctggggatcgaatatgatgaagatgttgtctgtgatgtctgccagtctcctgatggtgaggacggcaatgagatggtgttctgtgacaaatgcaacatctgtgtgcaccaggcctgttatggaatcctcaaggtaccagagggcagctggctgtgccggacatgtgccctgggggttcagccaaaatgtctgctgtgtccgaaaaaggggggagctatgaaacccacccgttagcggaaccaagtgggtccacgttaactggtgctctggggatccctgaggtgagcattggcagcccagagaagatggagcccatcaccaaggtgtcacacattcccagcagcccggtgggcgctagtgtgcagcctctgcaatgagaagtttggggcctatacagtgctctgtgaagaactgncggcacagncttccatgtgacctgtgcttttgaccgggcctggagatgaagaccatcttagcagagaatgatgaagtcaagttcaagtcctattgcccaaagcacagttacataggaaacccgangagagtctttggcaagggggcttgacangaaaatggggcccctgagtgttcccccggaatccgttggagccctttgc

SEQ ID NO: 360197 - DNA, 783 bp, Homo Sapiens
tcttcattggtcagttccagccatgcagcatccatgtcattgaggtcatagcgacacacgctgtcagccagcgtccggatgtccacatagcccaactcgggaggctcagagcctgatgacacgatgtacttcttgggcctgatgaacatgagggatttctcttcagacacaaccctggccacaggctgagggatggtccccgggctcacaggcacctggacccctttctcccattcctgtctccagggatctgccaacacatagtactcatccggattcagctggtaggagtcatgcaacttcatggcagtgatcaggtctgtcctaaacacctctgaaggctttcgatcttcatgtctggagcaggagcttctcctatgctgggatcgggaattctgggaccaagtagttgacaggctgccattgtcgtcagaatcctcactgctgctgggaaggcgacctcgtttcatgatctccccgggaaacagcaggcagctgatccaacatagatcaattctcaggatccaaaaatcatcctctcctcctcctccggcccccgccccggcaatgcccaagttactggtgggatagtaacgctgcgctcagcggctgcctccctccctcctcgctacagatcgagaacccaatcttttggcgccatattaatgacgtattatattatttccactaggcagcgaccttcggcattaaattactcccgagaactcccgagcaaagcaacaaaaccatcaaatatggctgagcctctcggctcgtcctgca

SEQ ID NO: 360198 - DNA, 701 bp, Homo Sapiens
  misc_feature (23)..(23): n is a, c, g, or t
  misc_feature (42)..(42): n is a, c, g, or t
  misc_feature (55)..(56): n is a, c, g, or t
  misc_feature (62)..(62): n is a, c, g, or t
  misc_feature (67)..(67): n is a, c, g, or t
  misc_feature (71)..(71): n is a, c, g, or t
  misc_feature (83)..(83): n is a, c, g, or t
  misc_feature (89)..(89): n is a, c, g, or t
  misc_feature (91)..(91): n is a, c, g, or t
  misc_feature (115)..(115): n is a, c, g, or t
  misc_feature (168)..(168): n is a, c, g, or t
attgggcccttccaagggggggntaagctccaggaaagtccngcactgtcgtgcnntgtggncaaanatanggctgcctgaanggtaananctgcataaggtggaagttcgtggncccacattcaggcatccatgcattgtcagacttctgtgaggcggaaggccttntgcatccagagtaccaatgactggactttcctcttctgctagatctttgtggggttgggggagtaggacaaagagaagcattccccaagacaacttatgaaataaaaatggaggtactacataggtaaaagtaaatgaataagcctgtaacaaaacacaaacctctccattcctacactgttcagaaaacagttttcatatataatataaaggaaatgttcaggacagtagggtattactggatcttttagtcagatttttgaattattcatagtttaggacatactcacattttctcagtgtaaagaactttcaaaacagccaacccaagtaatcatataagtagctaagaaaatgcagaaaggttcttattgagatcctcaacctagggatatgaaagatggggccactataatcaagaaagatcaactctgggttagactaagaatctgcaaactcaattacataccaagagcaccaaagagtttccccaaagaaaactggggaaaatttaccagtaggccaacaggctc

SEQ ID NO: 360199 - DNA, 670 bp, Homo Sapiens
  misc_feature (35)..(35): n is a, c, g, or t
  misc_feature (38)..(38): n is a, c, g, or t
  misc_feature (44)..(44): n is a, c, g, or t
  misc_feature (68)..(69): n is a, c, g, or t
  misc_feature (80)..(81): n is a, c, g, or t
  misc_feature (89)..(89): n is a, c, g, or t
  misc_feature (96)..(96): n is a, c, g, or t
  misc_feature (99)..(99): n is a, c, g, or t
  misc_feature (112)..(112): n is a, c, g, or t
  misc_feature (145)..(145): n is a, c, g, or t
  misc_feature (153)..(153): n is a, c, g, or t
aactccctaatgtgaacccataacttaacctgagnaanatcttnaggaaaagggcttgtgaacgggtnnctgcctttagnncagctttntgccagncanaagaccagaaagntgcatgcaagggtgtctggcactggaaaatgcnccatgttngtaagtgcattgtcctggcttttggtggcccgtgcagaagttcctgcctgaattatagtctttccatctcatatcttcatgtggagccctcaagctttagacaagtcttttatctccgttttcaggtggctcccattatcttgagacctcataatgctgctttccttaaatttgttttacactgaggctagtcagcacagagctactcacatttctggccaccactcggctccattatcttgacttctctcctgccctcttacgttgcatttcttcttttacaccactgttttacatgttgctcctccttagccattggttcctgttggcttttgttcttttacctgagttggaaatctgggaagacaattccaactcagtggtctgggcattctggtggtgctgccaaccccagggcaggaagaacagtgagtgagatactgtgccattacctgcttctccagccttgaagcccaaagcagccaaataactctcaaatgacgatcacttttactca

SEQ ID NO: 360200 - DNA, 1505 bp, Homo Sapiens
  misc_feature (407)..(439): n is a, c, g, or t
  misc_feature (1181)..(1224): n is a, c, g, or t
agcggttgacaaaggcagactccaccaagataagaacctgaccacctccaagatatgtgctcatctgtccccactgcaccccctccagaggcaacttttcattgcagatcagcgtgacctgttctagagcttcctacaggcagagtcaggccacactggcccgccccagctctcagaggcctgccatcactgtgcacccacacaccaccagctgtaacccaggcacaggacctcaaggtgggccagctcagctgccaacaggagcgagtggtgctgaggtatccagcagggcagcacatggtcctcccaggagccgtggcccagcacctcctggccggaacagccatcctattcaaataaacgagtaacaaaaatgggcacactctccacttccaaaagcaatgctnnnnnnnnnnnnnnnnnnnnnnnnnnnnnnnnnatgccagaggcgttggaaccagagcaactccatcttgaataggagctgggtaaaatgaggctgagacctactgggctgcattcccagaaggttaaggcattctaagtcacaggatgagataggaggtcggcacaagatacaggtcataaagaccttgctgataaaacaggttgcagtaaagaagctggccaaaacccaccaaaaccaagatggcgatgagagtgacctctggtcgtcctcactgctacactcccaccagcgccatgacagtttacaaatgccatggcaacgtcaggaagttaccctatatggtctaaaaaggggaggcatgaataatccaccccttgtttagcatatcatcaagaaataaccataaaaatgggcaaccagcagccctcggggctgctctgtctatggagtagccattcttttattcctttactttcctaataaacttgctttcactttactctgtggactcgacctgaattctattactcttttggggtctggattgggaccctttcctgtaatagaatcatatgcacttagaaggcatgcaatcaaaacttcttgaataaatgcatgataattatttgcaatgaggaccttgagtccttccttatctattttgtgcccccagcgaccagtgtagtgccaggcacatagcagatgctcagtgaatatctaccaaattaattagtgaagacctttgcttcctttgcaattactgctctgaagnnnnnnnnnnnnnnnnnnnnnnnnnnnnnnnnnnnnnnnnnnnncccatatagcagtgccaaacaaagtactgtggaatggttctcaaaaccatagctccctgatgggataatgtagtttaaatatagcagctatttttccctctagttggtttgttctttgatttttgtggaaagatttcaaaagttctcctccattgccctccttcctcaccccccaaggtgcttagactttaaatggtgaaatacttaaaatgcagagatggcctggcctcctgagcctggtagaagaaagaagagtgattaaatgcaattttaattttaaa

SEQ ID NO: 360201 - DNA, 674 bp, Homo Sapiens
  misc_feature (635)..(635): n is a, c, g, or t
actgccccggcctcccggcctcctgcctggcccgtccaggcggccgcctgcagggccctgcaagccgccggagccgggcaaccagtggaaggagcctgggagaggccaggcctccccggactgctagcctgcttttcctggggtccctggagccggaggaagaaccaggatgttgctgcctgcagaagctcagctcaggaagacttccaggaacctgaggaggagctgccactaacagccatatttcccaatggagactgtgatgaccttggaagggggtcaaaagcctgtgatggagtcgtacacactcctgctgagcccaccggagactcaagatgaaggctggacccttgcgctgtccctggctctaacctacagactggggcctggctccgtcttactggcccccaggtctccatggagactgcagaaacccccgcctgctggaggcctgccacactcacagttaccagctagacagtggggcttactaagacaagcaggacctaaaacagtgtctcccctgggaacctactccccacccagcatttgctaagtctgatcacagggagggtattttgcgtctctgtctcgggttctctgagccactgagacagatggctgtccgctttgangctctgaaaacttgtggcaccccatggtgtgtcttgcat

SEQ ID NO: 360202 - DNA, 761 bp, Homo Sapiens; identical to SEQ ID NO: 94476

SEQ ID NO: 360203 - DNA, 742 bp, Homo Sapiens
gccggccggaggtctgtcatgctgttcccgctccaggtggccgctgtaacctcttcggtccgcgacgatcctctagagcactgtgtgtctccccggacgcgagcccgctcccctgagtaagagtcagccagccgcggatggggagcgtgagtggcgagaatctgcaaaatggctgataatttggatgaatttattgaagagcaaaaagccagattggccgaagacaaagcagagttggaaagtgatccaccttacatggaaatgaacgggaaagttgtcagcgaagctttctgaaaacagtaagatactgatctctatggctaaggaaaacataccaccaaatagtcaacagaccaggggttccttaggaatcgattatggattaagtttaccacttggagaagactatgaacggaagaaacataacattaaacagacgactcgcggccacgcacttacacgcacgttcatcttactcaggaaacggctctgacaaccttgaacgtacacaacacgaatacaatcagtttctccgcgggtacacgcgacagaatcccagtgcaaaccgttcacggcaggtggaaacagagtactgagccccaagagtcagacgacactccacacacccctatcggtccaagctcagcctgatctaactttcacaccatacacgaccctcttgtgacacaattcacgagggtcctagaccagcatgtcttaactccttcagaggcatactgac

SEQ ID NO: 360204 - DNA, 1122 bp, Homo Sapiens
  misc_feature (544)..(554): n is a, c, g, or t
  misc_feature (623)..(656): n is a, c, g, or t
gagtacctgttgaaaaaaactggttctccacccctcccccatacaaaatccacaacaaagcccagtggtctcttgtgaatgactgacacagatcagcctcttacacttgacttctgctcatcaagtgccaattcaatggagcaggaggaggggatatcatatatttaggggaaagacttaagcctttgagctctccagcttggaccacacattgcccttttctcagggaaggaaatggaaacaaaaagccaacagggcaggggttttgtaagtggaactctggattgactggtcagttgctacaatcagaatatgctttcttggaccatgtttgagactcagaagaatgggcctttctgccataattcttcactagtcaagaatgccagcagtttctttgtataaagagacctgcctttaaaatcatacattctgaacattttagtcaagctacaacaggtttggaaaacctctgtgggggaggggcgagtataaagttttcctcttttttaactgttccctttgcccttcaaactgcagatannnnnnnnnnnaagtggggacttctccctacttgattaaagattgagtggaattctagatgtggtcatttgtgtcataannnnnnnnnnnnnnnnnnnnnnnnnnnnnnnnnncctcccctgagtgtatgcttagttgttgagtatatatatttgggaccattaaaactttttttgatgtaatataacctaacgttgtgctggtacctgttttaccatgtgtaatttttgttctacatcacagttcttaatttgtttagagttttatgaaagatggtatagtttttattgacaaaagcaaagtaatccttacaacctatgtgcatacaaaagcaatactattttgtgactaaatattttatattaaaatttacatcagcaactgtcttgagaattcagggaaatagaatggaatttaaaacttcaacagttttgttaaatctagaaacatgaaattagtattccaaagagattctgaaatttcttttcttggggaaatgacggtacattaaatcaaaattgaggatggatgatttaaaaacattttgactttttaataataaaaagaaaagtgaagagt

SEQ ID NO: 360205 - DNA, 1007 bp, Homo Sapiens
  misc_feature (493)..(493): n is a, c, g, or t
  misc_feature (921)..(921): n is a, c, g, or t
aaggcagcaaagggcaagaacggaagtggagagtaaggatgggatacttgaagtaatcatgacagcgttacagattgcttcctttattttgttacgtctgttcgcggaagattaaacttaatgaaaatctgtttgtattttctgcatattctctggccaccttgccccatacttacttatttagcatagtcgagtgctctagtttctgtctctcaggcactcgtaactaaggaccaccattggccattggtagatgtttgattgacttaacaagagagggacaaattttcaatttgtgaaactccgaagcagaaagtattggtgcttgctaccttgtgtattcttccttagacatgcagagaacaatgtatgtcaagagaccaaaaaagatggctccaagctatgtcatgttacctgtaataaaatctttttcttctagattctttctatgttggcagataatctccccttgtagcttccactcacttattcntgcattcagagtcccaatgatcatcttacccatgtggtttttgagaaagaaagatcaattctttgtttgcagtaggtaatcttagagatggagatgattgtagaattattcctagatgagtgtcaatttatttaattccattgtcatataaggagtcaaattgtttcttatcatttgttcattgaagaacagagacctgtctggaaaatcgatctctacaaattcaattaaataatgatccccaaatgctgaaaaagtgaaatacagcaattcaacagataatagagcaatgtttagtatattcagctgtatctgtagaaactctttgacgaacctcaatttaaccaatttgatgaatacccagttctcttcttttctagagaaagatagttgcaacctcacctccctcactcaacactttgaatacntattgtttggcaggtcatccacacacttctgcccccactgcattgaattttttgcttatattgtttataataaaacttttcaatta

SEQ ID NO: 360206 - DNA, 644 bp, Homo Sapiens
  misc_feature (31)..(31): n is a, c, g, or t
  misc_feature (365)..(373): n is a, c, g, or t
caatcagtcaacaaggtttattaaacacctntgggcttccctggctttgctatttggtgagaaacccaactcagtaacctaatacctgcctttgtgtgtgtgacaaaaataaatgatgcaaaattgtaagtttcaaagacttgaataactttattggctaatattaatttagcaatgttaaccatcagattaattttaggcttggggcagttttagtgattgggggagaacaagagatggacttttgagttttaggtatctgtatgtatgtactttcttgacctctgttatatttctccagataagtactgtttaaataacatataaagatgtcagatgagcaatagatagataagaatggtgcnnnnnnnnntcaaaatatgaagctactgagagcaatttctgagtctcagcatactgagttttggccccaaagtgcctggggaaaatggacatatcatctaaaaagctgtaaataccagccaacaacaggaagtcttagactcctgtcccacacttttgagctgcagggtgtgggggaagccccatgcctttatctcactgtctctatctctagcaaggaaacctgtttcctgactctgcagaatttcgctttccccctttttccttaaaagcagagttac

SEQ ID NO: 360207 - DNA, 641 bp, Homo Sapiens
  misc_feature (589)..(589): n is a, c, g, or t
cttgtcaggacactagggcatgctgggcttcttcttgtaggcgcgatgatgctgcttttgttcttgttggttttcttgtaagtgcttcttcttggcatttcttgctgtcgccctgactgccctcacgtggtttcactggactgcagtgctctcttcctttttcctctcctcttcttcttgttctagttccttaatgctctcttctaacacattgggccagaaatcaccttcaaaatagggcagttccttggcactggtgagcctgtcttcagttgcttgtttgaaaatatccttgtagtcatggatgatccgctctgcaaacgccttgtccagcatctttttggaccactcctgcagtcgttttggcttgggtattttttgatcaggtgggtggcaatggaagatgtaatcatctccttcacttggaggacaggcccagatgtgccctgtcacatacctgcaggacccacgcacacacgtcagatgaacgtgccagtgaaatcggccctgcctttaaggagttatagcagaggagcaaggactaaagccaggacagaagtaaccagagagagagaatgaatgcccacanagctgggtgtggtgggggcaaggctcgaactttatcctgagcaaatgcaagc

SEQ ID NO: 360208 - DNA, 1589 bp, Homo Sapiens
cagacatagcagagcagaaatcagaacccatggaagtggatgaaaagaaacctgaagtgaaagtagaagttaaagaggaagaagagagtagcagtaacggcacagcctctcagtcaacatctccttcgcagccgcgcaaaaaaatctttaaaccagaggagttacgccaggccctcatgccaaccctagaagcactgtatcgacaggacccagagtcattacctttccggcagcctgtagatccccagctcctcggaattccagactattttgacatcgtaaagaatcccatggacctctccaccatcaagcggaagctggacacagggcaataccaagagccctggcagtacgtggacgacgtctggctcatgttcaacaatgcctggctctataatcgcaagacatcccgagtctataagttttgcagtaagcttgcagaggtctttgagcaggaaattgaccctgtcatgcagtcccttggatattgctgtggacgcaagtatgagttttccccacagactttgtgctgctatgggaagcagctgtgtaccattcctcgcgatgctgcctactacagctatcagaataggtatcatttctgtgagaagtgtttcacagagatccagggcgagaatgtgaccctgggtgacgacccttcacagccccagacgacaatttcaaaggatcagtttgaaaagaagaaaaatgaaaccttagaccccgaacctttcgttgattgcaaggagtgtggccggaagatgcatcagatttgcgttctgcactatgacatcatttggccttcaggttttgtgtgcgacaactgcttgaagaaaactggcagacctcgaaaagaaaacaaattcagtgctaagaggctgcagaccacaagactgggaaaccacttggaagaccgagtgaacaaatttttgcggcgccagaatcaccctgaagccggggaggtttttgtccgagtggtggccagctcagacaagacggtggaggtcaagcccgggatgaagtcacggtttgtggattctggggaaatgtctgaatctttcccatatcgaaccaaagctctgtttgcttttgaggaaattgacggcgtggatgtctgcttttttggaatgcacgtccaagaatacggctctgattgcccccctccaaacacgaggcgtgtgtacatttcttatctggatagtattcatttcttccggccacgttgcctccgcacagccgtttaccatgagatccttattggatatttagagtatgtgaagaaattagggtatgtgacagggcacatctgggcctgtcctccaagtgaaggagatgattacatcttccattgccacccacctgatcaaaaaatacccaagccaaaacgactgcaggagtggtacaaaaagatgctggacaaggcgtttgcagagcggatcatccctgactaccaagatattttccaacaagcaactggaagacaaggctcacccggtgcccaaggaactgccccctattttggaaaggtggattttctgggccccaatgttggttagaaaagaagaagcattttaggggaaaccttagat

SEQ ID NO: 360209 - DNA, 467 bp, Homo Sapiens
  misc_feature (11)..(11): n is a, c, g, or t
  misc_feature (406)..(406): n is a, c, g, or t
  misc_feature (452)..(452): n is a, c, g, or t
aacgtgagtgnctagtgtggagcctcagagttggccggagaggagggaggccagtggagggagagagaggtgtccaggccacaggctcctgaaactttgcagcagtgagttgctgagcacaggtgggacttacacaggcagagcctggctcagctgcccagcccagggacacagtggctcccacacactcacccctagggctgcctgtcgacttgcagtacctgccaccagacaagcagcgagaacctgatgcagacatccgcaagatgcttgttgaagccatcatgctgctgacagccacagcaccaggtcggcagcaggtgcggggaccagggagcctacctgatcctttcgagagcttgcacagctggggagccggagcccgacgttgcggaacggctttgtnaagaagcttattccaggtgcttttttgggggacgagcctgaacgtnggcatggaaaacctt

SEQ ID NO: 360210 - DNA, 2298 bp, Homo Sapiens
  misc_feature (1409)..(1418): n is a, c, g, or t
  misc_feature (2130)..(2130): n is a, c, g, or t
  misc_feature (2148)..(2148): n is a, c, g, or t
  misc_feature (2165)..(2165): n is a, c, g, or t
  misc_feature (2189)..(2189): n is a, c, g, or t
  misc_feature (2198)..(2198): n is a, c, g, or t
  misc_feature (2224)..(2224): n is a, c, g, or t
  misc_feature (2233)..(2233): n is a, c, g, or t
  misc_feature (2247)..(2247): n is a, c, g, or t
  misc_feature (2255)..(2255): n is a, c, g, or t
  misc_feature (2260)..(2260): n is a, c, g, or t
  misc_feature (2277)..(2277): n is a, c, g, or t
  misc_feature (2282)..(2282): n is a, c, g, or t
ctcagtcccactatagagtataatgatggaagaccagcaaagcgccatgatattgcacggtctcattctgaaagtccttctagacttccaatcaataggtcaggaacctggaaacgtgagcacagcaaacattcatcatcccttcctcgagtaagcacttggagaagaactggaagttcatcttcaattctttctgcttcatcagaatccagtgaaaaagcaaaaagtgaggatgaaaaacatgtgaactctatttcaggaaccaaacaaagtaaagaaaaccaagtatccgcaaaaggaacatggagaaaaataaaagaaaatgaattttctcccacaaatagtacttctcagaccgtttcctcaggtgctacaaatggtgctgaatcaaagactctaatttatcaaatggcacctgctgtttctaaaacagaggatgtttgggtgagaattgaggactgtcccattaacaatcctagatctggaagatctcccacaggtaatactcccccggtgattgacagtgtttcagaaaaggcaaatccaaacattaaagattcaaaagataatcaggcaaaacaaaatgtgggtaatggcagtgttcccatgcgtaccgtgggtttggaaaatcgcctgaactcctttattcaggtggatgcccctgaccaaaaaggaactgagataaaaccaggacaaaataatcctgtccctgtatcagagactaatgaaagttctatagtggaacgtaccccattcagttctagcagctcaagcaaacacagttcacctagtgggactgttgctgccagagtgactccttttaattacaacccaagccctaggaaaagcagcgcagatagcacttcagctcggccatctcagatcccaactccagtgaataacaacacaaagaagcgagattccaaaactgacagcacagaatccagtggaacccaaagtcctaagcgccattctgggtcttaccttgtgacatctgtttaaaagagaggaagaatgaaactaagaaaattctatgttaattacaactgctatatagacattttgtttcaaatgaaactttaaaagactgaaaaattttgtaaataggtttgattcttgttagagggtttttgttctggaagccatatttgatagtatactttgtcttcactggtcttattttgggaggcactcttgatggttaggaaaaaaatagtaaagccaagtatgtttgtacagtatgttttacatgtatttaaagtagcatcccatcccaacttcctttaattattgcttgtcttaaaataatgaacactacagataggaaatatgatatattgctgttatcaatcatttctagattataaactgactaaacttacatcagggaaaaattggtatttatgccnnnnnnnnnntgtttttgtccttgtgagtccatctaacatcataattaatcatgtggctgtgaaattcacagtaatatggttcccgatgaacaagtttacccagcctgctttgctttactgcatgaatgaaactgatggttcaatttcagaagtaatgattaacagttatgtggtcacatgatgtgcatagagatagctacagtgtaataatttacactattttgtgctccaaacaaaacaaaaatctgtgtaactgtaaaacattgaatgaaactattttacctgaactagattttatctgaaagtaggtagaatttttgctatgctgtaatttgttgtatattctggtatttgaggtgagatggctgctcttttattaatgagacatgaattgtgtctcaacagaaactaaatgaacatttcagaataaattattgctgtatgtaaactgttactgaaattggtatttgtttgaagggtcttgtttcacatttgtattaataattgtttaaaatgcctcttttaaaagcttatataaatttttttcttcagcttctatgcattaagagtaaaattcctcttactgtaataaaaacaattgaagaagactgttgccacttaaccattccatggcgttgggcacttatctattcctgaaatttcttttatgtgattaggctcatcttgatttttaacatttttccacttaaacctttttttncttactccactgggggcnccggtaaaggtaaattncagtaataggcatggcaggcggcncggcacagnctagggcatggggcctaatgggcccnccttaatgnccctgcctaatttntgggttcngtacnggaattggttctgggcntgcgnctctcgggggttaccg

SEQ ID NO: 360211 - DNA, 445 bp, Homo Sapiens
ttgccccctgtgagccccacctaacaccataaattaatccatgtggctgtgaaaattccacagtaaatatgggtcccccgatggaacaagtttaccccagccctgctttgctttacctgccatgaatgaaactgatggttcaatttcagaagtaatgattaacagttatgtggtcacatgatgtgcatagagatagctacagtgtaataatttacactattttgtgctccaaacaaaacaaaaatctgtgtaactgtaaaacattgaatgaaactattttacctgaactagattttatctgaaagtaggtagaatttttgctatgctgtaatttgttgtatattctggtatttgaggtgagatggctgctcttttattaatgagacatgaattgtgtctcaacagaaactaaatgaacatttcagaataaattattgctgtatgt

SEQ ID NO: 360212 - DNA, 807 bp, Homo Sapiens
gggaggcttagctcctgggcgggcggcggctgctgcagcgggacccgggagcggggcccggcgccgcccggtgccgcggggcgatgtgagccccaggtgtatcccagagggatccgggtgacttctctgcagactgtttgccatgacagcccaccaaggacggggggaataaagtgggaacccttccccatgcccctcccacggtcagctccccgatggcctgggtgagggcaggctggctgctctgacaccatggggagctgctgcagctgcctgaacagagacagcgttccagacaaccaccccaccaagttcaaggtgacaaatgtggatgatgagggggtggagctgggctctggggtgatggagctgacgcagagtgagctggtgctgcacctgcatcggcgtgaggccgtccgctggccttatctctgcttgcggcgctatggctacgactccaacctcttctcctttgagagtggccgccgatgtcagacaggccagggaatatttgcatttaagtgttcccgggctgaggaaatcttcaacctccttcaggatctgatgcagtgcaacagcatcaatgtgatggaagagcctgtcatcatcacccgcaatagccaccccgctgagcttgacctccctcgagccccccagccacccaatgctctaggctacaatgtctccagctttttcaatggcttgcctgggagaggggcccacggattcttcagctcccgcgggcggctctcgaacaaggcagcctgcggcacccctcggcttggggaagagtccacccattgccct

SEQ ID NO: 360213 - DNA, 425 bp, Homo Sapiens
  misc_feature (239)..(239): n is a, c, g, or t
  misc_feature (406)..(406): n is a, c, g, or t
aataaaagtaaagtcaagcaaaccccccaaaattaaaatacatgtttgatatttaagctaaaatacttataggctgatttaaaggaatgatccctactttctttaaaatggagttatatatctatgtttatattctgtaacagatatgccattttagaaaatcagaagagatgtatggaactgataaccttagtccggagtggctaggttatcctttaaaaccaggatatatctttttncttccttcctaaatattttgttattcagaaaaaaattcacagaaaaagaaaattatatttaactaagaggggatgttgtatgcccaagttctttagcatggaagagggccgatggctgggaacgctggagagaggacagagcaaggtaaggaggctcttggtgggantgatgcttgtcctcagacc

SEQ ID NO: 360214 - DNA, 608 bp, Homo Sapiens
  misc_feature (53)..(169): n is a, c, g, or t
  misc_feature (445)..(445): n is a, c, g, or t
  misc_feature (460)..(460): n is a, c, g, or t
  misc_feature (513)..(513): n is a, c, g, or t
  misc_feature (530)..(530): n is a, c, g, or t
agggcctcgcaagtagctgagattacaggcatgcaccactatgctgggctaannnnnnnnnnnnnnnnnnnnnnnnnnnnnnnnnnnnnnnnnnnnnnnnnnnnnnnnnnnnnnnnnnnnnnnnnnnnnnnnnnnnnnnnnnnnnnnnnnnnnnnnnnnnnnnnnnnnntgagcactctcaccccgctggtattatagcttttagtatacaccaagcatttctttcagtttgtttcattgtacttagttgctcacataattaatctgatgaatataaatagttttatgttctttatttgtactgagatcataccaagtttcagtatgtcgtagctattgggaaaaaacttaatggtacctttgcaggctttacacctgcctgcatggtgacaattttctttagtattagctctttcaaaactctttaatttatcttgtttacaangtgtatgaccattanttttatgggtcatggaaattttaggaatttccaaggttttttggtacataccnaaccattgataggggangtgtgaggtttattgtatggatttattatataggctgaaaatgtaggcaggtttttggggtattcctggttaaaataa

SEQ ID NO: 360215 - DNA, 369 bp, Homo Sapiens
  misc_feature (15)..(15): n is a, c, g, or t
  misc_feature (23)..(23): n is a, c, g, or t
  misc_feature (50)..(50): n is a, c, g, or t
atggccgtgtaaacnccgacacnagccggccggtctggaatgtcatccanaggccgagtcatgttggggtcattgatgtagtcacagagctgggaagactcaagggctccacagtcattgaacagctcagaaatgagctcgctggtgctctggcgtgtgtagggattggggtaggcaatgatggcagtgatggcagtcaccacaatgacctccagcaccgggtacttccccagcctggtggtcttgcgcctcctgcaccaggcgatgttgcagcggatgaagagggttccccacaagcccccgaagaccccaagcaggatgaaggggaagagttcagccatgtaccagggcgtgtggtattccacataa

SEQ ID NO: 360216 - DNA, 579 bp, Homo Sapiens
tattacacctcatgctttcgctgacctacgaaatttgagggctttgcatttgaatagcaacagattgactaaaattacaaatgatatgttcagtggtctttccaatcttcatcatttgatactgaacaacaatcagctgactttaatttcctctacagcgtttgatgatgtcttcgcccttgaggagctggatctgtcctataataatctagaaaccattccttgggatgctgttgagaagatggttagcttgcatacccttagtttggatcacaatatgattgataacattcctaaggggaccttctcccatttgcacaagatgactcggttagatgtgacatcaaataaattgcagaagctaccacctgaccctctctttcagcgagctcaggtactagcaacctcaggaatcataagcccatctacttttgcattaagttttggtggaaaccccttgcattgcaattgtgaattgttgtggttgaggcgtctgtccagagaagatgacttagagacctgtgcttctcctccacttttaactggccgctacttttggtcaattctgaaaaagagttt

SEQ ID NO: 360217 - DNA, 355 bp, Homo Sapiens
  misc_feature (328)..(328): n is a, c, g, or t
gcacgcaaggtgcactgtggcacagtcgtcatcgtggaggaggatgctcagaggaccgggaggaagaactccagcacctccacctcctcttcaggcagcaggaggaatgcctttaagggtgtggtctactcggccaaccagtgcaaagccctcatcaccatcctggtggtcctcggtgccttcatggtcacctggggcccctacatggttgtaatcgcctctaaggccctctgggggaaaagctccgtctccccgagcctggagacttgggccacatggctgtcctttgccagcgctgtctgccaccccctgatctatggactctggnacaagacagttcgcaaagaactactgg

SEQ ID NO: 360218 - DNA, 1428 bp, Homo Sapiens
  misc_feature (37)..(37): n is a, c, g, or t
  misc_feature (76)..(98): n is a, c, g, or t
  misc_feature (149)..(149): n is a, c, g, or t
  misc_feature (289)..(289): n is a, c, g, or t
tcctatttccccgcgtttacccacggggaattgggcnccaagggggccccccgggcaggcccacgggggccaaggnnnnnnnnnnnnnnnnnnnnnnnttgtttcccagggtaagctttttttgccccgccccccgggggctttgggancgggccccggcgggggggccccgtcccaccaagcagcgtggatgtagtagggcaaggatgcccaaccaggtcgatcagcgtcagcgggctcccgcaggaaggcgaacttgctgggcgcctgaatgagccgcaggaggacntccagggagaaccagcccacgcacaccgactccacgatgaagacgttgtggcacatctgggaacagtggccctgctcctcctcctccctcaggctgggcaaggtgctgacggagaggttgacggcggtgacggtcacgaagagcaccgacaggcaggcgaacaccttgccaggcagccccgaggtgcggcctctcccaccatgtcgcgcagtcgccggcatgcagcgccccaggcggccctcgccctcggccggggccctcgctgtcgcggcccctcgctgtccagcgcgtcgtcctcttcctcccgctccaccatctccgcgaactcctcaatcttctgcaggtagcggcgcttgcagcagccgtccaggtggtcctccgcgatgccccagtacagcagctcctcctggaaggacagcgcgcacatctcgcgcagcagccgcagcttgcccgcgcgcaggaaggtcaggatagtgccgaaggcccccgggttgcggtcgaagaagaactcgttgcaggtgacgtcgtagtcatcgcacacgttgaggatgtcgtcgaagttggtgcaggccttgagctggcccaggcgcgtcagcgggaactcgtccagcgtggtccagggcagcgagtacttgatgccgcctacgttgatgatgatccgacggcggcggtcctcggggctgacagccctggcggggctcatcctgcggcccgcagccgctgcgccccggcggtagaacgcgcccttgatggcctggcgctgcgggaggaaggccgggtggaaggaggcgtccgaggtgcagctcagcgcgctgtagtcgtagtcagaattgtctcccggtaagagggtcattttgggccttcacatccctctcgggcctcaagttcccgtcgcggcgtccccgcctcggagttggcccggccgcggcttccgtcccccccggctgcccacgggtccggggcgaggacgcgagaggggcctggaagtcgcccggggagcccgctctgcctcccggagccgccgccaaacttcggtcccggggcccggctcagctcccgccctcggagccacggccgccccgtctctgcctcccggtccccgccgggctccgagtgcgccgggagcgcggcgcagcagc

SEQ ID NO: 360219 - DNA, 1266 bp, Homo Sapiens
  misc_feature (54)..(90): n is a, c, g, or t
  misc_feature (1135)..(1135): n is a, c, g, or t
  misc_feature (1153)..(1153): n is a, c, g, or t
  misc_feature (1170)..(1170): n is a, c, g, or t
ctaccgataatggggcgaaccctcccgcgacgcttttatccgcggtggcggcgnnnnnnnnnnnnnnnnnnnnnnnnnnnnnnnnnnnnnatcaggccaaatcggccgagctcgaattcgtcgagagcgggcactcggagcccggcggggaccgggaggcagagacggggcggccgtggctccgagggcgggagctgagccgggccccgggaccgaagtttggcggctcattcaggcgcccagcaagttcgccttcctgcggagcccgctgacgctgatcgacctggtggccatcctgccctactacatcacgctgctggtggacggcgccgccgcgggccgtcgcaagcccggcgcgggcaacagctacctggacaaggtggggctggtgctgcgcgtgctgcgggcgctgcgcatcctgtacgtgatgcgcctggcgcgccactccctggggctgcagacgctggggctcacggcccgccgctgcacccgcgagttcgggctcctgctgctcttcctctgcgtggccatcgccctcttcgcgcccctgctctacgtcatcgagaacgagatggccgacagccacgagttcaccagcatccctgcctgctactggtgggctgtcatcaccatgacgacggtgggctatggcgacatggtccccaggagcaccccgggccaggtagtggccctgagcagcatactgagcggcatcctgctcatggccttccaagtcacctccatcttccacaccttctcccgctcctacctggagctcaagcaggagcaagagagggtgatgttccggagggcgcagttcctcatcaaaaccaagtcgcagctgagcgtgtccaagaacagtgacatcttgttcggaagtgcctcctcggacaccagagacaataactgagcgcggaggacacgcctgccctgcctgccatctgtggcccgaagccattgccatccactgcagacgcctggagagggacaggccgcttccgagtgcagtcctggcgcagcaccgactcccacgcacccggggaaaggacaccctcactcccacaaccccgggaagaacactagaacatcagcagaggggccctgccccttccgcctgcagccgtgaaaggaagcntgggtcatcagcccagcncccgcccaccccagccncctatgtgtgtttcccctcaataaggagatgccttgttcttttcaccatgcaaataacatgcccagcaaaaacttgctttatgggtctgcctggag

SEQ ID NO: 360220 - DNA, 822 bp, Homo Sapiens
gctgctgtagcagaggtgtgtgttagagaaagcagggcctgatttagtagcagagaactgggtgagaaaaatggccagagaaagtgacctgccagctaccagtgtttccgaaaatgagggtgggatgggcccatttgcagagcaggacagcagtcatccccatagccctctgaggaggggagggatgcttagagcaggcagttctgtcagttctgacgtggcaggtgccattgcaacttgtgcggaggagtcttaggaagtgctgtcataattcataaggtcaagagcaacatctggatgaatgagccacctgaaatgtgtgtgggctgagccacaggaagggtgagtcctcttgcttgtggtgctttatggtgtgcaggttgcttgctttcccacattctctcatttgcttgaaggcagcctaacaaaagggagtccccaaagagctccatgagagcttaagaaaattcatctcctgaggacaaagagaacaaagatctgtcctgtggtcacactgttgaggctctgtcttcacagctgatgttctcctagtggaggtacagctgaagaacattcagccccagcacgagaagatacagagcaacttggaaaccccaaagggagacacacccttaacactgccgtgctgtgctgtgccgtgtcctgaaggaggagagagccctatctcctcctggttttgttgctgacattgcagctgatcatgccttgactccttcatctctaacagaggaagaactgtattatcaaaccttatggtctacccatgaataaataaaatattgttcaaggccaaaaagatag

SEQ ID NO: 360221 - DNA, 1009 bp, Homo Sapiens
  misc_feature (587)..(587): n is a, c, g, or t
aggcaggagctgctcttctggggtatcgcgatccacttaaggatgaggcagacttggtgacaagctggtctgagcagcgcttccagagccagaactgagcccagtgagagcgcaccctggggcagcctggattcctggggtgtccccggcagccacacacagccatgcactacccaactgcactcctcttcctcatcctggccaatggggcccaggcctttcgcatctgcgccttcaatgcccagcggctgacactggccaaggtggccagggagcaggtgatggacaccttagttcggatactggctcgctgtgacatcatggtgctgcaggaggtggtggactcttccggcagcgccatcccgctcctgcttcgagaactcaatcgatttgatggctctgggccctacagcaccctgagcagcccccagctggggcgcagcacctacatggagacgtatgtgtacttctatcggtcacacaaaacacaggtcctgagttcctacgtgtacaacgatgaggatgacgtctttgcccgggagccatttgtggcccagttctctttgcccagcaatgtccttcccagncctggtgttggtcccgctgcacaccactcctaaggccgtagagaaggagctgaacgccctctacgatgtgtttctggaggtctcccagcactggcagagcaaggacgtgatcctgcttggggactttcaatgctgactgcgcttcactgaccaaaaagcgcctggacaagctggagctgcggacttgagccaggcttccactgggtgatggccgatgggggaggacaccatcagatgccgggccagaacccactgcacctatgaccgcgtcgtgctggcacggggagcgctgccggagtctgctgcacactgcggctgcctttgacttccccacgagctttcagctcaccgaggaagaggccctcaacatcagtgaacacttaccccgtggaaggtgggaacttgaaactgagccaaggcgc

SEQ ID NO: 360222 - DNA, 555 bp, Homo Sapiens
cactagtgattcgaaacaggaccatggcatagcgcttatcaggacaggcctgcacttccccagtctccccactctggctgctgaagcgggcttgcctttcgctgatatccctttgtgtgctgttggcagatgcggaagatgttgaaataggtgaagcagacaataagggctgctggggcatataacatcatcacgatgaacagggtgaagtagaagtcggtgtgccaggactccgcacaccactgaaacacatctccatgatatccaggtttgccccagtggaaaaaggaaggcaggaagaccagggtcgagtatagccaaatcaggaaaatacacaggcgtagtctccagggtgtaaccagagtattataggttaaaggtttagtaatggcaatgtatctatcaatgctgatacaggccagagaagccatggagacgctcttcagaactgatactacaaaaccaaatatctggcaagtcaaggactcctctactggaagggggtgatggaggagtgataaagaagggaccacgcagctcaccccaacaaaaacc

SEQ ID NO: 360223 - DNA, 524 bp, Homo Sapiens
  misc_feature (63)..(63): n is a, c, g, or t
  misc_feature (78)..(78): n is a, c, g, or t
  misc_feature (98)..(98): n is a, c, g, or t
  misc_feature (136)..(136): n is a, c, g, or t
  misc_feature (159)..(159): n is a, c, g, or t
  misc_feature (180)..(180): n is a, c, g, or t
  misc_feature (205)..(205): n is a, c, g, or t
  misc_feature (228)..(228): n is a, c, g, or t
  misc_feature (431)..(431): n is a, c, g, or t
  misc_feature (448)..(448): n is a, c, g, or t
  misc_feature (452)..(452): n is a, c, g, or t
tgaatctctttgtcgccgtcatcatggacaactttgagtacctcacccgagactcctccatcntgggcccccaccacntggatgagtacgtgcgtgtntgggccgagtatgaccccgcagcttggggccgcatgcnttacctggacatgtatcagatgntgagacacatgtctccgcccntgggtctggggaagaagtgtccggncagagtggcttacaagcggcttntgcggatggacctgcccgtcgcagatgacaacaccgtccacttcaattccaccctcatggctctgatccgcacagccctggacatcaagattgcccaaggggaggagccgacaaacagcagatggacgctgagctgcggaaggagatgatggcgatttggcccaatctgtcccagaagacgctagacctgctggtcacacctnacaagtccacggacctnaccntgggggaagatctacgcagccatgatgatcatggagtactaccggcagagcaaggccaagaagctgcaggcc

SEQ ID NO: 360224 - DNA, 1043 bp, Homo Sapiens
atgaacattgtggacgtgctggccatcctccccttctacgtgagcctcacgctcacgcacctgggtgcccgcatgatggagctgaccaacgtgcagcaggccgtgcaggcgctgcggatctatggcatcgcgcgcatcttcaagctggcccgccactcctcgggcctgcagaccctcacctatgccctcaagcgcagcttcaaggaactggggctgctgctcatgtacctggcagtgggtatcttcgtcttctctgccctgggctacaccatggagcagagccatccagagaccctgtttaagagcatcccccagtccttctggtgggccatcatcaccatgaccaccgtcggctacggcgacatctaccccaagaccacgctgggcaagctcaacgcggccatcagcttcttgtgtggtgtcatcgccatcgccctgcccatccaccccatcatcaacaactttgtcaggtactacaacaagcagcgcgtcctggagaccgcggccaagcacgagctggagctgatggaactcaactccagcagcgggggcgagggcaagaccgggggctcccgcagtgacctggacaacctccctccagagcctgcggggaaggaggcgccgagctgcagcagccggctgaagctctcccacagcgacaccttcatccccctcctgaccgaggagaagcaccacaggacccggctccagagttgcaagtgacaggagggcccctcaggcagagatggaccaggcggtggacagatgggtagatgtggcaggcatgtcatcgacagcacagaagggctgtcctgtgtccccccaaccctcccctggacagactctgaaggccctcccggcacctctgccaaggctgggtaagactcctctatgttgcctgctgtccaggagcccgggagggaggggtgtgcaggagccgcagggccgtgtgggacgagtggaggccgcggcctggctggcacgagagcccacgcccgcttctgtatctccctcaataaagcctcctgctctgtgcaccctcc

SEQ ID NO: 360225 - DNA, 556 bp, Homo Sapiens
  misc_feature (43)..(43): n is a, c, g, or t
  misc_feature (46)..(46): n is a, c, g, or t
  misc_feature (167)..(167): n is a, c, g, or t
ctcaagcgcagctcaaagaaactggggctgctgctcatgtacntgncagtgggtatcttcgtcttctctgcctgggctacaccatggagcagagccatccagagaccctgtttaagagcatcccccagtccttttggtgggccatcatcaccatgaccaccgtcggntacggcgacatctaccccaagaccacgctgggcaagctcaacgcaccacaggacccggctccagagttgcaagtgacaggagggcccctcaggcagagatggaccaggcggtggacagatgggtagatgtggcaggcatgtcatcgacagcacagaagggctgtcctgtgtccccccaaccctcccctggacagactttgaaggccctcccggcacctctgccaaggctgggtaagactcctttatgttgcctgctgtccaggagcccgggagggaggggtgtgcaggagccgcagggccgtgtgggacgagtggaggccgcggcctggctggcacgagagcccacgcccgcttttgtatttccctcaataaagcctcctgctttgtgc

SEQ ID NO: 360226 - DNA, 894 bp, Homo Sapiens
  misc_feature (391)..(429): n is a, c, g, or t
taggcccggaaaccccgctcaccttgtcccctgtgtcttcaacgtctcatcagtaatgctcccacgctctcactcccaccttggagaactcaagctgccaaattccttgctgcgtttacctagtggcgatggaggcacatccagccttctctaggtcgcggccccgacgtgcagcctacgaagcaccccttccgggtggcatccccaccctgagagttctttaacccgttagcctggccctagcctcaccaccccctgcacccctcctgttctcctcggtcccacgatgtccccaacacttgggttagttcaaggactcggggcgggaaagggcacgccgcgcgccaagggaccgaggctcaggcgagcctggcggctctgcctcaggccnnnnnnnnnnnnnnnnnnnnnnnnnnnnnnnnnnnnnnnacccggcgcgaacgctagggacgcccggcttctccccaccgctcgggtcgctgacgggggtggcactggaggagctcgagagggtccggcagcctgccctggctcggttggggcacctgaagccgggcaagcgacccccctcagcgcagctctccgagatgacgactaggtaaccgctaaggcggaaagaaaggaggcgcttcaggtgccctggcaggataggattggcgaggagggtctgtccggctccaccggcccctcaccttcacggccgcgaccgcctcagctcggccggctctaccaggaaactcagcaccatagcagctcctcacactgccgacatcccgagaattccggaccggtaccacctggttttggcgttcctgtgacctccctctttgttgcgggcggcgggcccctttcgcgacggtggaagaaaaaatcaaagaaaggggcgatcttgag

SEQ ID NO: 360227 - DNA, 1510 bp, Homo Sapiens
  misc_feature (781)..(818): n is a, c, g, or t
tcgcctcccggggcgcggtaatcaccgcccagagggaaggaggtcggcagtgtgaggagctgctatggtgctgagtttcctggtagagccggccgagctgaggcggtcgcggccatgaaggcgggtgccacgtctatgtgggcttcgtgctgtgggctgctgaatgaagtcatgggaactggagctgtcaggggccagcagtcagcatttgcaggagccaccggtccattcagatttacaccaaaccctgagttttccacctacccaccagcagctacggaagggcccaacatagtttgtaaagcctgtgggctttcattttcagtctttagaaagaagcatgtttgctgtgactgcaagaaggatttttgctccgtttgttcagtcttacaagaaaatctccgtagatgttctacttgtcacttattacaagagacagcatttcagcgccctcagttaatgcgactgaaggtgaaggacctgcggcagtatctcattctgagaaatatacccatagatacttgtcgtgagaaagaagacttggtggatctagtactgtgccatcatggactaggctctgaggacgacatggacacaagcagtctgaattcttcaaggtcccagacttctagcttttttacacgttcgtttttttcaaactatacagccccctctgctactatgtcttcgtttcagggagagcttatggatggagaccaaacatccagatctggagtgccggcacaggtacaaagtgaaatcacttcagcaaacacagaannnnnnnnnnnnnnnnnnnnnnnnnnnnnnnnnnnnnnagaagaaaacgcagaggatcggaaccccgggctctccaaggagagagtgagagcttcactgtctgacttgtcaagccttgatgatgtggaaggaatgagcgtgcgccagctgaaggaaattctggctcggaattttgtcaactattctggctgttgtgaaaaatgggaactggtagagaaagtaaaccggttatacaaagagaatgaagaaaaccaaaagtcctgtaggtttatcttttcattttttccctgtagtatttttccttaggcttttaaaaactgggttgtcttgtcacaattaagtcaacatttatttttgagaaagctgtgtaccattttactgagtatcagttagttacatgagcctgtttatagatctggaacaggagtaacttcattatgtgatgtcattatggctgcgagaccaccactgccaaatggcgagccggctgcagctgccaggatgaggcaagacgacaggcctgtgtcgcatctgcttggatgccgtcactcgactgtgtccttactggagttgtgtggacacatggtttacctggcaccaagtgcggaaaagcgcatgagttgaaatgtcccatactggcgggcagtatagtgggtgcgagccgtgacacggtttccaagccctgaaaacgctcccctacacacggacaatcacccccaaactgaacccc

SEQ ID NO: 360228 - DNA, 380 bp, Homo Sapiens
tcagacagagaactggagccaactagcaactcagcagacactatacatcaggacagcctttaagtgcagagttcagctgggtgtggaagcttcactccagcacatgacttgaagtttatcagaagtcatcaagcactaaaggccccaacatatacggacaagaataagcgtgccgggccctgggtgtaattagttaccccctcgtacctgtgccggcactccagatctggatgtttggtctccatccataagctctccctgaaacgaagacatagtagcagagggggctgtatagtttgaaaaaaacgaacgtgtaaaaaagctagaagtctgggaccttgaagaattcagactgcttgtgtccatgtcgtcctggccta

SEQ ID NO: 360229 - DNA, 401 bp, Homo Sapiens
  misc_feature (377)..(377): n is a, c, g, or t
  misc_feature (384)..(384): n is a, c, g, or t
tgatgctgtttggccatggcacccggaagcgtgtccccctgggcaggctggagctgctggaggaagttttggccctggggctacgcaccgatgtggggatcactcaccagcactggcagcagtttgagccccagctgaccctgtgggatgtgtttggagcgaacaaggaggtgcaggagctgctggagcggggcctactgcagctggatcacaggggtcttcggtgttcctgggagggtctggctgtgctggactctctcttgctgaccctcctgcctcagctccaagaagccttggcagcagagaaccccctcccctgtgccaggaggatgacaaaaatgttcctgtgttccagggtaatgccaggttgggttttnagagctnggtcggtacttcagaca

SEQ ID NO: 360230 - DNA, 567 bp, Homo Sapiens
gcccagcccatgacactggtcttgtgaccctacaagttgccttcaacaaccagatcatctccaactcggtggtgtttgagtacaaagcccgggctctgcccacgctcccttcctcccagcacgactggctgtcgttggacgataaccagttcaggatgtccatcctggaacgactggagcagatggagaggaggatggccgagatgacggggtcccagcagcacaaacaggcgagcggaggcggcagcagtggaggcggcagcgggagcgggaatggagggagccaggcacagtgtgcttctgggactggggccttggggagctgctttgagagccgtgtggtcgtggtatgcgagaagatgatgagccgagcctgctgggcgaagtccaagcacttgatccactcaaagactttccgcggaatgaccctactccacctggccgctgcccagggctaccgccaccctaatccagaccctcatcaaatggcgtacaaagcacgcggatagcattgacctggaactggaagttgaccccttgaatgcggacctacataagaggtgccga

SEQ ID NO: 360231 - DNA, 1683 bp, Homo Sapiens
gcctgggtggcgaattcggcacgaggagatgatgagccgagcctgctgggcgaagtccaagcacttgatccactcaaagactttccgcggaatgaccctactccacctggccgctgcccagggctatgccaccctaatccagaccctcatcaaatggcgtacaaagcacgcggatagcattgacctggaactggaagttgaccccttgaatgtggaccacttctcctgtactcctctgatgtgggcgtgtgccctagggcacttggaagctgccgtcgtgctgtacaagtgggaccgtcgggccatctcgattcccgactctctaggaaggctgcctttgggaattgccaggtcacggggtcatgtgaaattagcagagtgtctggagcacctgcagagagatgagcaggctcagctgggacagaaccccagtaatccactgtcctgcaagcgaagagcccagcacagagagctggatggcccagtggcacagcgaagccatcagctctccagaaatacccaagggagtcactgttattgcaagcaccaacgccagagctgagaagacctcgttctgaaccctctaattactacagcagtgagagccacaaagattatccggctcccaaaaagcataaattgaaccctgagtacttccagacaaggcaaggagaagctgcttcccactgcactgagtctggaagagccaaatatcaggaagcaaagccctagttctaaacagtctgtccccgagaaactcaaccccagtgaaggagtgagggacttcagccggggaactctcccctcccacatccagagactgcagcatttcaaagcctctggatctcagcctgtaggaaagtggaattccaaagatctttacattggtgtgtctacagtacaggtgactggaaatccgaaggggaccagtgtaggaaaggaggcagcaccttcacaggtgcgtccacgggaaccaatgagtgtcctgatgatggctaacagagaggtggtgaatacagagctggggtcctaccgtgatagtgcagaaaatgaagaatgcggccagcccatggatgacatacaggtgaacatgatgaccttggcagaacacattattgaagccacacctgaccgaatcaagcaggagaattttgtgcccatggagtcctcaggattggaaagaacagaccctgccaccattagcagtacaatgagctggctggccagttatctagcggatgctgactgccttcccagtgctgcccagatccgaagtgcatataacgagcctctaaccccttcttctaataccagcttgagccctgttggctctcccgtcagtgaaatcgctttcgagaaacctaaccttccctccgccgcggattggtcagaattcctgagtgcatctaccagtgagaaggtagagaatgagtttgctcaactcactctgtctgatcatgaacagagagaactctatgaggctgccaggcttgtccagacagctttccggaaatacaagggccgacccttgcgggaacagcaagaagtagctgctgctgttattcagcgttgttacagaaaatataaacagctgacatggaaagccttgaagtacgcactttataaacaagatgacacaggctgccatccttatccagagcaaattccgaagttactatgaac

SEQ ID NO: 360232 - DNA, 886 bp, Homo Sapiens
tgccatggagtctcaggattggaaagaacagaccctgccaccattagcagtacaatgagctggctggccagttatctagcggatgctgacgtgccttcccaggtgctgcccagatccgaagtgcatataacgagcctctaaccccttcttctaataccaagcttgagccctgtaggctctcccgtcagtgaaatcgctttcgagaaacctaaccttccctccgccgcggataggtcagaattcctgagtgcatctaccagtgagaaggtagagaatgagtttgctcagctcactctgtctgatcatgaacagagagaactctatgaggctgccaggcttgtccagacagctttccggaaatacaagggccgacccttgcgggaacagcaagaagtagctgctgctgttattcagcgttgttacagaaaatataaacagtacgcactttataaaaagatgacacaggctgccatccttatccagagcaaattccgaagttactatgaaccaaacaaattccagcagagccgacgggctgctgtgctcatcccaaagtactaccgaaggtataagaaatgtggccaaagacggcaggctcgccggacggcatgtgattgtacaacagaaactcaggagcaagtttgctaacccaaaagcaggatcaagctgctcgaaaaataatgaggtttcttcgccagctgtcgccacagccccctggtggaccataggcatgtaccaaaggagtgaaagaattgagaaaggccaaggaacttgaagacatacagcagcatcccttagcaatgtgacaatgcttttcagacatgtgttcatttcatgtgtctagtcagagacatgcaacaaccacacacacgcaccaaatcccacg

SEQ ID NO: 360233 - DNA, 781 bp, Homo Sapiens
  misc_feature (14)..(14): n is a, c, g, or t
  misc_feature (33)..(33): n is a, c, g, or t
  misc_feature (40)..(40): n is a, c, g, or t
  misc_feature (57)..(57): n is a, c, g, or t
  misc_feature (316)..(362): n is a, c, g, or t
gccccccacccttncccttaacccaaaaatttngggtaanaaaataattggtaacangtccccaacacgaggtttggaaaaacagccccaatatgaagaaggaaaatggcttccttccctgaagaaagaggaaccctctttccaattcccccccgggtgtccttgatttccccgtgatcccaacagaagattgagttcccaagatgtcttgctgatcaaattaaaagttgtccatgaaagtgcaaatgcaatgaccaaaacattcctgttaaaatcctgcagctgatctccccaaaactgcagagggattttgtannnnnnnnnnnnnnnnnnnnnnnnnnnnnnnnnnnnnnnnnnnnnnntgcatgtctctgctaaaaacagaaatgaaaacagtctgaaaagcaatgtcacattgctaagggatgctgctgtatgtcttcaagttccttggcctttttcaattctttcactctgtggcgacagcggcgaagaaacctcattatttttcgagcagcttgatcctgctttttggttagcaaactgctcctgagtttctgttgtacaatcacagccgtccgcgaagcctgccgtcttttgccacatttcttataacttcggtagtacttttggatgagcacagcagcccgtcggctctgctggaattttttttgttcatagtaacttcggaatttgctctggataaggatggcagcctgtgtcatctttttataaagtgcgtactgtttatattttctgtaacaacgctgaataacagcag

SEQ ID NO: 360234 - DNA, 543 bp, Homo Sapiens
ttcctggctcatttcattgtgctctatgggtacgtataaaaagcaagaattctgtttcctaggcaaacattgcaactcagggctaaagtcatccagtgaaacttttagagccagaagtaactttgtcccagtcctacaatgtgaaaagagtgaatagttgcctctttttagccattttcatggctggtacatattcgtacgcattacttttcagaatcaatacgcactttcagatattcttatttttattctcttaagtctttattaactttggagagagaaatgatgcatctttttattttaaatgaagtagatcaacatggtggaacaaaatgataaagaacagaaaacatttcaatatattactaataactttttccaatataaatcctaaaattcctataacatagtattttacagttttatgaagctttctattgtgacttttatggaattaagagatgaagaagatgagatattttagcatttatatttttcaaaattatatgtatacttaaaaataaagtaactttatgcatttat

SEQ ID NO: 360235 - DNA, 466 bp, Homo Sapiens
  misc_feature (33)..(33): n is a, c, g, or t
  misc_feature (45)..(45): n is a, c, g, or t
gaaaccttttgggggccccggaggtaaccttgncccccggccccnacaaaggggaaaaagagtgaaaaagtggccccccttttaagccattttccatggctggtaccatattccgtacgcattacctttccagaatcaatacgcactttccagatattccttatttttaatcctcttaagtcctttattaactttggagagagaaatgatgcatctttttattttaaatgaagtagatcaacatggtggaacaaaatgataaagaacagaaaacatttcaatatattactaataactttttccaatataaatcctaaaattcctataacatagtattttacagttttatgaagctttctattgtgacttttatggaattaagagatgaagaagatgagatattttagcatttatatttttcaaaattatatgtatacttaaaaataaagtaactttatgcatttat

SEQ ID NO: 360236 - DNA, 383 bp, Homo Sapiens
  misc_feature (47)..(88): n is a, c, g, or t
  misc_feature (153)..(176): n is a, c, g, or t
aggctggtacaggtccggaattcccgggatatcgtcgacccacgcgnnnnnnnnnnnnnnnnnnnnnnnnnnnnnnnnnnnnnnnnnngatagcaggagcaaattagtgaaagtactaaatgtctgatatgcagaaataatggcataagctgnnnnnnnnnnnnnnnnnnnnnnnngcctctgctgccaggcagggaagggccccctgtccagtggacacatgacccatgtgaccttacctattattggagatggttcacattccttaccctgcccctttgtcttatatccaataaatatcagtgcagcctggcatttggggccactactggtctccgcgtcttggtggtagtggtcccccaggcccaggtgtcttttctttt

SEQ ID NO: 360237 - DNA, 388 bp, Homo Sapiens
atccagaggcctaactatctccctgtgatgctgtgctttggtggtcacgcctcctagtccgccttcatgttccatcctgtacaccctggctctgccttttagataacaatagcaaattagtgaaagtactaaaagtctctgataagcagaaataatggcataagctgtctctctctctctgccttggtgccaggcaggcaagggcccgctttccagtggacacgtgacccatgtggccttacctatcattggagatggttcacactgcttatcctgcccctttgtcttgtatccaataaatatcagtgcagcctggcatttggggccactaccggtctccgcgtcttggtgggattcccaggctcagctgtcttttatctcttaaaaa

SEQ ID NO: 360238 - DNA, 448 bp, Homo Sapiens
aagctctctctgtggggtcagaacttcgggggtgtggaggaggtgcggctctagggacaggtaatgtcggcttccaagtgatgccctcctgccaatcccctgcgatttataagggaattttaatttttatagtgaatctcaagggatcatcccatccttgaccacagggaaaagagggccccctcgccccagccccaccccacatggagctcagggggaagcagggaggggttcccaaaagagcctgcggaggctaggagtggttcttgatgctcacctgaagcccctagacgctgcctaaggaaaggggccctcctgggcccccaatacccctccgcttgccgctgtagcgcacccctgcagtccagcgtgcatccaccccacgcacgccccgtgctgtgttcctgggccctgcccatggcctcaataaactctctgcttggtgtgt

SEQ ID NO: 360239 - DNA, 814 bp, Homo Sapiens
  misc_feature (692)..(742): n is a, c, g, or t
ggtgtccattgtcactgagtttgtgagcaacccagcaaccatcaccatcttcctgcccatcctgtgcagcctgtctgaaacgctgcacattaaccccctctacaccctgatcccagtcaccatgtgcatctcctttgcagtgatgctgcctgtgggcaatccccctaatgccatcgtcttcagctatgggcactgccagatcaaagatatggtgaaagctggcctgggagtcaacgttattggactggtgatagtaatggtggccatcaacacctggggagttagcctcttccacctggacacttacccagcatgggcgagggtcagcaacatcactgatcaagcctaacgccaagtgtacaaactggcccaaccacaggagctgccagtatccagcagtatctggaccacaggcaaagaaaaccactaggaccaccaggagcacacaaccccagacccacgccggagggcatccctccaccagaagattccgccacctcaagtgaactgcaggaatcctccaacaaccacaaacacatgcttcgctgttagtgtcttcttcctgccctcagcaccacagctcaagaaaacctaaagtttcaatacaagccataggctcccggaagacgagcgtaccgcccacacgccaaccccctacaatacacggcctatatctcccacgccccacgctnnnnnnnnnnnnnnnnnnnnnnnnnnnnnnnnnnnnnnnnnnnnnnnnnnntacggcagccccgcccttaaaaaatccccaccgggagcgcccactaacccaacccatccccctccccttttc

SEQ ID NO: 360240 - DNA, 630 bp, Homo Sapiens
agctcggtacccactagtccacggttggctgacggcaggagtgcactacctgctgtcagtcaccagagtggccgctcagtgcccagcccgccagcctcgctcttggaggctgctctttatcctgcctgtggttttcagctcagagctggacttctatttataagttacctgtatttatatttatatgcccgctctcatggtgaaggctggacaaggtgctcctctggcccctccttcttacctcagatgcctgaacagaacaaggcaaacccgtagcagcctctcaggagctgacaggtcctctttcggggctcaggagggtgggcacacacccagcggcctgcagagtaagcttattacccacaactgtgcccgctttgtgcttctaaggtgcacacctagcctaggtgagacactgcagccaggcaaccaccgacacacgccccttctcaaagccagaggtgagtggggcaggtgcccggggctgggtgagtggaattaggacacacacaggcttgggcttcaagttcatttattgatgcattggttggacacaataaaaccacaattgttatcaaaaagtttccctcccctccccctttttctggttctcccattggaaatgtcttt

SEQ ID NO: 360241 - DNA, 1224 bp, Homo Sapiens
  misc_feature (1134)..(1165): n is a, c, g, or t
cggtccggaattcccgggatcaagcgcagtgcccacggcgagctggaggccacggaggagagcgagcaggccctctatgagcagcagcaacttgaggccgcctctgcagccgaggagagtccgccacccaaacgaccccggatagcttacctttcggaggtgaaggaagagagagatgacatcccagcccaggtggcgatggtgactgaagaagatggggccccccaggtggctctgatcactcaggatggtgcccagcaggtcacaatcatcacctctggggctgtggtggctgaggactcaagtgtagcatctcttcgtcatcaacaggtggcactgttggccacagccaacggaacgcacattgcagtgcagctggaggaacagcagaccttagaggaggccatcaatgtggccactgcggccatgcagcaaggggctgtgaccctggagacaacagtgtcggagagtggctgctgagtccaagagggctgggtcccacaccatgctggaggaagtgccatctgcatggccactcttgcccccaagggcccaggctgtggctgacacatagaaggtggccacataggtctctggggtgagaagacagcaagaaaactgcctaactgaagggaatgggggccctgctcaagaagggggccaggcagctggaatcaggggagtgcatcatcctcgggagctgacaacagccaggctacaccagggcacccgcctctcaaaatcagctgggcgcccactctcctcctaaagaacacccttctggccctcagtctggtcccccttctcaggtagagattgggggctgctatggggactggccctgtaggggtgaaccacagacagctcttcagcccagtagcagtggaacaggccctgtcctgccactcccagcaataaccacactcccatggaggccagctgagatgccaggctacttggcaccagggacattccgtgacaccacagtcaattaattcctgcaggggcctgtggctggagaaaaggtgcccagcccccaccactcctcagctgccccccaacctctctatggcagagaggcaggcagtggcccatgtacatagactgctggggattgggtttgatttgtattgnnnnnnnnnnnnnnnnnnnnnnnnnnnnnnnnctgctctgggtggtggtggcacatggatgaatgagtatttaataaaagttccaaatttc

SEQ ID NO: 360242 - DNA, 1066 bp, Homo Sapiens
gcagggctgcgggaaacgctttcaccgagtactcgagcttgtataagcaccacgtggtcaacacacactgcaagccctacacctgcagcacctgcggcaagacctaccggcagacctccaccttggccatgcacaagcgcagtgcccatggcgagctggaggccacggaggagagtgagcaggccctctatgagcagcagcaacttgaggccgcctctgcagccgaggagagtccgccacccaaacgaccccggatagcttacctttcggaggtgaaggaagagagagatgacatcccagcccaggtggcgatggtgactgaagaagatggggccccccaggtggctctgatcactcaggatggtgcccagcaggtcagcctgtccccggaagacctgcaggccctggggagtgccatcagtatggtcacccagcacggcagcaccaacctcaacatccccagtcctgatgccgacctggccacatctggcacacatacagtcaccatggtcagcgccgatggcacccagacgcagcccgtcacaatcattacctctggggctgtggtggctgaggactcaagtgtagcatctcttcgtcatcaacaggtggcactgttggccacagccaacggaacgcacattgcagtgcagctggaggaacaacagaccttagaggaggccatcaatgtggccactgcggccatgcagcaaggggctgtgaccctggagacaacagtgtcggacagtggctgctgagtccaagagggctgggtcccacaccatgctggaggaagtgccatctgcattggccactcttgcccccaaggaccagcgctgtggctgacacatacgaacgtggcccacataggtctctgggcgtgagaagacagccagaaaactggctaactgaacggaatgggggccctgcttcaagaacggcgccacgcagcttggaatcaccgagcagtgcatcatcctcggggaactgacacagccaggctacaccaaggcacacgctctctaatccgcgtgcgcccactctctcctaagaaacctttgggctc

SEQ ID NO: 360243 - DNA, 479 bp, Homo Sapiens
  misc_feature (44)..(44): n is a, c, g, or t
  misc_feature (53)..(53): n is a, c, g, or t
  misc_feature (70)..(70): n is a, c, g, or t
  misc_feature (109)..(109): n is a, c, g, or t
  misc_feature (132)..(132): n is a, c, g, or t
  misc_feature (135)..(135): n is a, c, g, or t
  misc_feature (139)..(139): n is a, c, g, or t
gccctaaaaaaacccccaatgcaggaaccccaaccccaaaaaanaggtcaggnaaacccaagtccgcccnacccccaatggcttctggtgtggcccgtaatggcccaanaggggctgaactggggaagggtncangccnaagccctcaagcatctgctccctgtcccctgctttttcacccctgctgcctgaagtggtagccccgcctgctgcttctccacctcccctccccacctcttctctcccagatggggcccttgctgcgtgacggggtctccatgcgctttatttatttgcagtctgttttctaggcggtggagctagacactgaccggaatgacatacttttctgtgtgtgattcactgtgtactggtcagcacaggctggccagagagctgttcttgtttctggtgttgtcacgtcttcttgttttctctaagtttaaaaaaaagtccttggtttaatacactaaaatccc

SEQ ID NO: 360244 - DNA, 1182 bp, Homo Sapiens
  misc_feature (1118)..(1118): n is a, c, g, or t
gcggagacgggcatcagtgtgatggcggctcgcagcaatggcaccgtctccccctcggccttcttggagccatatagccctgcagtgtgggtgatgatgtttgtcatgtgcctcactgtggtggccatcaccgtcttcatgttcgagtacttcagccctgtcagctacaaccagaacctcaccagaggcaagaagtccgggggcccagctttcactatcggcaagtccgtgtggctgctgtgggcgctggtcttcaacaactcagtgcccatcgagaacccgcggggcaccaccagcaagatcatggttctggtctgggccttctttgctgtcatcttcctcgccagctacacggccaacctggccccctttcatgattccaagagcaatacattcgacaatgtgtcggggcctcagtgaacaagaagtttcagcggcctcaagatcagtacccacctttccgcttcggcacggtgcccaacggcagcacggagcggaacatccgcagtaactaccgtgacatgcacaccaacatggtcaagttcaaccagcgctcggtgaaggacgcgctcaccagccttcaagatggggaagctgaatgccttcatctatgatgctgctgtcctcaacaacatggcaagcaaaggacaagggctgcaagctggtcacaattgggtctggcaaggtctttgctaccactggctacgggcatcgccatgcagaagaactcccactggaagcgggccatagacctggcgctcttgcagttcctgggggacggagagacacagaaactggagacagtgtggctctcagggatctgccagaatgagaagaacgaggtgatgagaagcaagctggacatcgacaacattggcaggcgtcttctacatgctgctggtggccatggggctggccctgctggtcttcgcctgggagcacctggtctactggaaactgcgccactcggtgcccaattcatcccagctggacttcctgctggctttcagcaggggcatctacagctgcttcagcggggtgcagagcctcgccagcccaccgcggcaggccagcccggacctcacggccagctcggcccaggccagcgtgctcaagantgctgcaggcagcccgcgacatggtgaccacggcgggcgtaagcagctccctggaccgcgccac

SEQ ID NO: 360245 - DNA, 480 bp, Homo Sapiens
  misc_feature (261)..(261): n is a, c, g, or t
  misc_feature (267)..(269): n is a, c, g, or t
gagcagtgcccaggggctccctgcgtgaggacggcaaggtgcgatgtatgtctaacttattgatggcaggcagccccctgtgccccctaagcctggccctggttattgctgagctctgtgctcagtgctgcggcctggccgtggctcgtctgttcctttggggggcccgggcgggttgtgggaatcagtcttcacagacagacgtgagccaggcggaggactcgttccttgcagaggtcagtcctcacctgcaggtgtcgnggtggnnnggggcaaggaggggcaggcacacaccatgtctgacctgaacccgattctggggagcatcttcccgctccggccccacgacctccacagggttacattgtaatatatatgccccagctaacctgtctgatggtggcatcttcctgcagacatttcaaacatgtaacttttatatgaaaaaaaataaacacagatgaaagctgcccaatgcca

SEQ ID NO: 360246 - DNA, 1910 bp, Homo Sapiens
tgaaagaacatgtattgaggtaccttttattggtataagaacgtaagttccagattaaccatgtcattgtttcattttcaccatggattttttttcacaaactcctttgaaattaaacagacttatatgtaaatgtctttctacattaaaactacttcccaacccacaaagaccccacttactactaatttctggggaatttcgtttactcgttttatctaatattaaaaaatcaacattttgccagcagttaaaaagacaaccttaaagttctcaaattactttccaccaaacccggaaaagaaaaccacccatatccaaaactttaaagcaataaaaatttctattttccaaaaaagtatttacagactgaaattcaaactctacattgccatcaatgtaattatacaagtgcatacaaagccctggaaaagaggaagtatttcattacaaaatatttatgatcaagaaaatattgcttgcctttaaataaagtggcagaaaataaatatgcttaaagatggccattttcacaagtaaacaaaaaagtacacatgtaagaaacaaagtgaaaatgcttgagcttcaaaatgactctagcagtgtttgcacaaatttgttttaaagcgaggtcttctgaagacttcctctgtttagttataaaaatacaaaaagaggctttagagaaggatttcaccaagccgaatgtgcgatgcacacagccatcagaccaagactgcactagcaacttccacctattgttgtgagcaaaaccgtacaccaaataatctaaaaaaattttcctgtttccaacaaagaaattcccaataactaagtgatgcagatcaaaactgactcgatctaatggccaccaaggagcagttctagatctaaggggacacttgagagccaaggggtcaaatccaatctcatgtgttttacacaagcccgaactcactttcagtctgtgtgaattacatctacctggacctccatttttgtcttttaaatccattttttcgctgtgccaagtatattacacatctgattctgtttccctatatcctctctctcttccctatgggcttttattggtctctgaagtccctggagatcttcagtgccagctccaactctgtgtcccagaccatgtcgggccagctctcagctttccttctgtcttctctacactcccttgaaatcccaacagacaaataccaatacagcagaaggtgaacaatgtagccaaaataaacactttctagttaaagtctttaaatagaagttttatcttagaggattcttcactgaaagctcatcagtcaagtcctaagaccatggatctgacaaaaacccatgttaaaacagcaacccgtaaaacagtctgctgcctatattagaaattacccagtaattgtgtcaaaaagctgttaacacaaaaaatgtacatattaaacaagcaaatccttccaaatgtatcatcaaccccactgtaaaagattgcacatgatagtcttcattttgtctgtaaggggaacaacaacaacaaaaaaacccagtcttcagatgcttgattcagtcgaacctggaagtgccacagccgaggcaggcactcgctctagttcaatgccatcaatgcccaatggcacaagctgggtgctgagggcatgacaagtgatggggaatcccaaatgtcacatctcagtcacaaatttctgccgtcagaggggactgggttgcatgtacaacacgggtggggagcccacactacttgaaggacttcggaaatgcgtgtcaaaggagcttggcgtgatcccaatcacggtatcattctggggcacttcgcctttcagaaagtcatcatcttcatcttccactatgtcctttttcatgggtttcttgaactcccc

SEQ ID NO: 360247 - DNA, 717 bp, Homo Sapiens
cccccttcgggaagtggacactgtccagcgcggctcagacccaccagctgcggcgactgcggggcccagccaagtgccgcgagtgcgaagccttcatggtcagcgggacggagtgtgaggagtgctttctgacctgccacaagcgctgcctggagactctcctgatcctctgtggacacaggcggctcccagcccggacacccctttttgggtttgacttcctgcagctacccagggacttcccggaggaggtaccctttgtggtcacgaagtgcacggctgagatagaacaccgtgccctggatgtgcagggcatttaccgggtcagcgggtcccgggtccgtgtggagcggctgtgccaggctttcgagaatggccgagcgttggtggagctgtcggggaactcgcctcatgacgtctcgagtgtcctcaagcgatttcttcaggagctcaccgagcccgtgatccccttccacctctacgacgccttcatctctctggctaagaccttgcatgcagaccctggggacgaccctgggacccccagccccagccctgaggttatccgctcgctgaagaccctcttggtacagctgcctgactctaactacaacaccctgcggcacctggtggcccatctgttcagggtggctgcacgatttatggaaaacaagatgtctgccaacaacctgggcattgtgtttgggccgacactgc

SEQ ID NO: 360248 - DNA, 528 bp, Homo Sapiens
gatgtcttctaagaaggtaaaacagctaaacagcataaaaagaaaatccccacaagcccagctcttttccttctccttagaaaaagattccaagcaaaaataatcatcttaattgctccaaacactggttttctaggctaggagacaactgatatgttaaggagctgagatcttggaggaggggaatgtggaggtggggaatgtgcagggcgaggaggccgtagggaaggcggggagtggtcctagcaccacagggttgggagcagagggagcggagggcgtttgcccctgcccccggcatctctgccctcattcgctctggggccccccggcagtgccactaaggaggccaggccctgtccagagtcaaatctccactcagtgttgggtgtttctcctctggctgtaaacagggtgtttcttaagtaaacatttagtatactccctcagaaaggccagccacaggggcaaactatgtcccaggtgggaggaaaaaaattcccattctcccctcgtgccaagcttgac

SEQ ID NO: 360249 - DNA, 520 bp, Homo Sapiens
ttttttttggaggcagagaacatctttataggcttcacattatttctacaaatgtactgaaaatacaatgtcccacatacaatcaaagataaacaggaattcaggggacaagacaacaggaacaagacaagcaacagtcaattcttgctttctaatgtgataagaatgttatgtatgtcttagtaatcacagatctcaaggctgtttcctttcaaaatgttttaggatcaaatcatgggagaaatgaagatttaatcattcctaaatttaagtcagatagaaagaaatcaatctttaggaatgtatagtgctcaaaatgagatctacgaggcagtgagaatttcaaaccaaagcagcaaatggtaagagacagtggtccttgatgatcatctgtagagttcttagggttactgttttctgctgttcgtatcagtattggcattattacggttatcaccagagcagctcaagacacgccaataggaaaccccagggaaaatgtgtttttccagtctggggt

SEQ ID NO: 360250 - DNA, 493 bp, Homo Sapiens
  misc_feature (25)..(25): n is a, c, g, or t
  misc_feature (38)..(38): n is a, c, g, or t
  misc_feature (43)..(43): n is a, c, g, or t
  misc_feature (50)..(50): n is a, c, g, or t
  misc_feature (69)..(69): n is a, c, g, or t
  misc_feature (83)..(83): n is a, c, g, or t
  misc_feature (110)..(110): n is a, c, g, or t
  misc_feature (155)..(155): n is a, c, g, or t
  misc_feature (293)..(293): n is a, c, g, or t
  misc_feature (398)..(398): n is a, c, g, or t
tgctctggtgaataaccgtaaatangcccaatactgantacgnaacggcnggaaaacagtaacccccangaactcctaacagntggatccatcaaggacccactgttctncttacccatttgcctgcctttggtttggaaatcctcactgccccncgtagatcctcattttggagcactatacattccccaaagattgatttccttcctatcctgaccttaaatttaggaatgattaaatccttcatttactccccatgatttgatccctaaaacattttgaaaggaaacagnccttgagatcctgtgattactaagacatacataacattccttatcacattagaaagcaagaattgactgttgcttgtcttgttcctgttgtcttgtcccctgaantcctgtttatctttgattgtatgtgggacattgtattttcagtacatttgtagaaataatgtgaagcctataaagatgttctctgcctccaaaaa

SEQ ID NO: 360251 - DNA, 1477 bp, Homo Sapiens
ctatgattcgtatattcggtagtatacccatttttgtccaaaaggacagacaatttatcttcgtaaaaggatgagcccttaaatcgactgaaatgtggtgttttgggggcatgttgcatcctatgcttctatcttgttctcaagtttctctctatccccagttgccattttgataaaccaatgcataatgggaacccctggtgctacaaagccttgtgccccaaatattgaaaccaacaattaggtaaacctttaatgaagcctataccccccttttagtaaagtttgtacttttcataaatgtcattgagttggctttgattctattgggatttttggcattctcttatgggatcatcagttggtttccaagttatgttagatcagctaacatctgctactccagtaacagcctcgtacaactgcaggtaggttttctccagaccaattagttttaatagagcaaactaacaacagactgtagtagcatggttatggcaaccagaatcttcagaaaggttaggacattactttttaagctgtcagtggtatcaaataacttacctagttggaggcagataaaggatcccttacgttttttcctataaggcctaaattgaaattgttaaccaaggaaacagggtcagccttgaaaaatcaaggaattcattgtacctaataactgaagtaaaaataactagttgttcaacttttcctaaactcaaatctatttttataaacaaatgtaaataatgtttatattagagttgaactggttttcatttttataactggtagactagaccttccttaaacttttagaaataaaatgaaggcttcactggatttgtgaggataaaatacattttctttaattgtcctagagcaaagtacattagtcaccatgtgttttttgtgccaatgtaaattgtaatttaccaaagaaaaatacatacattgccttggccttgcagaaaagttcccttgaaagaacctttccaataaataaaacggtcccagaagaaaaaacggggggaggacaggatggggtgcgtgtcgggcccggcctcggccccgcgaagaagctttttcaaaacccgtttcgttgtggggcggcggagccccgcgcagggcaagggaaaaaggggtcactacccggtttgcgtacggaaaaccctggatctgcaacaaatgcgggcggggattgttgcccacaatgaagaaacccgccggggggcaactcctagaaacgtgtctggagaaacacccgaagtaaggagccgctcggagagggccttcccggggatgagctcaacacccgaggacagcagaagaggagcaccatacgcagctgacggcgccacgtgcgcatgtgtgcaagtgtttcgaagagagctggaaacggcggcctacgaagatatataatgtagacaagaagcatatagagatacactcacacctcgacaaccaaccctca

SEQ ID NO: 360252 - DNA, 450 bp, Homo Sapiens
ggagaacatgaccatcaagttagtcttgtttttctaagcaaataggtgtgatcttgatgaattcatattgattaaataaatcaaacacatacaagcaaataaaatatcatgcaatcatttttcctgtcaatgagatgactcacacaacccccaattccaagggagatgaaagtgaggagcaatgcattgtcattgggagtatcaagggaaatcggacacaggaagatttataaatgagaattatgttttacttaatgcaactgcttcacaacagactctgagagagcatttttgcatgaattcagaatcctataggtataaaacatacctaatataggtgaaacagtgcttgaattaaagcaaataggtaaaatcccgggggttgtggatttctttattccctggaaggctggaccaaatatggaaggctgttggaggaaaattttttaa

SEQ ID NO: 360253 - DNA, 374 bp, Homo Sapiens
cctaatattggtgtttagcttgagcctgactccttctcaacactaagagctgatgaagtcctgaagcagaaagagctctgacctgagagtcaaacatccttattctgatctcagctcagcccctgatttgttgtgtgaccctggatatgtcacttcctgtctttttgactttttaaaatgaagggtagactagaggagagcttctaaaactttaatgtggtcaacgaaatggaaaaggaaattccacaagtctgtccttccacaaaagcagcaaataaggtggcaaaaactcaaatttatgggaactctggaaacgaattgaaagtttacagcaatcaggtgaatacctaagaataaaagctggatttagtaag

SEQ ID NO: 360254 - DNA, 992 bp, Homo Sapiens
  misc_feature (702)..(702): n is a, c, g, or t
ggtgcatattcagatcaattcctcaacatggtgtgcgtgaagctccaggagtacaaggacacctgcactgcagcttacaggggtattgtccagtcagaagaaaaacttgtcatcagtgcatcctgggcaaaagatgatgatatcagcagactcttgaaatctctaccaaactggatgaatatggctcaacccaaacagctgaggccaaaaagagaggaggaagaagatttcataagggcagcttttggcaaggagtctgaagttcttattgggaacctgggtgataaattaatccctccacaagacatccttcgtgacgtcagtgacctcaaagccttggccaacatgcatgaaagcctggaatggttggcaagtcgaacaaagtcagctttctccaatctttctacatcccagatgctttctcctgctcaagacagccacacgaacacggatctccccccagtgtcagagcagatcatgcagactctcagtgaacttgccaaatcgttccagggatatggctgaccgctgcttgcttgtcttacatctggaagtgagggttcactgtttccactatcttatccctcttgcaaaggaggggaactatgccattgtggctaatgtggaaagtatggattatgaccccctggtggtcaagctcaacaaagatatcagcgccattgaagaggccatgagcgccanctttcagcaggcacaagttccagtatatcttcgaaggcctgggccacctgatctcctgcatcctcattaatggtgcccagtacttcaggcgcatcagtgagtctggcatcaagaaaatgtgtaggaacatttttgttcttcagcagaatttgaccaacatcaccatgtcgcgggaggcagacctggactttgcaaggcagtactacgagatgctttacaacacagctgacgagctcctgaacctggtggtggaccagggtgtgaagtacacggagctggagtacatccac

SEQ ID NO: 360255 - DNA, 617 bp, Homo Sapiens
  misc_feature (607)..(607): n is a, c, g, or t
ccatcccgcccagcattgcccagctcacgggcctcaaggagctgtggctctaccacacagcggccaagattgaagcgcccgcgctggccttcctgcgcgagaacctgcgggcgctgcacatcaagttcaccgacatcaaggagatcccgctgtggatctatagcctgaagacactggaggagctgcacctgacgggcaacctgagcgcggagaacaaccgctacatcgtcatcgacgggctgcgggagctcaaacgcctcaaggtgctgcggctcaagagcaacctaagcaagctgccacaggtggtcacagatgtgggcgtgcacctgcagaagctgtccatcaacaatgagggcaccaagctcatcgtcctcaacagcctcaagaagatggcgaacctgactgagctgcagctgatccgctgtgacctggagcgcatcccccactccatcttcagcctccacaacctgcaggagattgacctcaaggacaacaacctcaagaccatcgaggagatcatcagcttccagcacctgcaccggctcacctgccttaagctgtggtacaaccacatcggctacatccccatccagatcgggaacctcancaacctggag

SEQ ID NO: 360256 - DNA, 2909 bp, Homo Sapiens
  misc_feature (2199)..(2199): n is a, c, g, or t
agcgggttgtggctccgggactgcggagaacatattgtgatgttcgtgcctcagagctaaaactatgagtgaatttcggattcaccatgacgtcaatgaactgcttagcctgctgcgtgtccacggaggagatggggctgaggtctacattgacctgcttcaaaagaacaggaccccgtacgtcactaccactgtctctgctcacagtgccaaggttaaaattgcagagttttctcgtactccagaagactttctaaagaaatatgatgaactgaaatctaaaaatacaaggaaccttgacccgctggtgtacctgttgtcaaagctcacggaagacaaagagactctgcagtacttacaacagaatgcaaaagaaagagctgagcttgcagccgctgctgtgggcagcagtaccaccagcatcaacgtccctgccgcggcctccaagatctccatgcaggagcttgaggaactgaggaagcagcttggcagcgtggccacaggctccacgctgcagcagtctctggaacttaaaagaaagatgcttcgagacaagcagaacaaaaaaaattcaggccagcacctccccatcttcccagcatgggtgtatgagagacctgccctgatcggggatttcctgattggtgctggcatcagcacagacaccgctttgccgataggcacgttgcccctggcctcgcaggagtcggccgtggtggaggacctgctgtacgtgctggtgggcgtggacgggaggtacgtcagtgctcagcccctggctgggaggcagagccggaccttcctcgtggaccccaacctggacctgtccatcagggagctggtgcacaggatcctcccagtggccgccagctactccgctgtgaccaggttcattgaagagaagtcttccttcgagaacgggcaggtgaaccacgccctggcggccgccatgcgcaccctggtgaaggagcacctgattctggtgtcacagctggagcagctgcacaggcagggcctcctttcgctgcagaagctctggttctacatccagccagccatgcgcaccatggacatcctggcctccctcgccacctcggtggacaaaggcgaatgtcttggggggtccacgctgagcctgctccacgacaggagcttcagctacacaggggacagccaggcgcaggagctatgcctgtacctaaccaaggcggccagtgctccctacttcgaggttctggagaagtggatctacaggggcatcatccacgacccatacagtgagtttatggtcgaggagcacgagctgcggaaggagaggatccaggaggattacaacgacaagtactgggaccagcggtacaccatcgtccagcagcagatcccgtccttcctgcagaaaatggcggacaagatcctcagcacaggaaaatatctaaatgtggtcagagagtgtggccatgacgtcacctgcccggtggctaaagagatcatctacacgttaaaagagcgggcgtatgtggagcagatcgagaaggcgtttaactacgccagcaaggtgctgctggacttcctgatggaggagaaggagctggtggctcacctcaggtccatcaagcgctacttcctcatggaccagggcgacttcttcgtgcacttcatggacctcgcggaggaggagctccggaagccggtggaggacatcacgccccctcgcctggaagcgctcctggagctggcgctgcgcatgagcacggccaacactgaccccttcaaggacgacctcaagatcgacctgatgccccatgacctcatcactcagctcttgcgcgtcctggccatcgagaccaagcaggagaaggcgatggcgcacgccgaccccacggagctggcgctgagcggcctggaggccttctctttcgactacatcgtcaagtggcccctttcgctcatcatcaacaggaaagccctcactcgctaccagatgctcttcaggcacatgttctattgcaagcacgtggagcggcagctctgcagcgtctggatcagcaacaaaaccgccaagcagcactcgctgcactccgcccagtggtttgctggggctttcactctgcggcagcgaatgctcaacttcgtccagaatattcaatactacatgatggttcaaagtgatggaaccgacctggcacatcctggagaaanaacctgaaatccgcctccaacattgacgacgtcattggccaccacacaggcttcctggacacctgcctgaagaactgcatgctcaccaacacagagctgctgaaggtcttctccaagctcatgtctgtgtgcgtcatgttcaccaactgcatgcagaaatttacacagagcatgaaattagatggcgagctgggcgggcagacgctggagcacagcaccgtcctggggctgcccgcaggggccgaggagcgggcccggaaggagctcgccaggaagcacctggctgagcacgcagacactgtgcagctggtgtccggcttcgaggccaccatcaacaagtttgacaagaacttctcagcccacctgctggacctcctggcccggctgagcatctatagcaccagtgactgtgagcacggcatggccagcgtcatctccaggcttgacttcaatggtttctacacggagcgcctggagcgcctgtctgcagagaggagccagaaggccaccccccaagtgcctgtcctgcgggggcccccggctcctgcacccagggtcgcagtcaccgcacagtgagccctggctgtgacaggaaggaagggtgtggggtcagcagggactggtgcaaatgggtccagaattttcaaatcgaatgctctgtgttctgtctttgcagtttaaatataaagcaggaatgattgactcagctc

SEQ ID NO: 360257 - DNA, 288 bp, Homo Sapiens
gctgcagaagctctggttctacatccagccagccatgcgcaccatggacatcctggcctccctcgccacctcggtggacaaaggcgaatgtcttggggggtccacgctgagcctgctccacgacaggagcttcagctacacaggggacagccaggcgcaggagctatgcctgtacctaaccaaggcggccagtgctccctacttcgaggttctggagaagtggatctacaggggcatcatccacgacccatacagggctccccgggacacagggacacggagggacat

SEQ ID NO: 360258 - DNA, 701 bp, Homo Sapiens
  misc_feature (593)..(601): n is a, c, g, or t
  misc_feature (604)..(604): n is a, c, g, or t
  misc_feature (631)..(631): n is a, c, g, or t
  misc_feature (646)..(646): n is a, c, g, or t
  misc_feature (668)..(668): n is a, c, g, or t
ggtctaactctaaaattcacgttcctttattgtatcttatatcccccaagtatgtaaccaaaattaatagaatataatggtttcagtttttgaaatgctcttgtctaatttggataatttagtcatttaacactttcattatgtgtaaggaatgttttagttcaatggcaaaatagtgacatagttaattgctgcttcccaaagccagcttagtgatacagctaagtgatacagctgctccttgacttacagtgggattatgtcccgataaacccatcataagctgaaaataccgtaagttagaagcccgtttcctacacctaactaccaaacatcatagcttagcctagcctacattaaacatactcagaacacttaaacagtagcctgcagtcaggcaaaatcatctaaggcaaagcctgttttataataaactgttggatatctcaagtaatttattgaatattatactgaaataacggaatggttttgcaccattgtaaagtcaaaaaattttacattgaactattacaagtcagggactgtattgttactttttcaacaaaagtacaaataggtttaggcaaatttcnnnnnnnnnccnaataggatatatttctcttgttggggntattccggtatggcntggttatggtgtgtggtatggnctgttacgggcctttatggccggtggccctttt

SEQ ID NO: 360259 - DNA, 542 bp, Homo Sapiens
  misc_feature (26)..(26): n is a, c, g, or t
  misc_feature (38)..(38): n is a, c, g, or t
  misc_feature (51)..(51): n is a, c, g, or t
  misc_feature (57)..(57): n is a, c, g, or t
  misc_feature (63)..(63): n is a, c, g, or t
  misc_feature (91)..(91): n is a, c, g, or t
  misc_feature (116)..(116): n is a, c, g, or t
ggaattggactggaaggacacccagnacaacggccaanaagtgccaccccngccttncccttncagcactaaaattaaattccaattggangcctttcccagatacctgaatttgnactgaagacaccagacaacaccaaaaagtgccacccaggctttcccttccagcactatattaattcaaattggatgctttccagatatcctaggaccccactataaggccaagctgatagtgtttttttacaatggcaaaataattgccatttagacaatgataggtgtttagacaatggctcgaacaacttaagcacaagcagtaagagcaattacatcttgggatccacttaaaacttgtggtgtcaatactagaaactaacattggtgtgttacttattttaaagagcccacattacattcctgaaataagttattcctttttgaggattttcttttaaagccataagtgaaaccaattatttttagaactgcctactaacatttggagacacgctttagaaaaggatcgtgaaatttatcct

SEQ ID NO: 360260 - DNA, 362 bp, Homo Sapiens
gtggcagttactttaaccaggagccctagcataacctcaagactcttagaaactttagaacatggaaattgttaaaagctttgaattgcacatttagattgtggctattaggaatttttaaagttgtaattcctaaaataacaggtcacactaaccggtcttgtccatattcagggttgagtgtaaaaatgaaaggaatcacaaaactgaacttagacctgtggtttaaggatcaaggtgttcactagaagtcactgttactaatacttgatgacaatgtaaagaaacattaaggattatatttgattgttttcaaagacactggctggatgtggtggctcacacttgtaattcctagcact

SEQ ID NO: 360261 - DNA, 239 bp, Homo Sapiens
  misc_feature (74)..(74): n is a, c, g, or t
  misc_feature (87)..(87): n is a, c, g, or t
ctggttgggaagagacccaaggatctgggtgctggaatggctgcggagccgccgaagaagggggtgagccaggnagaagaagtcctnagtctcccagggttccctgtctgcctcagagctgctagaaccactgcctgagccacctgcttggttgtgggaaagatgtgggcagggctccagcctcaagagggaatcctgcagctcttgaacctctttctgcagcgtctccttctcagctc

SEQ ID NO: 360262 - DNA, 856 bp, Homo Sapiens
  misc_feature (840)..(840): n is a, c, g, or t
ctctgtttgtagaacttgatgaagaagaggtgaaagcagcaacaactgaacctactgaagtggaggaggtggtccccgcactggaacccacagaaacgctgctgagtgagaaggagataaacgcaagggaagagagccttgtggaagagctgtcccctgccagcgagaagaagcccgtgccgccgtctgagggcaagtctagactgtcccccgccggtgagatgaagcccatgccgctgtctgagggcaagtctatactgctgtttggaggggctgctgctgttgccatcctggcagtggccatcggggtagccctggctctgagaaagaaataggaggcttttcagaagagaaagacagaaggatgtaaggttggagttgtattggctggaatttgaacctccagcagctgtctggacatttgtggaacactctgggataattggggacttctgctcaacatggcagtggcatgttaggcatgttagggcttgaggtggggcattcacattcatctgactgtaaatcccaagggcctccgctcatgctaaattgagaatcttaggggtaaagcaccccctccaggaccgggtttctcagccttggcactagtgctgttctgaccattctctgtgttggggctgtcctgtgtgtggtgggctccacccactagatgccagtggaccccctcccagagatgacaaacgaaaatgtctctagacattggccaaatgtcccgtgtggaacatcccctattggaggacccactgctttagcgaggaggaggggtttaatttagggaaggattggggatagaaatttcccaggttgaggaggaanttaggctgtggggttt

SEQ ID NO: 360263 - DNA, 702 bp, Homo Sapiens
  misc_feature (557)..(557): n is a, c, g, or t
atgcaaataacagcaatgccagtgtcaacactgaccatatgatatagttatttcacttagagatgcttcctcaaagagcgtgcctttttcctccatcataaccgctttaggatctctgttttatccatgtatttcccacatagtagaagcattttccatttccatgaatattacaggctgagaaggagcacacatctggcactgataagcacactggcccaggcactcagccttctcatttcattaatctggttggtgaccgtttccatcgggcacacctgggaaatgtccatcggcatattgccatctcagttgctgcagtgcagtgaattaccccagagccaccagttcacatgcccaaagatgaactggcccatggagggacttgatcgccaagtgacttcctttctgtagttatcctctgctgtgacccttattttggacttctagcaagggcattcagtgtggattccaagaacaaaaccaattgtccaacctccattacaggggtcttctaggtattccccacacattatttgtgggcataagcaaacgcnataactatgaaaggctgagagtggagaattaagtcataaggaaatgatcaaacctagggaaaaataagtggctataaaacactgaaagatagtcacatccacatagcgtgtatcatgcaacagacccgtgctcttagagggaggt

SEQ ID NO: 360264 - DNA, 541 bp, Homo Sapiens
  misc_feature (25)..(25): n is a, c, g, or t
  misc_feature (490)..(490): n is a, c, g, or t
agggggcaccggctcaggaacatgncggcctcccggcatttcctcggtatttaactgtctcgctgtcttatccgagtccctaatgaaacgacttgtgtgacaatctgtctgtgccttacgaaagtgtctgtgcactttttatcctttttaaaagcaacttttaaaagtggatggggaggggggctagcatacgtggtagggttctagaaatctgtggtcatcgctgaaatcctttttgcatcatgttttttgatgttggagtgatgaagtgtacatcccccaccccacacaccactacctgtgtacagaccttttaaaacatgtcttctttttctgattcaatactgtgacctctccgatacagtctaatccttggggatctgtaatcaaggttttaaaacctgggaagtgggttgggaagggtttgcactggtcttgagtgttgtgcttttctgtgttgtgtgttttgatttttgtctttttatctgtntttatattgacataattttcctgtttaaaaaaatacaactttggcttgtta

SEQ ID NO: 360265 - DNA, 378 bp, Homo Sapiens
  misc_feature (27)..(27): n is a, c, g, or t
  misc_feature (38)..(38): n is a, c, g, or t
ggtaaggggttccctaagaaaacctgnggtccaacgcngaaaatcccttttgccatccatgttttttgaatgttggaagtgaatgaaagtgtaacatccccccacccccacacacccactacctgtgtaacagaccttttaaaacatgtccttcctttttcctgattcaatactgtgaccctctccgatacagtcctaatccttggggatctgtaatcaaggttttaaaacctgggaagtgggttgggaagggtttgcactggtcttgagtgttgtgcttttctgtgttgtgtgttttgatttttgtctttttatctgttttatattgacataattttcctgtttaaaaaaaatacaactttggcttgttaaaaaaaa

SEQ ID NO: 360266 - DNA, 444 bp, Homo Sapiens
  misc_feature (367)..(367): n is a, c, g, or t
  misc_feature (391)..(391): n is a, c, g, or t
  misc_feature (398)..(398): n is a, c, g, or t
  misc_feature (403)..(403): n is a, c, g, or t
cagccccagccaggcccctccgctgcccacaccctgggaggagaagcggcctcccttccaggctcatctgctcactgcccgcattctcctggcagagctgaggtctgagagatctggactccaacccaagggccctctcttgttattcaggggtgtccacagttaggaagggacctggggccttgtcccaccaccttcctaggccccgtgatcaccaccccctcaagcggggccccagccccctgaggcacccccttcacgtggacccagccctcggctgtttccaggcttcactgcccatggtgttgctcttctggggccacagcagccaggggttccagggggcgagggacggggggacacctgnaaaacacccctttttttcatggtntttgttngcccnttcatttcgggagatttccttgaaaaattggggttgttttt

SEQ ID NO: 360267 - DNA, 2251 bp, Homo Sapiens
  misc_feature (2012)..(2012): n is a, c, g, or t
  misc_feature (2196)..(2196): n is a, c, g, or t
actatgaacgtcgatgaaaagcaggctgtacggtccggaatttccgggatatcgtcgacccacgcgtccgcatggctgaagatttttctagtatattaataatgactaggaagatgaactttttttcagatcttgggcagctgataatttaaatctggatgggcagctgcactcaccaatagaccaaaagacatctttgatattcttataaatggaacttacacagaagaaatagggatatgataaccactaaagtttgttttcaaaatcaaactaattcttacagcttttttattagttagtctggaactagtgttaagtatctggcagagaacagttaatccctaaggtcttgacaaaacagaagaaaaacaagcctcctcgtcctagtcttttctagcaaagggataaaacttagatggcagcttgtactgtcagaatcccgtgtatccatttgttcttctgttggagagatgagacatttgacccttagctccagttttcttctgatgtttccatcttccagaatccctcaaaaaacattgtttgccaaatcctggtggcaaatacttgcactcagtatttcacacagctgccaacgctatcgagttcctgcactttgtgatttaaatccactctaaaccttccctctaagtgtagagggaagacccttacgtggagtttcctagtgggcttctcaacttttgatcctcagctctgtggttttaagaccacagtgtgacagttccctgccacacacccccttcctcctaccaacccacctttgagattcatatatagcctttaacactatggcaactttgtactttgcgtagcaggggcggggtggggggaaagaaactattatctgacacactggtgctattaattatttcaaatttatatttttgtgtgaatgttttgtgttttgtttatcatgattatagaataaggaatttatgtaaatatacttagtcctatttctagaatgacactctgttcactttgctcaatttttcctcttcactggcacaatgtatctgaatacctccttccctcccttctagaattctttggattgtactccaaagaattgtgccttgtgtttgcagcatctccattctctaaaattaatataattgctttcctccacacccagccactgtaaagaggtaacttggggtcctcttccattgcagtcctgatgatcctaacctgcagcacggtggttttacaatgttccagagcaggaacgccaggttgacaagctatggtaggattacgaaagtttgcaaaaaaagatcaatgattcttcagtgaggaccaacctgtaatgacaggaaaaaaaacactttaatccgcccgttggtcgagctaaaaaagaaaaattaaatcgtcttaccatcatgattatagttttaaagtgaaagaaaacatgccaattaggacaatagtgcaagggttgggaaaatcacaacaaaaataccagaccaactgtcatttatactagataaccacgacttgcatcctctcatcgctacaccatttctttataacataaaataaatatcaatttaatgtgtgggatataaacaataaaaaatatcctccaaacatagcaccactaaatataataccctgaaccgtcagtaaatagcaccttaatctcacacaaataattaagatttatggtatatataggccgccttgaccactcgcgtgatgatgaatattaaattagtagctagtgaatggtgaggagtcatataacaaagataactaattaaacttggaatgctgcgtgaagacaactaaccaagtaaatagaatattctcgaagtacaacgattgtatatctcaaagacaactaatttattacatcaaacttgacacctgagagacgaaagaaaacacgtccaatcgtagacgtaattgatcaataactaaagtatcgatggagtcagacatgcggagaatatattaataattaaaacaaactgtgaattagtgtnctctttctatcgtctctgtgtgagcgagggtataccgaccgctcgacgcctatgcgtactacagacaagataaatctcagaacagagcaacaatctattatccacttattcgatcgtcgcgcgcacgctgatgcaagcagagactcctactcaatacacagctaacctatttataaatacactncgacttcaaatatacacacgtacagagtacaaatatataataatgaacttcataa

SEQ ID NO: 360268 - DNA, 224 bp, Homo Sapiens
  misc_feature (68)..(68): n is a, c, g, or t
aaaaggaaaaacatgtcatgcagacctatgcgtaggctgtgtgtctaccctccacacaccttcatggnaaaattgaaaattatttttagactttcagaggcgaatcatgctgttgggcaaatggttctttcaaatccatggcaatcaaagaagtggatttatagcattttcccccacactggcagtagccctgctacaacaatgccaaacatctgcctcgtgcc

SEQ ID NO: 360269 - DNA, 1377 bp, Homo Sapiens
  misc_feature (33)..(33): n is a, c, g, or t
  misc_feature (96)..(96): n is a, c, g, or t
  misc_feature (103)..(103): n is a, c, g, or t
  misc_feature (1055)..(1065): n is a, c, g, or t
  misc_feature (1293)..(1293): n is a, c, g, or t
  misc_feature (1324)..(1324): n is a, c, g, or t
taagtaaaaaactggcgtgtctctaagtaacanaccagagagaatggagctaacacataagtacagctaaattctgagtttctgacatacgcaganatgaagntgtgcttggggccagaaagaggtctcctgtgtggtgaaaaaacatctctttcaaatttcttttgcctcaatcccatttgcacaggttccgagggagttgatggagggtcagacgagaggtggtgggagctcaggattttctattcccacaaagagctaagacttaggagtgctggccccagagatggtgcggccctctttctacttctgtttctgtgggctctgtctgcccacctgctgcacaaagcaaggcaggggaaagaccggatgggaacatggtggtgaatatcctctttttttcccttttcccccacttcctggatgtaggtgacagctaaacttcacccactaagctggaaaatctgggactccccatagctccaagtttaaggcaaactgatgtgtgtgtgcacagcaaagcccaatcaagcccatgagcttggaggagagtcctgtatccagagattccaaacagagagggaaatcttatttcctaaaggagttagaaaaggaaaggctctggcaaatgaaatgatctgtgattaaagcttgtagcctttctgtaagctgcagtgagaaggaaagcatcttttaatagaagaattaattagaggcgcagaacaagaaagccacgctcagggacctttaacttattacagcctgtaatcgctctcagtattgtaagccctagtcaagaggatggaattaggaggctgtgttcagttctgagaaaacaagaaacacacacgagtttgataataggaagcaagaaggaggagggatgaggatgacaaggagcttggttttggaatgccgattccaaggtgccttctcttttcaaagagacagtgtgggaggcatttctattaagaatttgttaatcaagcagttttcttggtagctttagcaacacattctctttgcccccaagttaagaaactggcctgaaatgnnnnnnnnnnnggacatgacatcagtgggggacaaaagagagctggctttgggctgccttgtttttcaggggcagtttccacgctgggaatcttcctggagggtggttcaattgactaaactttttcaagaaataaacttgaagccttaatgaagagacaaatacaagtgatttaaaaacaaaagaactctgcagcgatcagatcaaaggctgtaaaaaggtaacagtagctgcagccnaggcctgcctggagcacaggggaaggcttgnccactggctgtctctagcagcctaagaaggaattggacggggaacaggaacac

SEQ ID NO: 360270 - DNA, 376 bp, Homo Sapiens
aggagactgagaagacaaggctggaattccatagctcctatagatccagggtcgctcaccctctggtgtgcctcagagcagtcactctagtggacgtgcagggagaggaataccacatggtgtggcagcaaagcaaggagcccggcaccaccaggccgctccgtggtgctggtagcaggtgctgcatgtttataccaaggtactgtgaagcttccctgggaaggggtctttctcgacatctggtggccaagctgaaagtggattaccatttgggacatctcataactaaaagatgatgagccagcggggcctctgcacagctttctgcacgatggaccctgcaaaggtacagctgttgccctgcccctgggctttt

SEQ ID NO: 360271 - DNA, 396 bp, Homo Sapiens
cctctgcaccccagcaagtcatcagcggaagatttgggctggggagtgagcagctaaccagaggcggtacccctgcccggaagtgtgtcctggaccttggtttggttgggtccctcaggtgttgcccacacagaccgtaactacctggcaatcgagaagggtgccagatggacactgggggtgaaaacacagccacgcctggtggggaagcgggtggaggtgctcaggaggcaaccaggagagtgcagtgcagcactgcccgcaccaagcctgggctggggctcaacaggaagcgtggagatggcgcagatgcaccgcaggactcagagggatcacgctgggcttaaaaggcccagagcaaacagactcaaccgttaggaagcaggggaagtggcc

SEQ ID NO: 360272 - DNA, 451 bp, Homo Sapiens
  misc_feature (12)..(12): n is a, c, g, or t
  misc_feature (28)..(28): n is a, c, g, or t
  misc_feature (157)..(195): n is a, c, g, or t
tacttaaaaatnacaaaaattagcccgngcatggtggtgcatgccctgtaatccccaactacttgggaggctgaggcaggagaatccacccgaacccgggaggcagaggctgcgatgagcccaagaatcgtgccattgcactcccagccccggcaannnnnnnnnnnnnnnnnnnnnnnnnnnnnnnnnnnnnnnagatgctggcgaggttgcagagaaaaaggaatgcttacacactgttggtgaaagtggaaattagttcaaccgttgtggaaaacggtgtggttcttcctcaaagaccgaaaaacaaataccttctgacccagcagccccattactgggtagatacccaaaggaatataacttgttctgttataaagacacacatgtatatgttcattgcagcactattcacaatagcaaagacatggaatcaacctaaaagtccatc

SEQ ID NO: 360273 - DNA, 287 bp, Homo Sapiens
caagcacaagcctcaagaagaccccaaacaggaaacaaagtaagagtcagacactggagaaatcttaaggatttaagacgttcttgttacactccaccaacctcacgagtttctaacacccaggaagatgaggtctaaaaactggatgaaaaaggacaccctgagaaaaggtcctagctggagtcagtcccctctgtgacctctctcctcaggcctctagaggacagatggccaggcctgtgcacacaccagcccaccctgagagacccctctgggaccaaccacct

SEQ ID NO: 360274 - DNA, 902 bp, Homo Sapiens
  misc_feature (775)..(784): n is a, c, g, or t
ggagttgagtctacatgaaggggatctgcgcggggggaggtcgagtatggtggagttcaggacaaactgggtgcaagtaacaggtgtaggtcacgcagatgtcatcagtcacaccagaaggcagtagttcaggagctactttcttgctgaactgaagtgtcctgttggtgaatcttgtaggtgctggctgaagaggtttccaactgagccttccctgactctacactctcctccaattctgctgtttcttgctgtagacggctcagctcttctctagcttttgccaattcttcttcataagtggagatctgcgattcctgactagttaattcagctttcagagaagagatcagttgggcctcctcagcacatttctttctgacttcctgtgagttgctcctccagctgggctttctgctcatccagttcatcaaggagttcctgtacctgctgtttctgggcctgtagtttttgcagattagtattctccctttgaacttcatcttgaagatcctgaacctcacttgtcctctgtttaatagtatcttccttctccttaaggtcctgttccacattattcttttccctagaagaccagcaaacaatgcaagaatattttagaacatcagctacagctggtatggttatccatcctcctaatcctgaatcgctttttaaatacatagtgaaacattcaatttttaaatgaagggcagatttttctaccctctttcaattatttatgaaataaaaatcaatataagctccatttgtnnnnnnnnnnttgcgttgtgcagcacgtccgctggctcgttcagagcggaatgtgcgacggctccgggccccggatgttggcccgtgatcgcagtaactttgcgtataatgtatgcaataccgagtga

SEQ ID NO: 360275 - DNA, 1108 bp, Homo Sapiens
aatcaccagtgctatgatgaccagttttcttctcatagatctggattggtttccagggatggtgcagaggcgtgcattgagttaccctgtttccacttcagcaagttaagacgtgcctcaatcacggtgataagtggccatttgggccaagatgccagacatctcagtgcctttattctcgcgatggtccttccgtctggggcactgcccagtgcttgctgctcctgtggccggggccatagaaggtttgctccctggtgcggtcgctcacaaccaaaacaaggactaggggagcccagaagaggacatcgccaagtccagcagggagcaaaagggtcaggagacaccaaaaggaagtgtgagatgctctgtctccacctcaaagctggagagcaacggggagaccttccaggtagtgggaacggcacgggcaaaggcgcagaggtaggagtctgcgtggacaaatcttgatcaaaacgaaaggttacttagccacagcagggacactgcgtcacgatagcagcactgagaaggctatagaacttgtcagagcaaagatctcaaggacagaggtcacaaagtatagcccttaatggccaagaggctgccatagcaagttacatttttatgatgatgaatgagtggaagggcttggcagtctctactcctcgttgaggagctttgggggggccaggtgccgaaaaagaccgacgggcttgcggggaccctcacatcgagcgtttctctgggcttcctgtctatgtgtagctggaccatccccacagttgtgtaggggaatgagtagaggcattcgcccagcacagcaagaggtccacttgagaaggcaagaaatcccgaagccgtgttcggctttggcagtgagacccagcatccacggacgcctctcttgaatgtgcagttagttcccctaaacggacttccggcgtttcatcagcctctggtggtcggtaaagctgtgtaacccaggagagatggagctaataggcgatgggaagaggctgttttttaatgtgcttggtgagatctcctcgatcttgtaagagatggagtggaagtagtggggggcaagcttggcgctgaaggagtt

SEQ ID NO: 360276 - DNA, 1014 bp, Homo Sapiens
ggtttcagtccccaggggtcccagcccgtgacttcccctaaggggccccctcggccctccaagtcccagttcctcaaaagaggagcccgctggcacctgactcgcggtagctgtgctcgctgcgggtgtcaccgttcatcccagccacggctgctcgccccaggtgacagtgtggcagctgaagtctcccgggctgccagggctcacttccaagcttacagaactcgtgtcactcattgtgtcagctcctgtgccatccacctgggtgtcaatggcctccacaagcccccgccatttccactctgtctccttcatctcaggcacatagaagtctccctgccgtgccagtgggcacatgaaatggatctggtcttcctggtagatctccagccgaggataggcacacagcttccgctccttgatgtaggtgtccaaggcaggatggacacggcgggtagccagccagatggacagaatggtggtgtaggggaaggtggctgtcaccacatggctgggtgccgggaaggagaacaccttgaagccaaatttctggtagaggtcgatgagctcaggggagggcgattcctcaccttcactcaggatgctgcccacggcacatcggcacttatcagggggcaccatgtgggggttgtcatagtagacagcgatggagcggagcttgggagagatgctgcagctctcagtgaaaagccgcccagtctcaccatagagccccatgtggaacttgtaggccacagtgacgttgcggatggggggtgacccagcactcacttccaccccagccagtagccctgagtacccggcaaaggccagcagcgtcagcagcagtaagagagtcaggcccccaatcaggcccagtagtagcaggtccgacatggctctggatccccaacactgcacctcaaggcagctcagcagccgcccgctgcggacgccgatccgcgcaggcggctcagggttcggttacggagcctgcgcgcgcccgccgcgcac

SEQ ID NO: 360277 - DNA, 1312 bp, Homo Sapiens
  misc_feature (1021)..(1030): n is a, c, g, or t
  misc_feature (1044)..(1044): n is a, c, g, or t
gcggatcggcgtccgcagcgggcggctgctgaggtgccccctgataagtgccgatgtgccgtgggcagcatcctgagtgaaggtgaggaatcgccctcccctgagctcatcgacctctaccagaaatttggcttcaaggtgttctccttcccggcacccagccatgtggtgacagccaccttcccctacaccaccattctgtccatctggctggctacccgccgtgtccatcctgccttggacacctacatcaaggagcggaagctgtgtgcctatcctcggctggagatctaccaggaagaccagatccatttcatgtgcccactggcacggcagggagacttctatgtgcctgagatgaaggagacagagtggaaatggcgggggcttgtggaggccattgacacccaggtggatggcacaggagctgacacaatgagtgacacgagttctgtaagcttggaagtgagccctggcagccggggagacttcagctgccacactgtcacctggggcgagcagccgtggctgggatgacggtgacacccgcagcgagcacagctacagcgagtcaggtgccagcggctcctcttttgaggagctggacttggagggcgaggggcccttaggggagtcacggctggaccctgggactgagcccctggggactaccaagtggctctgggagcccactgcccctgagaagggcaaggagtaacccatggcctgcaccctcctgcagtgcagttgctgaggaactgagcagactctccagcagactctccagccctcttcctccttcctctgggggaggaggggttcctgagggacctgacttcccctgctccaggcctcttgctaagccttctcctcactgccctttaggctcccagggccagaggagccagggactattttctgcaccagcccccagggctgccgcccctgttgtgtctttttttcagactcacagtggagcttccaggacccagaataaagccaatgatttacttgtttcacnnnnnnnnnnacccacctaaaaanaaccctgttcggccgccctccggccctcgaaaaaactttcctaaaccatttcggtttggccgcccgggccccactaggttaagtggaacatgggttcttaacctgtttcccaaggaagattccgggccatgaactaagtggcttggaattcctcccccaataaaaaaaccgcccgggcgggaaacccgaagggttcttgaaacaaattccagaaggggaagtcttgaaggccccttcaccggggaactcttcaacccgggagttccca

SEQ ID NO: 360278 - DNA, 749 bp, Homo Sapiens
  misc_feature (220)..(220): n is a, c, g, or t
tgtctccactgttactgtggtgaagaagctgtagttggaggtgttaagctcaaccgtgctcacattgaggtaggccgaggcgttggagttgcctgcaacattggtcaccatgcatgtgtacaccccagtgtctgaaagcagcacgtgggaaaagttcaaggtgccgtcgttgaggacagagatccttgggtggcgggaggcgtggctgagcactgtcccnattgggcagcaacccacttcacggaggacatagggggagtccgacacttaagttccgccatccgaccctcagaaatgttgaggtctcgaggtgcgtccatgatgaagggggcagagcactggaaggaggcctggtccacctccacgaggtagcggcctcgcatgtgcatgggagcatgacagcggccacagcaggtggaattggtgggtatatactctcgaagccaccaggctagccacagaatgtcacaatcacagttccaagggttgtggtgtagatgcaactccaccaggtacctcagcggggtaaagaggtcatggggcaaagaagagaggttattgtgggccagttgagttcacaagtgaatgccagcccgtcaaaagcattccgctcaatcaggctgacctgtgagttcatgacccagagcttcttgagggagctcaggccatggaaggagccaggcctgatctcagggaagtggttccctgacatctccagctcctgccaagtccaccaggggggtgagatt

SEQ ID NO: 360279 - DNA, 609 bp, Homo Sapiens
aacaacttagtccaagaacatacctgaattctttgcatttccttgccttagttgcttttgtagggtggacagcaggactgcatgagaatagctgtgcttctggaccctatggtgaaagctctagtgaactgcaattaggcccagggtcccggaggaagaaggggagagaaaaaggggggtagttttccaaaagataagtaggggacaaaaaaagtccacggggcctatgagcggtgagactcctgccctgattgtggcaaagcacctggagatgatagaacttcctagggaaaaggctgcatggagtccccagggatgctgggccctggtcaccaaggctccctgggaaggtctcttgtacctggggcacacagaccaacactttctgaatttgcaagcttaagagcatgtatgagcagaacctgtgcagaccaaggcttagagggctcacctcaatgttttgcactgtgtgagaccccaggaccttttcgtgattctggagaggggaacaaaccataataacaacaaaccaggtagcaggatagagactcattctcatctattttggttaaaagaaaataaatgtattttttccacacctgaaaaaaa

SEQ ID NO: 360280 - DNA, 318 bp, Homo Sapiens
agcctgcagcgcgtactctgaagaacaagagaaaggcttcaagggaaaaattgaaaaagacagggggacactgtttaaaagcaaaacccaaaccaccttttctgtcttgttgctgagaatgaattcagattgggataaacaaccttttctttctttttaaatatctagatattttaaatatatctacttatattccactgtcctcaactgggtagaaatattaaaaaaattatcaatataaaatgctggttcttgcttcgatattatcattttgaaggaaaaccacaccaacacccttacccattctaatgactttct

SEQ ID NO: 360281 - DNA, 974 bp, Homo Sapiens
aaaaaactagtgctgtgctgctcgacgtgagggtgaatgattgacttgtgacctgccaggttgcccgatgccctgttgggtcaccggctggacctgctgcagcctgcagagccacagtcagcctgcccacatgccaccgagcaaacgcatcttgcttttcacatctctcctcctacagccttaatggctgcttgctgccatatgtgacaaatcaccaccaccagtgttaagtgcttctggattcatgggtgagttccctgggcagcccccaggaaggccttccagatctggctccagggtcaccacctgtcacagcaatacctgggaccatgctctcctgggactgtgaggctccttttgacgtacttttgacatcaggcaggtttgggaagaaacaaagccatgcctgctcctgcctctctcccaacatgtttccagcaagtagatgcccctgtgtgtgttttcccttgccttgtttcctgccttatatcttgtatttcgacttattacagagttgagggttcttgcttaatttagatcaagtataaaatttgtatgacttcaagtctcattttatctgaaaggtttttttctcatttaatctgatgtggcattttcgtcatctgaagcatgagtgacaagttgggaatgatgtggtgatttagaatgcagtattggccaagtccaagttgtcaacttaagcgtctgtttaccaaagaccgggaacaggggcccaaacatgtccagtcctcttcttccctctgctggaacctttggggacactcaagggtacagtttgacactgatctggtccatgaggctgcccagagaaagcactgcttctgtatgtctcttgtggtattggaacaataaacccgtacaacctgccctaaaagaaattctacaagggcaagaaaaacaaaacccctgaacctgcgagactaaaaaaacgcgtgccaatgcgccgacggctc

SEQ ID NO: 360282 - DNA, 617 bp, Homo Sapiens
  misc_feature (129)..(129): n is a, c, g, or t
  misc_feature (171)..(171): n is a, c, g, or t
  misc_feature (284)..(284): n is a, c, g, or t
  misc_feature (297)..(297): n is a, c, g, or t
  misc_feature (575)..(575): n is a, c, g, or t
gctggtgagataataaattatggccatgggaaacattgtatatttagtgtgtgtattttgataatgattgatcttaaatctgtatacagaatatcattgatataatactctttaggcaggagcactctngccttcccccaaaatttacactgctaaagccctctgtcactnggcgacccttctggtcttgctggaggggtttcctgggtataacccattgggctgcccaaggccagccagcctgagctctcctgcaagacagagcctgatgtggcacggagtgngagttgcgggggntggggggactgcctgactcccagagggacttgaaactgaagcaagaaggttgcattctccaccaagggagttaacctacctgaactaagtagaaatgccagtcttccactaccccctccctgccatcttttcttctgctactttggggagttgatggccaggaaagaagccagcacagggttaaagtaactcctggcattgcccaccagggggctggtgcacctgcttgacctcagggtcacagttgagtcatttgccagttgacggagcaagttttnaccttggttctgtttgctggaagcaaatttgggaatttttct

SEQ ID NO: 360283 - DNA, 422 bp, Homo Sapiens
  misc_feature (58)..(58): n is a, c, g, or t
aaaaagtattttgtaactgaggaattttgataatttggggattttgttttcccttggnctaatggagagaaagacattttggttttctttttcccattttgggttcccttttgtttcaggcacggataacagcaaatggaattctgtatttattattatttaagtgtagcgcagatgtgtgtgcttgggcgtgtttctcgtgtcgcgtttgcgtgtcggctcttgcggtggagtcctgttgctgtgagggagtgctggccgcaggcagcctcgagtcaccgccaggctcacaggctgtgccacccgtccctccgacagctccaatactgtgaccctccttcctcaggaagcgcgttgaacccacaagactccgtggtgtgtttgcagggtgatttcctaataaaagtccactctgactgtga

SEQ ID NO: 360284 - DNA, 376 bp, Homo Sapiens
  misc_feature (52)..(52): n is a, c, g, or t
  misc_feature (182)..(268): n is a, c, g, or t
  misc_feature (304)..(304): n is a, c, g, or t
  misc_feature (354)..(354): n is a, c, g, or t
agacacagtaaatataatacattcagcaattacaatctaaaatatgacaganttgacatcaaacatggtagttatatcaaaactagatcggcttaatttgcctattaaaaaagattattttcggattggctcgtatagcaaaaactcaactgtgtgctgcacacaagatacacaccgaaaannnnnnnnnnnnnnnnnnnnnnnnnnnnnnnnnnnnnnnnnnnnnnnnnnnnnnnnnnnnnnnnnnnnnnnnnnnnnnnnnnnnnnncgatacagaagtagagacttcaagccccaaacagancacaaaagaaatatagagctataaaatggcccttgggcatatgaaaggantagcccaattattcataggata

SEQ ID NO: 360285 - DNA, 801 bp, Homo Sapiens
caacgttcagtgcgcagggagtgaaattcaatgcccaccgctaggctcctcgctgcctctcactcaagaggcccaaactcagacggcgtcagggacccggacccagcagccgtttcacgccaatagatagggcgcatgcgcagaaatcctcctcggctctctagcgtgagctttcccaaggggccacgcccagcttgccttctgattggtccagctggtgggttgtcttccgccatctttgatcagggcactaaggatgctccccacggccttcacagtgacggcggagaccctgccccgccagctgctcagtacgtgccgcgtagcccgtgcgagccaagtgtgagtccgggcgaacgcctgcggagctaacactgggcccaaaatgagagggaggcggaggagcagcgatcacgtggttttagggactgtctaataattcccacggccagcattgccggtgtttcagggggtgggaaccgctgcgttccccatcaacttttctcccacccaccaccctccccaacctacaagcccagctcagcttgaggtaactgctgaccggactgtcctatacagccctacaagacagaggcgcctagggctgaaagcgggggcctccgtagggagccagcgggggcctcaatagttactcattttctctacctttgatgaaaataagagctaattcttaataaggctaccgggtatcacgcaaaaaccctgtgcttactattacactttgggttgttgcaaagattaaaggaaataagccgtgcaaagcgcttaagagcttggtat

SEQ ID NO: 360286 - DNA, 1104 bp, Homo Sapiens
  misc_feature (14)..(14): n is a, c, g, or t
  misc_feature (21)..(21): n is a, c, g, or t
  misc_feature (52)..(52): n is a, c, g, or t
  misc_feature (62)..(62): n is a, c, g, or t
  misc_feature (82)..(82): n is a, c, g, or t
  misc_feature (480)..(491): n is a, c, g, or t
cccttggaaaaaanttgaaanacccaatggcttgtgcaaactctcccacccngaactgaacnggaacctttcttggcccaancctaggtctttcccccggggagaaacaacagggccttgttaagaaaaaacaattactggggacgtcagtcctactttaaggaagagggaaaaagaacaagaatcctagggttttatgtttcctggggcagaagggttagagacttgtggatcctgcagctgctctcttcctgccctctctcccctggtcatgggtgggccacatcaaaagcaggcaccgctcagcactcagcatccctcattagccatttaaaggctgtcgcaggtagccggtcccccgcgactgttaatctaatccctcacaatcaccaaagatcacgactctcttctttctggggtattaggaataattacaagctactatcaacatatactggaagtgctgttatagtgaccagnnnnnnnnnnnngcaaagaaagaaataactggaaattgtgctctttattcagtagctttcagtaaggctttctcaaatggagaaacaagcatctcttcttggaatctgccattgtttcctccaactttctcctgaattctgattcacatgacctttggggaggtgactgactccctttattttcacacttgccaagacagacagaaagctcatctttgatgctccctcgagtcagcaagtccttagagaataaacaaaacctcttgcctgcaagctgtgacacatttaacatacaccaatttgcattgtttcatttacagacagcggacaccaaaagagagactttatcacaactgcctcttgggacttgtgttcaaaaaggagctcccagttcctagtgcaattcatgggtgaaatccagaccctctcagtagggagcattcactccatcttgtttcagacaaaatagatgggagggcttgtctggtttacttttcctctggctttagagaaacctgaagccagggaggaatgtcactcaacataacctagatagtgggtggaagagtcctggctcctgggctttctccacgctggtagtaccgtccacactttgaggtctttc

SEQ ID NO: 360287 - DNA, 467 bp, Homo Sapiens
  misc_feature (46)..(46): n is a, c, g, or t
  misc_feature (55)..(55): n is a, c, g, or t
cctggacctgcggtccatttacgggaaaaggcaaatattcccctcnaacatcggnaacaatgcctcaagtcttttcaagcccacgtctgagcagtcaaaggcaaattagaattaacaagctgagccaataaatgaattggtaaaagggatgctagaaattcaactgaagaaaaaaagcaagtcaagtacgtattcagcattaaagatgaatctcagaagtcatggttcaatgttgacactgtgaggataacaactagagacagcttcatcttactaaagaatttatggtcaagtatatttggacctattatcctcggcaagccaagatgcaaacattttttagctatatttctttagtatacccactgctgtaattttatattaggatactaacttgaaacatggctgcagcctctacttcttcaaaaacatccccccaaaataccagatttaaatatccaaaaaga

SEQ ID NO: 360288 - DNA, 464 bp, Homo Sapiens
  misc_feature (395)..(395): n is a, c, g, or t
  misc_feature (407)..(407): n is a, c, g, or t
cctcgggcaggaacttcctagagaactacggtgaagctttagctgctgagcagaccataaagcacctaatggaggcagagaaggtaaaaggattctgccagctggtggtggccgccaagctgagagagggcatttcccacctcatccagtcatgtggccttgggggcatgaagcacaacacggtggtgatgggctggcctaatggctggcgtcaaagcgaagatgcccgcgcttgggaagacttttattgggcacagttcgagtgacaactgctgcccatcttgcactgctggtggctaaaaacatctccttctttcccagcaatgtgggagcaattttctgaggggcaacattgatgtgtggtggattgtgcatgatgggggggatgcttatgntactacccattnctactgaaaacagcacaaggtgtggcgaaagtgcagcatacggttctttcacagtag

SEQ ID NO: 360289 - DNA, 1441 bp, Homo Sapiens
  misc_feature (1360)..(1360): n is a, c, g, or t
  misc_feature (1402)..(1402): n is a, c, g, or t
  misc_feature (1425)..(1425): n is a, c, g, or t
gggtacaaaccactgccacagatcagcaaagtagcaaatcacatggacggtttccaaaggcattttgattcccaagtaattatttatggaaaacaagttataatcaatctgattaaccagaagggctcggagaagccacttgagcagacatttgcaacaatggtgtcttccttgggaagtggaatgatgagatacattgcctttgacttccataaggaatgtaaaaatatgagatgggatcgactaagtattttattggatcaggtagcagaaatgcaagatgaattaagttattttctagtggactctgctggccaggtggtggcaaaccaggaaggcgtgttccgaagcaattgcatggattgtctagatagaaccaatgtgatccagagtttgttagctcgtcgttcacttcaggcccaacttcagagactaggagttttgcatgtgggacaaaagcttgaagaacaagatgaatttgagaagattttcaaaaatgcctgggctgacaacgcaaatgcttgtgccaagcaatatgcgggaactggtgccttgaagactgactttaccagaactggaaagagaactcatttgggacttataatggatggctggaactcaatgatacgatattataagaacaacttttccgatggatttagacaagattccatagacttatttcttggaaactattcagtggatgaattagaatctcatagtcctttaagtgttccaagggactggaaattcctggctttgcctattatcatggttgttgccttttcaatgtgcattatctgtttgcttatggctggtgacacttggacagaaacactggcctatgtgctcttctggggagttgcaagcattggaacattttttatcattctttacaatggcaaagattttgtcgatgctcccagactggtccagaaagaaaagatagactgaatttgtatttgtggaaagcggcttggcttggaagattccattgtgcagaactggagtctttactgacccgctttccacatcagcccaaggtctttttaatgcctttatccaaaagcacatcttgtgctccatgcaggatgatgacagaattgatctgatgttactgccttgatggtctctttactattgggacagttaggatttataatttgaaggctattctgtaattaaaatataacctggaattcagcttgcaggaatgggaaggctggaatctgttcattgtattcttattggattgtcaatttaattagctgttgcagaataagtaatatattttaaaaacctagctcctttcattatttaaaacaggcaaaattatttttgtaggctccagtttcattantgtcattgtagggaggccggtcactattaggcagggcatacntttcccacacatctttgggggcnttttccttaaaagttc

SEQ ID NO: 360290 - DNA, 556 bp, Homo Sapiens
  misc_feature (400)..(400): n is a, c, g, or t
  misc_feature (495)..(495): n is a, c, g, or t
  misc_feature (544)..(544): n is a, c, g, or t
agatttaatcttccgaaatgcctgaccccagaacttcacaacgatcaccgctagctccagggcgcgtcacagatgacgagctctcccgcgcagcgctcaggaagccgccatcccgtatcgctgagaatctactctgtgccaggcacatgctcggcggaaggcctgggactcaagtacctgtctttggactagacacaatttttgataggaaaaattctaaaatctaaagcagaaacacataactcctttattaaattaaatacggttgctctcagtggttttcaagctgggatgtgctacctgactgtatgctcagaggcccctgaactctccaggagagaatttgaatttatacttatttgtcacagatcataatggaaataaagacactcatttttcnttgtgttctggggcaggtgcttgaggagaccagtcataattttcaacgttggagcgatgccactatttaaacgtttacacacccaaagtgaaacnttgtggcttgtgcagttgaggtggttaaatgtgggccctttccccccgnccacaggaactt

SEQ ID NO: 360291 - DNA, 477 bp, Homo Sapiens
tgtgagttggatcttgcaggatgaattagcattttgtagtcaaggaagagaagggagaaattcatttctggccaagggaccaagctgagcaaagccactggaagcacatgtgtgttgggaatgaaagcataggctggagagggtgacaggttatggtggctgtggagggcgtggaggagatacggccagaagggacccatagagttgggggtgggaggctaagatggaaacctcatagttttatttgaaagatgaaactacggccaaaagaaaggaaatggactggatggggcaacaagacagcagggagaccattcagggagctgctaaagtggtccaggtaagagataatgatgttgactttgagagacatttaggaggcatacgtgcagtaagctggatctggagaataatgtaaagatgggacgccttgaaaggtgttcactcagattttctggcttaattgaattgagttat

SEQ ID NO: 360292 - DNA, 463 bp, Homo Sapiens
  misc_feature (110)..(110): n is a, c, g, or t
  misc_feature (148)..(157): n is a, c, g, or t
ggaataggcacgatctcaagaaaatgagtttaccttcctctttgccatgtaagtctagctaaatatttttcttttgtcaaacttcgtatttgcgggaaattaaccaacantgaaatgcatgatttcccctaagaaattttgccttttnnnnnnnnnntttcctgcagagctggttctaccataacagcagctgtggattatttaggactcatcccttttttcttgtcattcactgttccatgagcactactatttattaggtggagaatcgcctgattttctgaagtttggaagagaggacgcctaatgcaaatttggcctggttatagaacattcactttttggtattctcatcgttgttaacatgaatggttgactgaatgtagagctggctgtgttgttctgcacactgactggaatttgtagagttcaggtagttctaaaataaatggtttcactcagc

SEQ ID NO: 360293 - DNA, 2088 bp, Homo Sapiens
  misc_feature (868)..(868): n is a, c, g, or t
ggaattcccgggatcagagagacgcagctaggcctgcacggctgtggagagatcctgccacgggccttgttcaccatgtcggtgctggatgcgctttgggaggatcgggatgtccgtttcgacctgtccgcgcagcaaatgaaaacaagacctggagaagtccttattgattgtttagattccattgaagacaccaaaggaaataatggagatagaggtagactcttggtaacaaatttaagaattctctggcactctttggcattatcaagagtcaatgtttctgtcggttacaattgcatattgaatattacaacaaggactgctaactctaaattacgaggccaaactgaagctctctatatactaacaaaatgtaacagtactcgttttgaatttatatttacaaatttggttcctggaagccctagactttttacttctgtgatggcagtacacagagcttatgaaacttctaaaatgtatcgtgattttaaattaagaagtgcactaattcagaacaagcaactaagactgttgccacaagaacatgtatatgataaaataaatggagtttggaatttatccagtgatcagggcaatttaggaaccttttttattaccaatgtgagaattgtgtggcatgcaaatatgaatgatagttttaatgtcagtataccatatctgcaaattcgttcaataaagattagagattcaaaatttggtttagctcttgtcatagaaagctctcagcagagtggtggatatgttcttggctttaaaatagatcctgtggaaaaactacaagaatcagttaaggaaatcaattcacttcacaaagtctattctgccagtcccatatttggangtcgattatgagatggaagaaaagccccagccgctcgaagctctgacagtcgaacaaattcaagatgatgtagaaatagactctgatggtcacacggatgcttttgtggcttattttgctgatggcaataagcaacaagatcgtgaacctgtattttcagaagaactggggcttgcaatagagaaattgaaggatggattcaccctacagggactttgggaagtaatgagttgattgaccttgagttgagatggatttctattaaagatatctctagtttaaagatactagtcacctgccataagtcatggaatagtttttatatttacagcttttatatttaaaacttgtaagagtttttttaatgattgaggaaaaagtcatttagaaaacttcagttttcggccagcgcgtcgagggaggggccagcgacacatggcctagtaaccgtccggccgcggcgctggcttaagccatggctgagggtagctggattcctcaggcccgggcgctcctacagcagtgcctgcacgcccggctgcaaattcgcccagccgatggggacgtcgcggcccagtgggtggaggtccaaagaggactggtgatctacgtgtgctttttcaagggagctgataaagaacttcttcccaaaatggttaatacactgttaaatgtgaaattaagtgagacagaaaatggcaagcatgtctctatattggatctacctggcaacattcttattatccctcaagctacccttggaggaagactaaaaggaagaaacatgcaatatcactctaactctggaaaagaagaagggtttgaactttactctcaatttgtgactctatgtgaaaaagaagtagctgctaatagcaagtgtgctgaagctagggttgtagtggaacatggcacttatgggaacaggcaggtgttaaagctggacaccaacggaccattcacacacttaattgagttttgaaaactgaaaaactagtttctatagctgttttctggtatgaaatgatctaaagtataattagattttcttccccttaatcttgaatatacttaatcttccagcatttttagacaggaaaatcttggggttccatattattactcttgcacctgctaattggatgactttgccaagtcacctaaaatcgggatcctccagtcaccttttgtcctacattctctaccttctacttgaaaat

SEQ ID NO: 360294 - DNA, 846 bp, Homo Sapiens
agcgggttgtgccccgcctcgtctgccccgccagcgcgtcgagggaggggccagcgacacatggcctagtaactgtccggccgcggcgtggcttaagccatggctgagggtagccggattcctcaggcccgggcgctcctacagcagtgcctgcacgcccggctgcaaattcgcccagccgatggggacgtcgcggcccagtgggtggaggtaacgtcagcccggcagctctcgttatcctccggcgtgcggggcggttttttccgcgttgtctcggtgactcgtccgctctgtgtctccctctgagaccggcggtccggccgcggggataccgggtcagcttgaagctggccgcggtggcctgcctggctgcgcttgtcttttcggtccagcatcaccgttccccagcgccagttgtagcacccgagaggaagagcgtgtctcccttcttggggggaccacaggtccaaagaggactggtgatctacgtgtgctttttcaagggagctgataaagaacttcttcccaaaatggttaatacactgttaaatgtgaaattaagtgagacagaaaatggcaagcatgttctctatattggatctacctgggcaacattcttatttatccctcaagctacccttggagggaagactaaaaggaagaaacatgcaatatcactctaactctggaagaaggggtttgaactttactctcaatttgggactcctatgtgaaaacaagaagtagctgctaaatagcaagtgttgctgaaggctaggggttgtattgggaaccatggcgccttattgggaaccggcccggtgtttaaaggcctggaacacccca

SEQ ID NO: 360295 - DNA, 394 bp, Homo Sapiens
tggcacgaggggaaggggttattctcctcattttataaatgaggcctttgagacccagagaggctatataacttgcccagaccactccactaaggggttgttggggcacttcatatttctctgcttctatcagtaaccagcctttctttttgttggtctttccactctgactcctccagggcctcctcttgagcctgtttattgtcttagcctgaggccccaccacagtggcatcagagggttaagagcgttttcagattgagggcaagtcttttccatacctaaataacaggggaaaagtactcctccttaaagttaggagtaacgaaatgatggatgcaaagtgctgactaccacatgtggcataaatgctcattaactgtgatgatgacgt

SEQ ID NO: 360296 - DNA, 1579 bp, Homo Sapiens
  misc_feature (1307)..(1307): n is a, c, g, or t
tggtacggtccggacgtactgggatatcgtcgaccgcgcgtcggagagtcgctatggcggcggtggattcggatgtcgaatgcgctgccgcgtggggggttccgctgctgcctctgccacgttactacagccaaccgacccagccttgatgcccacttgggaggcagaaagcaccggcacctggtagaactacgagctgcgagaaaggcccaggacttcgaagtgtgtttgtcagtggctttcccagggatgtggattctgctcagctctctgagtacttcctagcatttggacctgtggccagtgttgtcatggacaaggacaagggagtgtttgccattgtggagatgggggacgtgggtgctcgagaggctgtcttgtcacagtcccagcacagcctgggaggacatcgcctgcgtgtccgcccacgggagcagaaggagttccagagcccggcctccaaatcccccaaaggagcggcccccgacagtcaccagctggccaaagcgctagctgaggctgcagacgtgggggcacaaatgataaagcttgtggggctgagggagttgtccgaggccgagcggcagcttcgcagcctagtggtggccctgatgcaggaggtcttcacagagttcttccctggctgtgtggtccacccttttggctcttccataaatagcttcgatgtccatggctgtgatcttgacctcttcttggatctgggtgacttggaagagccccagccagtcccaaaggctccagaatctccatcgctggactcggccctggcttccccactggaccctcaagccctggcctgcaccccagcttcccctccagattcacaacctcctgcttctccccaggattctgaagccctggactttgaaaccccttcctcctccctggcgccccaaactccggactctgccttggcctccgagacccttgcttctccccagtctctgcctccagcttcaccactgctagaggacagggaagagggggacctggggaaggcctcggaactagcagagaccccaaaggaggagaaagcagagggggcagcaatgctggagctggtgggatccattctccggggctgtgtccctggggtgtaccgagtccaaactgtgccctctgcccggcgccctgtggtcaagttctgtcatcggccttcaggtcttcatggagatgtatccctcagtaaccggttggccttatataattcacgtttcctgaatctctgctctgagatggatggtcgagtccggccccttgtgtataccttacgctgctgggctcancataatgggctgtcaggaggtggcccccttctcaataactacgccttgacgttgttagtgatctacttccttcagaccagagaccctccagtacttcctactgtggcccagcttacccagagagcaggtgaaggggaacaggtagaagttgatggctgggactgtagcttccctaaggatgcctcaagattggagcccagcaccaacgtggagcctctcagttcccctgctggcccagttcttctcctgcgtatcttgcttggatctttctg

SEQ ID NO: 360297 - DNA, 902 bp, Homo Sapiens
  misc_feature (838)..(838): n is a, c, g, or t
gctgcttttgcatttagggttgatcaaagcagtctgtcttttttttgttgttttggtagagacagggtctcgccatgtttacccaggctggtcttgaagtcctgagctcaagcaatcctcccaccttggccctcctcaaagtgctgagattacaggcgggagccaccgcacctagcatctttgctatttgaaacatcaaatgaaatcatactaatgtgagagctgaattccattgaaaggaaaagctcattaaataacaatcgccattgtctggccatggggagactactagaattaatgagtgtttatagttcttgccctctcatcctcaaacatcttagataaaatcccaagagactgctgctgaaagcgtcctgctgtaaattacaagaaaatcagcccagcttcaagcagaaaatgccaaggaccagggctggggagcagatttcacgtaagaacatccagacactaagaaaacaccaaggaatactgtataagagacattgcagtcacgttgtgggagctgccactgagatgcagagtgtgggtctgcttggagaaaaggctctcacattccaagccgctgtccttacgtgtaaaagctttgaggtgcaccctcttccacactagctgatgtaggagttagaggtagtaaacgtgtgcatacaaaactcaaacctgttttgaaaagcccaccgtagaaagcatgcttaaaagatggaattcggctgtatgccagaaaatcagtagcattatggaaggaaattgaactagaagtttaaaaaacagccaacatgcaggcccttccccacagtagaagggagcctgggtattgtgnaatctcacacccactgaaaaaatgccacgcatgcctctaaatgctctgagaaagaatgctttgc

SEQ ID NO: 360298 - DNA, 1005 bp, Homo Sapiens
  misc_feature (170)..(317): n is a, c, g, or t
  misc_feature (507)..(628): n is a, c, g, or t
cgtgttaatcggcacgagggcatgtttcgaggatgagagggcaagaactataaacactcattaattctagtagtctccccatggccagacaatggcgattgttatttaatgagcttttcctttcaatggaattcagctctcacattagtatgatttcatttgatgtttcnnnnnnnnnnnnnnnnnnnnnnnnnnnnnnnnnnnnnnnnnnnnnnnnnnnnnnnnnnnnnnnnnnnnnnnnnnnnnnnnnnnnnnnnnnnnnnnnnnnnnnnnnnnnnnnnnnnnnnnnnnnnnnnnnnnnnnnnnnnnnnnnnnnnaaagacagactgctttgatcaaccctaaatgcaaaagcagcctatttttctttgtttaaaagtcaaaacataaaaaagcagagtataacatacaaaccattcttaactattcattaaaatgggtccttcaacaccttagtggggtctgacgtctgttgcttatgcagagagattatttcctttatattannnnnnnnnnnnnnnnnnnnnnnnnnnnnnnnnnnnnnnnnnnnnnnnnnnnnnnnnnnnnnnnnnnnnnnnnnnnnnnnnnnnnnnnnnnnnnnnnnnnnnnnnnnnnnnnnnnnnnnnnnactgagcccagccaagacttcagtgttgactgctttggaggcacaaacccatgcaagcgttagttccaaagttcagatgtgtacccttaaatgaacaatgaagcaggtaaaattacccttgaaaaaaatcccttggaccaaccataaatgacaggtgaatttctcaatatggactcattcaatagccaagatatccctcttggaagcttgtgaactgaatcaccctttttggctattctggtacccaaaattagcacagatcgggcgttcggtggtacacatttatagtgcgagtactcatgtgaacgattgtctaaaaaacagggcgaacatacagaggtgtagttcaacgcgttcggcacactataagcatcacc

SEQ ID NO: 360299 - DNA, 657 bp, Homo Sapiens
ggaaggattttagatcttaatgggttcgatggtagggaatacggaaaggatacactgctaatattgtgtctaacaataaagcaaacaactcgatgctgtaagaagacaagctgtttgagctttcaaacacacatgcacacagcacaattcagaaatacccaggaggattcctgcaggcttaacagttggcatcgtactgaaatgaaacgtgtattaacaagaaaatgtcaaacttttggggaaacaaattttctgttacttcccacccaactaaaagggaagataaaaccatcatcaccagaacaaaacagattttctccaaacaagtacaatgatagtgccgggttggcagttaactctttcaccctactaaattcaagagctcatctccaccctgtcctgtatattttctacatttctattaagaggctacttggtagtgtcagcgggcatcttttacaccttctagtagctcaagctagtaaaaccttgtacttctctattgcgccgccattaaaagcagcattagtgcattttgtcattcagttcttaatcagttatttaaaagggagctgatcatgggtggctcggtgggaggtggggacccatccacggatgagcctcttgctcttggcaccaacctgagcttttgtttcg

SEQ ID NO: 360300 - DNA, 417 bp, Homo Sapiens
caagttaaaaactctttaatatctcaaaatatcttatcagattgaattatatccaatatcaatttgatggctatattcaacacatattaagaacctactgtgtaccacgcatagttttaagtgctagtgatatattggtaagcaaagaccttgctctcatggagctgtggtctggtgggagagacagataacaaaaacaaacacgtatataaatctgtgagaagtgttataaagaaaattgagcagggttatgagaataaagctacagaatggggggatatctcacacaggatggttagcaatggctctgcggctccaggccctgcctactctctcacttttcctcagttactccagatgtctcaagctcatttatgcctcaagatctttgcaaatgtttcttggctggatcccctt

SEQ ID NO: 360301 - DNA, 555 bp, Homo Sapiens
  misc_feature (236)..(263): n is a, c, g, or t
ggtgggttgatgtcagtttacatagcagaaagcattcactatcctctaagatttgtttctgcaaaactttcattgctttagaattttaaaatttcaccttgtacaatggccagcccctaaagcaggaaacatttataatggattatatggaaacatcctcccagtacttgcccagcccttgaatcatgtggcttttcagtgaaaggaaagattctttttctaggaaaaatgagccnnnnnnnnnnnnnnnnnnnnnnnnnnnngacacaaactgtagattttagcagccctggcccaaaggaatttgattacttttgttttaaacagtacaaaggggacactataattacaaaaacatccttaactgatttgagttgtttttatttctttggatatattttcagagtggtaaattgtgtgtgagaattacaaatgattattcttttagtggtttcttagcctctcttacagcccacggggatagtactgtacatcaataccttcatatgaaatttttatatgcaatgaaaataaaagcatgggttgattctgcct

SEQ ID NO: 360302 - DNA, 912 bp, Homo Sapiens
  misc_feature (506)..(506): n is a, c, g, or t
  misc_feature (812)..(862): n is a, c, g, or t
cagcccagccccagcatgagctccttcgacctgccggcgccctccccacctcgctgcagcccccagttccccagcatcggccaggagccccccgagatgaacctctactatgagaacttcttccacccacagggcgtgcccagccctcagcggccctccttcgaggggggcggcgagtatggggccacccccaacccctacctctggttcaacgggcccaccatgaccccgccaccctacctgcccggccccaacgccagccccttcctgccccaggcctatggagtgcagaggccgctgctgcccagcgtgtcggggcttggggggagcgacctgggctggctgcccatcccctcgcaggaggagctgatgaagctggtgcggccaccctattcctactcggctctcatcgccatggccatccacggggcacccgacaagcgcctcactctcagccacatctaccagtacgtggccgacaacttccccttctacaacaagagcanaaggccggctggcagaactccatccgccacaacctgtcgctcaacgactgcttcaagaaggtgccccgcgacgaggacgacccaggcaaagggtaattactggaccctggaccccaactgcgagaaaatgttcgacaatggaaatttccgcaggaaaaggaagagaaaatcagaggtttccctctaacaaagcctccttgggcttagagaaaacagagaaccgtcttccgggtggacagcccccagaaccacgggaacctcaagacaatcttggaagggaccctccaccggggggcaccaaccagnnnnnnnnnnnnnnnnnnnnnnnnnnnnnnnnnnnnnnnnnnnnnnnnnnnttggcctttaacaagctttccttctcctccctatgaacgacccattgggg

SEQ ID NO: 360303 - DNA, 868 bp, Homo Sapiens
  misc_feature (821)..(821): n is a, c, g, or t
gctggtccggtccggattcccgggatcggctgaggccaagatcaagaaactggaggatgagatcctggtcatggatgatcagaacaataaactatcaaaagaacgaaaactccttgaggagaggattagtgacttaacgacaaatcttgcagaagaggaagaaaaggccaagaatcttaccaagctgaaaaacaagcatgaatctatgatttcagaactggaagtgcggctaaagaaggaagagaagagccgacaggagctggagaagctgaaacggaagctggagggtgatgccagcgacttccacgagcagatcgctgacctccaggcgcagatcgcagagctcaagatgcagctggccaagaaggaggaggagctgcaggcggccctggccaggcttgacgatgaaatcgctcagaagaacaatgccctgaagaagatccgggagctggagggccacatctcagacctccaggaggacctggactcagagcgggccgccaggaacaaggctgaaaagcagaagcgagacctcggcgaggagctggaggccctaaagacagagctggaagacacactggacagcacagccactcagcaggagctcagggccaagagggagcaggaggtgacggtgctgaagaaggccctggatgaagagacgcggtcccatgaggctcaggtccaggagatgaggcagaaacacgcacaggcggtggaggagctcacagagcagcttgagcagttcaagaaggccaaggcgaacctagacaagaataagcagacgcctggagaaagagaacgccagacctggccggggnagctgcggggtcctggggccagcccaaagcaggaggtggaaccataa

SEQ ID NO: 360304 - DNA, 311 bp, Homo Sapiens
ggatttcaagaaacacatgtgttgaccacctctgtgtgccaagcactgggtgaggagtggtcgtatattaccataattcatcctcactcaattgggaggtggcattcttgtccctgttgcccccatctctacccccttttgttaatggttgagagaaatgtggaccagtgattctcagtttggtgcccaggtccccaaaggaagtgatggagagccttgagctaagttcaggcagcagcatgtggccagcagcagtgtgctgggagcagaggttggaatcagggctcagggccttcacttcaagggccctc

SEQ ID NO: 360305 - DNA, 646 bp, Homo Sapiens
  misc_feature (17)..(17): n is a, c, g, or t
  misc_feature (560)..(560): n is a, c, g, or t
  misc_feature (567)..(567): n is a, c, g, or t
  misc_feature (604)..(604): n is a, c, g, or t
  misc_feature (609)..(609): n is a, c, g, or t
caagcttggcacgaggnctgaggcaggcccagcctacagtgatgaggactatgaagaagacatcattgagcccaggaccttaaatgagatcaccacggtgacagacaaaactagcccttggtctagtgtcatatcagacacaagtgaggtcatcagccctcagcctgacgaggtgcagagggaaggcccctcttgtccttctccagggcctttctgcagagaggagcttatggtcaaaagtagctttctctccagcccagaaagggtgtcaacccccacctgcctaggcagggtgtctcctagccaaagtcttgttgcttgtgagtgtgaggcctctaaggcaagggttggtggcgagtctgcctcagccaaccctcagcccatcccatgcccaacactctcaggagctcaacagagcagcacgtttgttggatggagctcaccacagacagatcagaacaaggagcccaagtcagaggccccagctgagaatgaagctgccaccagtgagctcggtgactctggctgatagctttcaagaagttgccgcttaaatcttnggccttnccagagtaggaaggggaaaaccataaggggaccaccnatggngttcctctggacattcaggtagaaggcaggtgaacaa

SEQ ID NO: 360306 - DNA, 258 bp, Homo Sapiens
ggtgaagtttatggtaaagtgtatttcaataaagctgttattttaaaaattcttaaaaaaatagaatagtgcctggcacacagtaagtgccaaataaaggttagctattattattagtaatatcattgtcattattattatttggccattctgtggcctaagtaaaccccaagaaattctctatttttaacaaaagcctacagaatctagaaaagtgtttctaatttatatacatgaattaacatttatacatttatt

SEQ ID NO: 360307 - DNA, 201 bp, Homo Sapiens
attaggtaccagctcggccacagtggggaaggggtctttggaaaggggagggaagagtgggaagggctgcatctcatggcttgagtgccagctcagccacagtacactagaacaccaagtagacttctaaggtttttgactgcagtccctggctcccagacagcacctctagacctgcccacggcctgggggaacttgcta

SEQ ID NO: 360308 - DNA, 1802 bp, Homo Sapiens
  misc_feature (18)..(18): n is a, c, g, or t
  misc_feature (25)..(25): n is a, c, g, or t
  misc_feature (34)..(34): n is a, c, g, or t
  misc_feature (41)..(41): n is a, c, g, or t
  misc_feature (49)..(49): n is a, c, g, or t
  misc_feature (54)..(54): n is a, c, g, or t
  misc_feature (98)..(98): n is a, c, g, or t
accagggaatcccctttnaaggaanaattaaaangccattnaccggggntaatntaaaaaggcccaaagccccaaagtacccgccacctggggtaaanccccccttaggccccaaaaatgattttaaatgaaaggccccttttccagatgtaaccctcatgaaggaaatatcctgcctttgtgtatatgcccagttagaatactggtttctaaagtctgtcaaattgtatttcagtggcacaaaaaccagttttgaggtcttagacttataattctttgaataaaactgataacttatttgtataattggagtggagacctacctccataattagataaactctttttggattataatcagaattttgccttttttcttctcaaattattacatatgtatgtattatatatccacatatatagttttccctgattaaatggatattaaaataattgcgggtgcttcaggactttttgcttctatatttaagtatattgtttttatagcaagaacatattctgaatgttttataaatctttaataatttatatgtaggtaatatttttgtatcacaatgcattatttttttcctcctttccttccaaactataccactgtatttaccacttctaagagtgactgacgacgggccagatgacccttgaagtagtcattatgtagcaataaatgaagcctgaaacaggtttttttacttccactttaatccttagaaatttcttggcaacttcgcatattttcattgacaccggtgtataagtataaatttaaatgaactaattacttttgcatattttaaattctttatatggtagttattttttataacaggatattaacataagttaaatcctatgtatttgaaaattgttacagagctttcctcttttacttcaaacagcaaaaaagtggggggcatattgtagtcctgtcatttaagttatgtaaaaaatttaatcattattttgatgctttaaacattctcatgtgtaatatatgtattgtgtatcaaaaacactcaatatatttcaagaaaaagaaattatgttaaatagccctggtttaagaaaacatatttatgaagcattctcaacttgaagatcaagtcaaaagttataactcaagatctgaggtctcaagctaggaagagactgagaattaagtcagtttgggcatattagtatggactgaatcacatctgtaagtaactttaagaccaaacagaataaatttgggacggaagaaatatacagccctgacctgggaaagttaaccctaaaaatccctggagtcaaatcggtaaaaagtggtccagaaaaaatattacaagagacacaaggaacacctgcgagaggaagatctattgaccaaaaaatatcaaacaaagagagcagatacgacacgagagaacagctaagcaagaaacaagctcacaaaagacaagacgacagaacacagcaagaagtacacgcatggcacggactacaaagctactaaagcaacgatacacataatccaaaaaggacagtaagggagagccgcagattgacagaagcataaagcagaaagtatgaagcagacaacgaggatacaaaaaacgagaataaagaggcaagaaaaaccaaagctgacaatgaacagcatattgacgaggtaagagatgaagaaagagtaagagatggagcaagtgaaagtcacaaagaagaaacaagaaaaagagacaaataagtctagggaaatcgaggaataatataactatagagaataagaaaaatgtattaat

SEQ ID NO: 360309 - DNA, 1058 bp, Homo Sapiens
  misc_feature (64)..(64): n is a, c, g, or t
tccccgggaaaaaccttaaaaaatacatggtccactgtgcagttcccctctgcggaaaccctgnccctgcccatccataacaaggtgctgtgaacagcaatgccaaggtgaaaaggagatcaaatggccccagctccagcagttagtgtttgtcccctttttgcctcttccagagttcctgaatgagagcttttctggcttcagtaccaatgatcacagaaggaacatcttcctgatgcaagcttagatggaagtcaatgaccctggcagtgctaagaacagaagtcacacgtggcctgacgatgaaggggaggtaattaaagacatttcaagggaggggaaggcccacggaaaactggcaaccctgggtctccgtttgaggccaatatactttgtgttcctaggttcagatggcatacaccgacaagagaaggcagagaccatccttcgtggtgagcacaaaatgctatgacaggtaattgcagagagaaaaaagcacccaactctgtaaagccaagtccagtcacccattcacaagagtccaaaatccttcaaatctctagggacagaagacaaacgtgctgcccagaatgagctgagacacaaggcaaacccttggaaatgacacatggatgaggaggctgtggttgtccctccttattcctgctggatttgcagccacggctctggatctggggcatctactggcctcccctgttcactcaagaggccactgcctctcaggagtccagaatgctctgatatctgacaccagtggtcaggaagttatgctgccctctcctcttgaacagctaagatgcttggacactagacagaggcaaagcagttatgccagaagcaggggagagtcatttcactgtcagatctgtctgttcaaagagttcacattagaccaatcacagaaaaccaccagactcacacagcttgtatttgaatgaaccaggagagacttcaaggatcaactctaaagtgctagaagagaaatctgtgtttggggcactgaataaacaagtgatgtcctagaagatcaacacccc

SEQ ID NO: 360310 - DNA, 556 bp, Homo Sapiens
cctccgctgctcctttttggaatgcgagctcccaccagaagaaggttccggcacgaatcccatccccacgtctgggccgagaaagcagcccgggtccggaaggtgtagagagtcccggcctcactcagctcacagggcgtgccaggcggcaacaccagaatcttccagaagcccagctccacccgcacacgcagcttcccatccagtccttcaactcaattcttacccaacacgcgtttcctgtttgttttgagacaaaatcaccacctgtcaaaaggcaggtggctccagaggggtcaagacccccccccgcccccgctccaccctggagcccacccccatgggcaccgcgtgccgcctgcacgtgggctgtcttcacaggtctgatgtgaaaattcaatcacgacgttaaccggctcgagagagcgccggcctagaggctcattatctatttattttaccaaacgcgaattgagacggactttgacaaaacacgaaatggtaatgtgaagctaagagcagagagtgaccaacagtaaacaacacgcgcagacaa

SEQ ID NO: 360311 - DNA, 122 bp, Homo Sapiens
aaatgtatttaaattctgtttctctcttctgttactttacacgtatgaatgctctgctcttctgtgatcttaaaacaaaatgaaataaacgtgaaaaggagatgtgtcttcattgacctgtc

SEQ ID NO: 360312 - DNA, 388 bp, Homo Sapiens
  misc_feature (20)..(20): n is a, c, g, or t
ctgggccacgggcaaggggncatcccaagcccatcctgcgtggatgaaaactgggtgtgttttctgcagttacgcagtgctctggggggaagacctgacccaccgggctgcatgcctgcagttgggtgtgatgtgcttacgtgccatgcaaacgtgggcacacagtcgtggcctcttgacaattgcacagacaaatccccagcaaggcagcgtggcacaggagccaacaggaaggaataaagaaggcatggatttcatggcacgcttgatccaacggggaaaggtgggattctgctaattttgcttgagtagaaatctaaggctgataattacctatccaggcttcagtccagaataagtgattaataaaagaattctgcagaaccag

SEQ ID NO: 360313 - DNA, 470 bp, Homo Sapiens
ggccgccctgcctctgcccgctccccgggcgcggagccgcgggtttcatggggcgattgcagcgattcccccacccagagcgacctgcgggcagcggcggcagtggcaggagccgcctttccgattccctacgatgcgggtgctgagctatggcaaagggcagcgaagtgacgagcgagacccgcgtacgactgtgaaagccacctggagccaccttgccgggattgtacctgcaggcagaaagtcttcctacgaccgtcttttcccttagaggcaccagaatccctgtaaccattcatccaggtgttgagaagatatgtagcagccgagcacccatcttttgacaccgtcctctgaaatcagctttggagatgctttcactctgtccgtcttctgcagcagccaggcagagtgccgactccttcacagccgtgaggaactcttcaggctccagaagctcttaaacctga

SEQ ID NO: 360314 - DNA, 547 bp, Homo Sapiens
  misc_feature (328)..(328): n is a, c, g, or t
  misc_feature (437)..(437): n is a, c, g, or t
  misc_feature (442)..(442): n is a, c, g, or t
  misc_feature (527)..(527): n is a, c, g, or t
ttcatggggcgattgcagcgattcccccacccagagcgacctgcgggcagcgggcggcagtggcaggagccgcctttccgattccctacgatgcgggtgctgagctatggcaaagggcagcgaagtgacgagcgagacccgcgtacgactgtgaaagccacctggagccaccttgccgggattgtacctgcaggcagaaagtcttcctacgaccgtcttttcccttagaggcaccagaatccctgtaaccattcatccagggtgttgagaagatatgtagcagccgagcacccatctttttgacaacgtcctcttgaaatcagctttnggagatgctttcaattctgtccgtcttcttgcagcagccagggaagagttgccgaattcctttaacagccgtgaggaaactctttcagggtttcagaagtttttaaacntgacntcgtgccgaatttttgggctttgagggcaaatttccttatagtgagtcgtatttaatttcgtattcatgttataagtgttttccntgttgaaattgttattccgt

SEQ ID NO: 360315 - DNA, 721 bp, Homo Sapiens
  misc_feature (35)..(35): n is a, c, g, or t
  misc_feature (43)..(43): n is a, c, g, or t
  misc_feature (194)..(194): n is a, c, g, or t
  misc_feature (324)..(324): n is a, c, g, or t
  misc_feature (351)..(351): n is a, c, g, or t
  misc_feature (604)..(605): n is a, c, g, or t
  misc_feature (607)..(607): n is a, c, g, or t
  misc_feature (653)..(653): n is a, c, g, or t
  misc_feature (694)..(694): n is a, c, g, or t
gcgccaagaccttctcttccagatctgctacgggntgtatggnttcatggacgtggtgtgcataggtctcatcatccatgaaggaccctcggtgtaccgcatctttaaacggtggcaggctgtcaaccagcagtggaaagtgctgaactatgacaagacaaaagacctggaggatcaaaaggcaggaggcaggnccaacccccggacctcctcatccacccaggccaatatcccctcctcggaagaggagaccgcagcacccctgcccctgagcagggccctgcccaggctgccggccacccctcaggccctctgtcccatcancactgtgcttataccatcctgcacatnctgagtcacttgagacctcatgaacagcgaagtcccccaggcagcagccgagagctggtcatgagagtcacgacagtgtgagagcagaggcccggaaggaaggccatgaccaccactgagggcccggagcagggtggggaggtgcagtggcacccccagagccaacagagggagcaggcagagggtgggggacctggcgggagccctggggtagtgtcagagcgggagtgaggctggtgcaggagcagttctnntntttccaatcagtcaatgccactctccacaacaacaatgaaaaccancaccaactcaacaacaaagtgcaatacaggctgaacctggnccaacagaaaaaccctgccccaatgca

SEQ ID NO: 360316 - DNA, 2429 bp, Homo Sapiens
tttctatagagacacttcctgtggcagagaaaagaggtagtgagcggtgtttcaggatgtgagggcccgcaggagccgagtcaggctctctccactgcctgcccgccaccgtgcaagctctggccggcgctgcccacagtccccatggtgggcagcccccgcggcggggacccctgatcggcagcggcatgccagggaagcccaagcacctgggcgtccccaacgggcgcatggttctggctgtgtcagatggagagctgagcagcacgacggggccccagggccagggcgagggccgcggcagctctctcagcatccacagcctccccagtggtcccagcagccccttcccaaccgaggagcagcctgtggccagctgggccctgtccttcgagcggctgttgcaggacccgctgggcctggcttacttcactgagttcctgaagaaggagttcagcgcggaaaacgtgactttctggaaggcctgcgagcgcttccagcagatcccggccagcgatacccagcagctagctcaggaggcccgcaacatctaccaggagttcctgtccagccaggcgctgagcccagtgaacatcgaccgtcaggcctggcttggcgaggaggtgctggccgagccccggccggacatgtttcgggcacagcagcttcagatcttcaacttgatgaagttcgacagctatgcgcgcttcgtcaagtccccgctgtaccgcgagtgcctgctagccgaagccgagggacgccctctgcgggaacctggctcctcgcgcctcggcagccctgacgccacgaggaagaagccgaagctgaagcccgggaagtcgctgccgctgggtgtggaggagttggggcagctgccacccgttgagggtcctgggggccgccctctccgcaagtccttccgccgggagctgggcgggactgcaaacgccgccttgcgccgagagtctcagggctccctcaactcctccgccagcctggaccttggcttcctagccttcgtcagcagcaaatctgagagccaccggaagagccttgggagcacggagggtgaaagtgaaagccggccagggaagtactgctgtgtgtacctgcccgatggcacagcctccttggccctggccagacctggcctcaccatccgagacatgctggcagggatctgtgagaaacgaggcctctctctacctgacatcaaggtctacctggtgggcaatgaacagaaggccctggtcctggatcaggactgcaccgtgctggcggatcaggaagtgcggctggaaaacaggatcaccttcgagctggagctgacggcgctggagcgcgtggtacgaatctcagccaagcccaccaagcggctgcaggaggcgctgcagcccattctggagaagcacggcttgagcccgctagaggtggtgctgcaccggccaggcgagaaacaccctctggatctggggaagctagtgagctcggtgggcggcccaaagactgggttttggacactcttccaggtgtgaagatctccaaagcccgtgacaaatctccctgccgcagccagggctgcccacctagaactcaggataaggccacccatccccctccagcgtcccccagttctctggtgaaggtgcccagtagtgccactggaaagcggcagacctgtgacatcgaaggcctggtggagctgctgaaccgggtgcagagcagcggggcccacgaccagaggggccttctgaggaaagaggacctggtacttccagaatttctgcagctgcccgcccaagggcccagctccgaggagaaccccaccacagaccaaatcagcagcccagcccatcgggggatccttgaactccaccaccgactcagccctctgacagctacccaacagtccaggacagctgcatggcacccggcgggccgagcatgccatgggtccgctctgcatgccctggtctgtgccatgagtgtccctggccccttcctgccatgggcaggcccgcaggaagagccggtaggggtggaaaggggactcagatgagacacaccccacagctgccaccgccttgtccctcaacaagctcacccccaatcccttgcagccaggccacaatgggggaggtgagtccagccccttggaacaggcttgcccaacatggagggatggcgttggcagtgccagcctccccagcctgtgccaagcttcaacaggggcaagaggaggggccggcccctcctcaggaagctggtatgagtaaggccttgagggtgcaggcaggcagccctgtaccccacccacatagactatactgtacatacagattttgcagtaggcttggggcagctgggtttgtccttgatgtatgatactgttattataataattattattattctgcgaaacaaaaacc

SEQ ID NO: 360317 - DNA, 410 bp, Homo Sapiens
  misc_feature (53)..(53): n is a, c, g, or t
  misc_feature (351)..(351): n is a, c, g, or t
  misc_feature (382)..(382): n is a, c, g, or t
gaagtggatttgggccatgttccaggcatgaatgaggcagtgtttctgccagntggtgtcctggggatggactaggacctggtttggccatgcccagggagatccgctgaagctcattgatttgtttttcattcattaattccaatcaagtaaccaattgctgtggctgggtctggagagggcatggctgaagccaccacagtgaatgggagaaagcagtgttggggattggtggtggatactgtcctctggtcttcctcccttgccccttttgggtgggtatctttggatttgtcttcctcctgtcctgaggccgtggggtcctgtcttccctcctcaagtctaagcctngcttgttctctggcaggtttgacagcaacgnctctgccagcttctccagtaatgagggt

SEQ ID NO: 360318 - DNA, 507 bp, Homo Sapiens
  misc_feature (91)..(91): n is a, c, g, or t
caaagaactctcataaattcaaaattcatcatttgagaggttgaagcctccaaggattcttctagctcccagggtaacatccactgtatgncttccagatgttttttccagatttcaatgtagtgtggctcttctttttctttcagggctggggggccatcttctgcagggcagctggggccctgtgtgggtaggctgggaggtgcctgaggcctgggctctcccaccagctcctgctgcacattctccagcatggtcttgtacgcctgtcgggccgccactgtcagctcaaccatcttgtggaactgatcctgggccccatcatagctgaagatccccaccacactgacaggaactgccttattcaaactgcgccccagagctttgcggttgagagcaaacacaaagggaatgttctgctcacaggcataatcaataattgtgtgcaaagtgtcatccagcccaccttttgactgtatcttctcacagttgggagaaataatgaca

SEQ ID NO: 360319 - DNA, 379 bp, Homo Sapiens
  misc_feature (123)..(123): n is a, c, g, or t
  misc_feature (189)..(189): n is a, c, g, or t
  misc_feature (258)..(258): n is a, c, g, or t
  misc_feature (311)..(311): n is a, c, g, or t
  misc_feature (343)..(343): n is a, c, g, or t
gtaaaaaaataataatgtttaaaaatatttcaatgtggagacaagcttcaaaatgaaattagacacattccattacccaggtaaaagaaggggaagcctgactttgatagtagtattcagganaaaagagttggcagttttatttggccaaattccaatatccagctcatggtacagcacaccgggggngggggacgggaggcgagaactaagggcttttttaaggaatgtgtttgatgggaagtatgtgcctaggtncaaaagacttaatccccccgggactcccgtgttaaggttccatttaccctttnggattttgtgtttcccttcttggttttcaccnttttaaggccgattttggcccagttgtacagtgttt

SEQ ID NO: 360320 - DNA, 884 bp, Homo Sapiens
  misc_feature (834)..(834): n is a, c, g, or t
acgctgttggttcttaatgacacagcttaactttattgtgaaaagattgcagcaacaaatgagattttacctgtatttgttaaaaatgcttatccttgtctaagactggcaacataagcagttcttaggcttctatgccaatggacactaggcagtaatacatgtgcagtgctaatagaaaatattggagtaagggtgtactaaggaagttctcaatctttccccttcactatcttctgtaatgtaacttcaataaatgtgattctcatcttggcacaaaattgggaatggtgtggggagcgctgtttttcccaggtttatagtagagaaataatgttttctggtactaaaactggcatggtaagtgcatacttagagtaaggactttaaatcacgggccagttaatctctagttagtggtttggtacgcaagaagtacccatgggtgtattacacaaatgcaggaataccatatctagaaatacacctttgatattcatagtgtacctgagaatggtttcacgcataattttaggtaaactgccttagtcactctggttttacggatctttgcccacagttcctcgttcataacttctatagcccttgttatagtcatgttgtgtgtgttaggccacaggaaactcacttcacttctgcccttttaccttcactaagacgggactcttgatcttcccctacctttctgtgagtcctaagacccccatttcagagagggttctgtcctatactctgcggaaaggaatgctgtcatcttgaagcctccctacaaaaccaagaggactgagtttggatatgtgaacgtatggaggntcctggaggatggcacacccaggcaaggcattaaagctttgcaccccttt

SEQ ID NO: 360321 - DNA, 825 bp, Homo Sapiens
  misc_feature (708)..(708): n is a, c, g, or t
  misc_feature (749)..(749): n is a, c, g, or t
  misc_feature (754)..(754): n is a, c, g, or t
  misc_feature (776)..(776): n is a, c, g, or t
  misc_feature (785)..(785): n is a, c, g, or t
  misc_feature (811)..(811): n is a, c, g, or t
tgacatttggaagagtcagtgacttggggcaattcatccgagaatctgagcctgaacctgatgtaaggaaatcaaaaggatccatgttctcacaagctatgaagaaatgggtgcaaggaaatactgatgaggcccaggaagagctagcttggaagattgctaaaatgatagtcagtgacattatgcagcaggctcagtatgatcaaccgttagagaaatctacaaagttatgactcaaaacttgagataaaggaaatctgcttgtgaaaaataagagaacttttttcccttggttggattcttcaacacagccaatgaaaacagcactatatttctgatctgtcactgttgtttccaggagagaatgggagacaatcctagacttccaccataatgcagttacctgtaggcataattgatgcacatgatgttcacacagtgagagtcttaaagatacaaaatggtattgtttacattactagaaaattattagttttccaatggcaataacccatttatgaggagtgttttagcctactgggaataggacaggggaccacatcctctgggaaagcaggataaggcataggaactggatactttggatggcacacttcgtagtgggttaactccagccccgaattcaggccttgttaaaggcagggtgcccggaggtgggtttggctttgttccttcccaaggcgggtnagtccggccccaccgagagccggggagctttggagtggccngcctnggtgctaggccggtttcacggnaccagggtnagggttaatttttgccgttttctttngacagcggccttta

SEQ ID NO: 360322 - DNA, 1157 bp, Homo Sapiens
  misc_feature (134)..(148): n is a, c, g, or t
aggaaagggacggaccacaagtgggcaacatctttcccggtcttccacaggcaaaaaaatggggggaggggccattcaaaaagtccaaattgttttttctcttcccccagttaatccctgctcccctttatttnnnnnnnnnnnnnnngtttaatttggggaagaactgctttgtttcaagggtgcccacaggggcaaaaagtgggagtccatcgctattcctttctttcttttccacatgtattctgaagggaaagttaagtaactggagtgcagaattccaaaggggcaaatcctaatgctcaaagtaaaccagattcacacccttctgttagcaggggagagaatggttttaagtatagtgcatctcaggaggaggaattaaaatgtgaaaactatatactgccatcagaggaaggaggaagtcactgaaacttgacccatgacttgtcagtttccttccaaattaatgccgctgtcaagaagactgcataattaactctcaccctgttccgctgaagctgctagcaccacgctgccactcaaagctgcctggctctcggtggggctgactcacctgctttggaaggacaaagcaaaccacctctggcacctgctttacaatgctgattagggatgagttaccactacgagtgtgcatcaagtatcagttctatgcttatctgcttcccagaggatgtggtccctgtctattccagtaggctaaaacactctcataaatgggttattgccattggaaaactaataattttctagtaatgtaaacaataccattttgtatctttaagactctcactgtgtgaacatcatgtgcatcaattatgcctacaggtaactgcattatggtggaagtctaggattgtctcccattctctcctggaaacaacagtgacagatcagaaatatagtgctgttttcacttggcctgtgttgaagaactccatcccagggacaaacaagcttctcttatttttcacaagcagactttcctttatctcaagttttgagtcataactttgtagatttctctaacggttgatcatactgagcctgctgcataatgtcactgactatcctctcttagcatcttccagctagctcttcctgggcctcatcagtatttccttgcacccatt

SEQ ID NO: 360323 - DNA, 726 bp, Homo Sapiens
  misc_feature (136)..(148): n is a, c, g, or t
  misc_feature (455)..(456): n is a, c, g, or t
  misc_feature (460)..(461): n is a, c, g, or t
  misc_feature (464)..(491): n is a, c, g, or t
tgcccctttggaattctgcactccagttacttaactttcccttcagaatacatgtggaaagaaagaaagaaatagcgatgactccacttttgcccctgtggcaccttgaacaaagcagttcttcccaaattatacnnnnnnnnnnnnnaaataaggtgagcaggatgactggggagagagaaacatttgactttgactgcctcccccattctttgctgtgagctggaaagtgtgcagttggtcgtctttcttctcctttctttaggatagtaagagactcactcactgcacttctgctcagttggctcctgcatcgggatcacacagccatcagcaggactgcccagttggtgagcacactccattgaccacgtggcgccagcgcttcctcaatgcacatgattgagaggaaagaaagttctcttagatgttactgcttttgctcagactttgcnngggnngannnnnnnnnnnnnnnnnnnnnnnnnnnnattattaatcacttttgtccttgagaaagtcttgaatgaacagagaatttattccattgcaatatttgattgtatagaggcacactgtttcatcgacagaagaagcaaaaaggctttgtgtaagtttttggtactatgtaccacctctgttattcttttaaagtctgaagtattcatgtacttaaaccatattatatttaattgtgtttgattttaaaatatatatatatgaatt

SEQ ID NO: 360324 - DNA, 344 bp, Homo Sapiens
  misc_feature (33)..(33): n is a, c, g, or t
  misc_feature (64)..(64): n is a, c, g, or t
  misc_feature (73)..(100): n is a, c, g, or t
aatgcacatgattgagaggaaagaaagttcccntagatgttactgcttttgctcagactttgcnaaaaaaaannnnnnnnnnnnnnnnnnnnnnnnnnnnattattaatcacttttgtccttgagaaagtcttgaatgaacagagaatttattccattgcaatatttgattgtatagaggcacactgtttcatcgacagaagaagcaaaaaggctttgtgtaagtttttggtactatgtaccacctctgttattcttttaaagctgaagtattcatgtacttaaaccatattatatttaattgtgtttgattttaaaatatatatatatgaattctaaaaaaaa

SEQ ID NO: 360325 - DNA, 352 bp, Homo Sapiens
  misc_feature (81)..(81): n is a, c, g, or t
  misc_feature (83)..(112): n is a, c, g, or t
cagcgcttcctcaatgcacatgattgagaggaaagaaagttctcttagatgttactgcttttgctcagactttgcaaaaanannnnnnnnnnnnnnnnnnnnnnnnnnnnnnattattaatcacttttgtccttgagaaagtcttgaatgaacagagaatttattccattgcaatatttgattgtatagaggcacactgtttcatcgacagaagaagcaaaaaggctttgtgtaagtttttggtactatgtaccacctctgttattcttttaaagctgaagtattcatgtacttaaaccatattatatttaattgtgtttgattttaaaatatatatatatgaattctattt

SEQ ID NO: 360326 - DNA, 539 bp, Homo Sapiens
  misc_feature (28)..(28): n is a, c, g, or t
  misc_feature (354)..(410): n is a, c, g, or t
tttcaagcagtgccatctagacctttgnctcttctcatttcttcaaaagcagtgctaagtaaaataataataataaaaatggtttatgaaccaaaagactttacattctagcattaggaacacacacaaaaaaatctgtcagcttacaaaagcacaacacataaagaaagagcagtggaatgcgtaatggggaaatgaatcatgtttaaagcaagacttgcattaaattggcaactaagataatttccattttctataggtaaccgtgttccagtttaatgattaccttcatactcaacaagaaaaatggcaaagcaacatcatcaaaataggtcttacaacatatcgacatgnnnnnnnnnnnnnnnnnnnnnnnnnnnnnnnnnnnnnnnnnnnnnnnnnnnnnnnnngttggaaaacaaaaggaataagctaatatgttttatttccttcattaaaccagtatatgagtatttttaatttggcaaacaaaaatcaacatactgaaataagtaatacagggtactgagcatttctct

SEQ ID NO: 360327 - DNA, 473 bp, Homo Sapiens
ctgcctatgagcgacctcagaacgcataacgtccacgtgaagattgagcagcggtggcatcaggtggagaccacacctctccggaaagagaagcaggtgcccatcgcctccgtccacctgtcttctgaagatgggggtgaccggctctccacacacgagctgacctctctgctcgagaaggagctggagcagagccagaaggaggcctcagaccttctggagcagaaccggctcctgcaggaccagctgagggtggccctgggccgggagcagagcgcccgtgagggctacgtgctgcagactgaagtggccgcctccccatcgggtgcatggcagaggctccatagagtcaaccaagaccttcaaagtgagcttgaagcccagtgccagcgccaggagctgattacacaccagattcagaccctgaagcgtagctatggggaggccaaggacacgatccggcaccacgaggc

SEQ ID NO: 360328 - DNA, 1080 bp, Homo Sapiens
ccggtaccatctactccacactggcatgccactaaccgcacctgcaccggctctctgactgatgccggctccaccagcggtccggtctggtccggtccggtccagtgcagggggtctaacggtgtgtttattttctcctcctgctctgtctctacccagagtctgaaggaaggcctgacggtgcaagaacggttgaagctctttgaatccagggacttgaagaaagactaggtgtgtcccatccaagttgagcacgcgccttccccagcttgcagcagcacaccccaagcgctgcttttcacctgtacctttgtttcattattattattattattgctgttgttgtcatcgttaactgtgggcatggaatgcgtgaggctggcttctgggttgtccacaccactctctgctgtgttgacttcctgttgtcttcatcaaagcttttttccgtggtattctaaaattaggccagcagtgggggctgggagggcatctgtgttagtcctttcctggctgtgacccgccacactcactgtcagtattaaggcccagcagcctgttgataagctaccctgtctcaccatgtgctggtgtggaaacggggcccagccagcacgcctcaaggtagatggaatccccactggtcagagaaaaagctatgcggacactccagcttggcctgggtcacagcactgactcctcacccgctagtctggctgttaagaggagaaagtgcactgccttccagcccaggaggaggacagcattttgtatttgttccactgatgcagcttagaaccacacccctgagagtcgtggcaaacctttcacaacctggaaaatgttgaaagcaaccattcctatttttgtttgttttttattaaatcttgcactagcggaagcccaaagtgagaagaaaaagccttgtcggccgccctcggcccctcaagaaagctttctaaaaccatttcgtttgggcgccgcgggcccccgtaggtaaggtgaacatgggccataagctggtttcccaaggaaaaaccctggcccatgacctaggggcgttggcattcctcccccaat

SEQ ID NO: 360329 - DNA, 1842 bp, Homo Sapiens
  misc_feature (1598)..(1617): n is a, c, g, or t
  misc_feature (1758)..(1758): n is a, c, g, or t
  misc_feature (1774)..(1774): n is a, c, g, or t
gctgggtggcgaattcggcacgaggcctgctgacacccacgagcccctgcgccctgaggcggagcctggggagctggagcgggagcgtgcacggaggcgggaggagcgccgcaagcgcttcgggatgctcgacgccacagacgggccaggcactgaggatgcagccctgcgcatggaggtggaccggagcccagggctgcctatgagcgacctcaaaacgcataacgtccacgtggagattgagcagcggtggcatcaggtggagaccacacctctccgggaagagaagcaggtgcccatcgcccccgtccacctgtcttctgaagatgggggtgaccggctctccacacacgagctgacctctctgctcgagaaggagctggagcagagccagaaggaggcctcagaccttctggagcagaaccggctcctgcaggaccagctgagggtggccctgggccgggagcagagcgcccgtgagggctacgtgctgcaggccacgtgcgagcgagggtttgcagcaatggaagaaacgcaccagaagaagattgaagatctccagaggcagcaccagcgggagctagagaaacttcgagaagagaaagaccgcctcctagccgaggagacagcggccaccatctcagccatcgaagccatgaagaacgcccaccgggaggaaatggagcgggagctggagaagagccagcggtcccagatcagcagcgtcaactcggatgttgaggccctgcggcgccagtacctggaggagctgcagtcggtgcagcgggaactggaggtcctctcggagcagtactcgcagaagtgcctggagaatgcccatctggcccaggcgctggaggccgagcggcaggccctgcggcagtgccagcgtgagaaccaggagctcaatgcccacaaccaggagctgaacaaccgcctggctgcagagatcacacggttgcggacgctgctgactggggacggcggtggggaggccactgggtcaccccttgcacagggcaaggatgcctatgaactagaggtcttattgcgggtaaaggaatcggaaatacagtacctgaaacaggagattagctccctcaaggatgagctgcagacggcactgcgggacaagaagtacgcaagtgacaagtacaaagacatctacacagagctcagcatcgcgaaggctaaggctgactgtgacatcagcaggttgaaggagcagctcaaggctgcaacggaagcactgggggagaagtcccctgacagtgccacggtgtccggatatgatataatgaaatctaaaagcaaccctgacttcttgaagaaagacaaatcctgtgtcacccggcaactcagaaacatcaggtccaagtccgtaattgagcaggtctcgtgggatacctgaaatgcacccgcttcccggcccatgcaggagagtctgaaggaaggcctgacggtgcaagaacggttgaagctctttgaatccagggacttgaagaaagactaggtgtgtcccatccaagttgagcacgcgccttccccagcttgcagcagcacaccccaagcgctgcttttcacctgtacctttgttnnnnnnnnnnnnnnnnnnnngctgttgttgtcatcgttaactgtgggcatggaatgcgtgaggctggcttctgggttgtccacaccactctctgctgtgttgacttcctgttgtcttcatcaaagcttttttccgtggtatctaaaattaggccagcagtnggggctgggagggcantgtgttagtcctttcctggctgtgaccgccaactcatgtcagtattaaggccaacagcctgttgataa

SEQ ID NO: 360330 - DNA, 493 bp, Homo Sapiens
  misc_feature (15)..(15): n is a, c, g, or t
  misc_feature (144)..(144): n is a, c, g, or t
actaataggataccncgcgtgggttccattgcagacacagtggcgcaaggcagactgggccagatcatacaggccagccgtattgtgctccatagcagggttgtctgtgctggccacaccggagaggcccctagagagccctcnatggattgtaacctaaagaagaaacggttcctttttgtcttcttttaaaaatgatttttaaataccgttttttacaccgttctctcggtactttttttaagctaagtcagcattgtcttccagtgttaaaggcatccctcacctctgcattgaacttacgtatccatgccaaggaatggaatttccatcctgagccagttcagttaggtgtcaattgatactattttaattttttatgcaatctgatgagatgagctcagatttaaaaatctcaaaagcacgtttattgtaacaagaattgttatgtattaatactgcagttttcaataaagattgacttgtgttgcaa

SEQ ID NO: 360331 - DNA, 283 bp, Homo Sapiens
tatccaaggaataaacaatactgtttttggctttttgaattattgtttttgacataaaaataataagctatttttggcatatgcagacttttcacaaagtgattgttttcttgagctctggactacttggtaacattcataagttccttcactttgtagctccctctttccttccctccactccctgcaaaagagagcagaactgatttttcagaggtgatgtttacaacagttcaacacactcgaatgagcacttagaataatgtcaatagaggaagaaaaa

SEQ ID NO: 360332 - DNA, 540 bp, Homo Sapiens
  misc_feature (458)..(458): n is a, c, g, or t
  misc_feature (468)..(468): n is a, c, g, or t
  misc_feature (483)..(483): n is a, c, g, or t
  misc_feature (516)..(516): n is a, c, g, or t
taatttgtactgtcactggagtcagccctcatttgccatgttatgattatgttcttcttgtgggacttgtatgtatttattagagaccattgagacgtagcactgggcattacttttgtggcaaaggcaccagggcagtaatcattattaatggatttcattatttgggagagcattttactgactatagagaattcattgcattgatctattgtgccacagttttattataccgggtagtttaaaatgatattctctaaactgttaaggctgaaaaattgtccagtgttggcagttatcccatcagtaaggaccttccttttactaccgaaaatacatagttctgtcgaaagaggaccttttgactgggccccagtggccccgactgtgtttaaatccctcactagtgaaataggggggattactactgccatcattgttcttaaaacaaacttccntttgggaggntaacagcagcgggtnaaatcaggtgttggaggaagtacccgcttaacntcactttgcctttaaaggggttcc

SEQ ID NO: 360333 - DNA, 431 bp, Homo Sapiens
ccgctttggtctgtgagctgaggctgtccccagagaggatggcagcaggtattgggtcctcagccttctggcgggagccctgaggctgcggacaaagccctttcatctgaggactttcatctgtgcatatcacggccccccagggcagttcctgctggaccagactctctggcagaggaggtggagttcctccatgcaggagcacggcatggcgggagcggggctgcagagtatccgagggtgctgccggggcagcgggaggtggctggacccatcgcatctaaaactggcccaggacacttggtgtatgcgtgacttggctgtggctgtcttttttaatccttgtgtaaagcagcaaaaaagacctaaagggaattgtaatttggttataattcaggatttggaaataaatttattatttgtaaaacatg

SEQ ID NO: 360334 - DNA, 532 bp, Homo Sapiens
  misc_feature (33)..(33): n is a, c, g, or t
  misc_feature (47)..(47): n is a, c, g, or t
  misc_feature (70)..(70): n is a, c, g, or t
  misc_feature (76)..(76): n is a, c, g, or t
  misc_feature (103)..(103): n is a, c, g, or t
  misc_feature (145)..(145): n is a, c, g, or t
  misc_feature (199)..(199): n is a, c, g, or t
  misc_feature (228)..(326): n is a, c, g, or t
ccctaggaacccaaatcctaaacccctgggaanttcccccaaatgantggaaatgtcctgcctaatccangggggnccccctcaacccctcgtttgaagaaanttatgcctaatgaaggtgaactcttggtgaaacccccttgantttaacctaacaacatgactccaaggcaggctggcctctctgccccggggttancactggtgctctgaagcccacgtgctatnnnnnnnnnnnnnnnnnnnnnnnnnnnnnnnnnnnnnnnnnnnnnnnnnnnnnnnnnnnnnnnnnnnnnnnnnnnnnnnnnnnnnnnnnnnnnnnnnnngaactctggacactgaagttcaggtgagcttcctggctagcaataacctgtcatactgtcatgcatcagtgtgccacggggggacgtggtcctgaggacaaacgaagcttcgcatttgagaccctcccagaccttgctctatgcatctctccttttggctggttctaatttgtacctttttggtataataaagctataatggtaag

SEQ ID NO: 360335 - DNA, 408 bp, Homo Sapiens
  misc_feature (19)..(19): n is a, c, g, or t
  misc_feature (63)..(63): n is a, c, g, or t
  misc_feature (391)..(391): n is a, c, g, or t
agatgcgcagaaactcggnattcccggactcgtccacatacaggatgttgctgggcttcaggnccctgtgcacaaccccctgtgagtgcagatactccacagttttgccaatggtgtgcaggacaaagctggcctcccgctctgagaagaacttctgccgcaggatcttgtccagcagctccccaccccgcatcagctctgtcaccaggtacacgtgtttgccatcatcatacacatctttcagagtgatgatgttggggtgctggccgtaccgcagaagaatctcaatctcttctgaaggatcccgcttgctcttatcaatgaccttgacagcatactccatgttggtggccttgtggacacagcgcttgcactcagagtaggagcccanaccaattgtctccttta

SEQ ID NO: 360336 - DNA, 378 bp, Homo Sapiens
ggttctcatcctcctccctgccccccagtattgattaacaaggacccccggggaaaaaaaccttccttagacacactggcacccaaggtaagaggtggggctgcccaggcaaagtcagtgaacatgaaaactcagacaaagcagagatggaaataatgcgcctcttgaggagaaaagcaataatgaataaaaggactttcctacaataacttcactgaggactcacgttaccaattttcatacttactaaagggattgtaaaaaacaccccagcattttaggtgtcttggttccatttacagcactgaggtaatctttctgctgtttgttgtcctgcttggttgagtaccacaattaaagattatgctcccctttaaa

SEQ ID NO: 360337 - DNA, 646 bp, Homo Sapiens
tcattagtagcgttctcggtcagtttatggtgggaaagagaatcaagtaaacaaattctcaaaaagattggcttcaaataagagaacacggtttaggtggaagatctcctttttcagcacggtcttcccaaggtaacaagggggtggggattgacttgggtgtgtctgacataattgagaaagaaatttagtctgcaggttaaaagtgaagctgaaatccaggagttaatgttttcctcaatggcttataaaaaaattgaagagtgacacagttttctcattttaaaagtggctaatttctaatgctaatactggttatgcagagtattaaaatttctgataaatgttttagtaaaaactaattctctccatgtctgtgcatatattatttaataatatgatccttaaatgtatgtgatccaaccaatctgtggcaaatcataacctccaagactatatacagattagaactacgtacagattatgtaaaatttactcttgtgacacatgagttattttaattgaatttaagttgccaccccaattaaaaattatttcatattttaaagataagattttagaaatatcttctacagaatattagtatctgactaggaatgtaagtccattatgtttcatgtacagc

SEQ ID NO: 360338 - DNA, 917 bp, Homo Sapiens
ggctggtaccggtccggaatttcgggatatcgtcgacccacgcgtcggtcccgtactattcgggctcccgcctctgttcaggacactgggtccccttggagcctccccaggcttaatgattgtccagaaggcggctataaagggagcctgggaggctgggtggaggagggagcagaaaaaacccaactcagcagatctgggaactgtgagagcggcaagcaggaactgtggtcagaggctgtgcgtcttggctggtagggcctgctcttttctaccatggcagcccagggctatggctattatcgcactgtgatcttctcagccatgtttgggggctacagcctgtattacttcaatcgcaagaccttctcctttgtcatgccatcattggtggaagagatccctttggacaaggatgatttggggttcatcaccagcagccagtcggcagcttatgctatcagcaagtttgtcagtggggtgctgtctgaccagatgagtgctcgctggctcttctcttctgggctgctcctggttggcctggtcaacatattctttgcctggagctccacagtacctgtctttgctgccctctggttccttaatggcctggcccaggggctgggctggcccccatgtgggaaggtcctgcggaagtggtttgagccatctcagtttggcacttggtgggccatcctgtcaaccagcatgaacctggctggagggctgggccctatcctggcaaccatccttgcccagagctacagctggcgcagcacgctggccctatctgggggcactgtgtgttggttgtctccttcctctgtctcctgctcatccacaatgaacctgctgatgttggaatccaaaactggaacccatgccgtctgagggccagaagggctccttgaaggagg

SEQ ID NO: 360339 - DNA, 877 bp, Homo Sapiens
ccgcggcagcagagccacggatggtgccctccgcccgatgcccacagccccacgccaggattacatcttctacctggagcctgagcgactcgagtcagggaagggcaagtgtccgtacgatcccaagctggacacagcatcggccctcatcaatgaggagctctatgctggtgtgtacatcgattttatgggcactgatgcagccatcttccgcacacttggaaagcagacagccatgcgcacggatcagtacaactcccggtggctgaacgacccgtcgttcatccatgctgagctcattcctgacagtgcggagcgcaatgatgataagctttacttcttcttccgtgagcggtcggcagaggcgccgcagagccccgcggtgtacgcccgcatcgggcgcatttgcctgaacgatgacggtggtcactgttgcctggtcaacaagtggagcacattcctgaaggcgcggctcgtctgctctgtcccggccgaggatggcattgagactcactttgatgagctccaggacgtgtttgtccagcagacccaggacgtgaggaaccctgtcatttacgctgtctttacctcctctggctccgtgttccgaggctctgccgtgtgtgtctactccatggctgatattcgcatggtcttcaacgggccctttgcccacaaagaggggcccaactaccagtggatgcccttctcagggaagatgccctacccacggccgggcacgtgcccctggtggaaccttcacgccatctatgaagtcccaccaaggattatcctgatgaagtgatcaacttcatgcgcagccaaccactcatgtaccaggccgtgtacccctctgcagcggcgggccccctggtag

SEQ ID NO: 360340 - DNA, 868 bp, Homo Sapiens
  misc_feature (147)..(147): n is a, c, g, or t
  misc_feature (195)..(195): n is a, c, g, or t
  misc_feature (279)..(279): n is a, c, g, or t
tgccccagcccagggacgcccctggccccttgctgttcccaagtgcacgatgctgctgtgactgaggagtggatgatgctcgtgtgtcctctccaacccccctgcctgtggcttggttggttaccggttatgtgtccctctgagttntgtccttgagcgttgtcccaccttctccctctccactcccaagaaganccaaactgccttcccctcagggctcaagaatgtgtacagtctgtggggccggtgtgaacccactattttgtgtccttgagacanttgtgttgtggttccttgtccttgtccctggcgtaataactgtccactgcaagagtctggctctcccttctctgtgacccggcatgactgggcgcctggagcagtttcactctgtgaggagtgagggaaccctggggctcaccctctcagaggaagggcacagagaggaagggaagaattggggggcagccggagtgagtggcagcctccctgcttccttctgcattcccaagccggcagctactgcccagggcccgcagtgttggctgctgcctgccacagcctctgtgactgcagtggagcggcgaattccctgtggcctgccacacttcggcatcagaggatggagtggtcgaggctagtggagtcccagggaccgctggctgctctgcctgagcatcagggagggggcaggaaagaccaagctgggtttgcacatctgtctgcaggctgtctctccaggcacggggtgtcaggagggagagacagcctgggtatgggcaagaaatgactgtaaatatttcagccccacattatttatagaaaatgtacagttgtgtgaatgtgaaataaatgtcctcaactcccg

SEQ ID NO: 360341 - DNA, 549 bp, Homo Sapiens
  misc_feature (151)..(151): n is a, c, g, or t
  misc_feature (173)..(173): n is a, c, g, or t
  misc_feature (192)..(192): n is a, c, g, or t
  misc_feature (523)..(523): n is a, c, g, or t
cttctataatttcccagattctattatgctcataactgtttcaaaggtttaacagctgcaatttaaacatttcaaatgacaatacaaattcctctctcaaacagaaatggaaatgtccctttaaaagactgataatggtgaaaaacttctncttaccattctacaggtaaaangtatagtctagccagccantgacactgaagatttggggaagcaatgtttttgatccctggccccagcccactcttccatccagctaatcctttagggctctactgtaccttccctagagctccgggccttcagtgatgccttctctctgatctcttcaaagatagaaatttctgtcatgctcatacgctggcttcccatgaaggttcatatgaattaccatctgctctaacaaactactgttaaattgtattttacataaaagttaaatctaattttatttcttctgagggaagctgaactaacttttgaccaggaaaggggagagagtgagtggctgtatcactcatgnatataattaggggtgaggggtaaagg

SEQ ID NO: 360342 - DNA, 1524 bp, Homo Sapiens
  misc_feature (1007)..(1021): n is a, c, g, or t
aattcccgggatacaaagatactttctaacagtagtatttttagaatggcagctataaagttaactctctggacacaagtatatactgtgcactgaaaaaatatccatctacacagcacccaaggggagggctgggggcaccggcacgggggcagcgtgcagccctgccctgtcaggctgtcagacaagccccggggggcagcaggtgggctcgggacgggctgggggagggacggccatggcacttgggggctccagggtgactcccatgaggcctcccttcaaccaggctttttggccccacaaatactttaagcaaatcattaaaattataacagttaatggtttgggggtgtttaggctgtaactgctaactcctaggaaacagccttttccctggacacagatggtccatacgctgagccacgtgaaactgctgatgttttgtttagatgcacacacatggcagcgtttcatacaggtcagcaggttagaccggcttttgaccatattcatcgctatttaaaacctgtggcaaaatgaacgcttattttacagactttctaatttgaccagatttcttaatgaatagacacagaattaactaaaaacagtctcaccccatgtagtgcgccgtgtcctgagagaggtgccctccctacgaggagggaagaacaggccctggggtgcagaggcccggcacgtagagaacccagatagacgccggtggtggaactggtcaaactccacgcccgcctgggaggttgtcaggttgctgtggatgtaaggataggaggtgcccagtgctccgctcaaggaaggctggatctgggccccacctacagagagggctcagggctggaccgggggcattgtgtgcttgggccgacccgggccggtggcagacgctggtcccctgcccggaggatctgcctgaccccaaaccaatggtacctcaccgcagatggttccgtaacgctacccccaccactttgttgtgcgacaannnnnnnnnnnnnnnacctcccgctcagcgcgcgtgcttaccacgtcgacacccccgcaagcccacttccgcccactcggccaaccatgcactgttattattcccgggggcgaccgccgtgtatctacattcgatccacgctccacaagcatactcatgcgcctctgatctttatctaacacgccccgcggcgagaacgccgtcactgccactatcacacgctaccgcacgcactgccgccctcgacgtttaccgccgtggttctaagtacctcagctcaccgcatcccctcgctccgaccagtcgaacccgctcccctcccggtatataatctagaccgttcactaaatctaagctactcccacggtccagcacgccgcgcgtctggcaatcatccttcctctatttagctagcagcactagtatattaatgatacatgcgggagagattactctgtcctcattgtagtctctataaccacaccgacagtgaaccgctctatcttcaccctccgccc

SEQ ID NO: 360343 - DNA, 418 bp, Homo Sapiens
aagcaaccggaacttctgcaacaggatgtccctggccccaggtcctgcagcaccttagtccatactaccagccccacccaccttccttcctcttccctcttctaggacacaggctgtggaccccttcaggtgcactataatggggctggaggggcccccacatctctcagccccactaatgcagaatcccactaccagtgagctagaaggtgctcagaggccaggggtctctactgcccatgccgggcggccttccagtcattgcacagcaaagccatgtgcagggcgtccccctcaaccctgccctgaacatgccccagggcactgagggcgaagccagtgcttgggctctgctgctgggagtctctggtctgtgtctgtgtgtgcctgtaagtgtgaaataaacctctctgatggc

SEQ ID NO: 360344 - DNA, 567 bp, Homo Sapiens
  misc_feature (128)..(128): n is a, c, g, or t
ccgtggtgggtgctggtcttgactttggtgtccactgagtcccgaggctcaggcccaggagggatgcagtccggctgagggcgaggctgtccccaggacatggagagggtgagatcccaaggccacgnggggggggcagggagaacccctcctaccctggatgagtgggtgactggagagctagagaacgtggcagacccaagacctctcagtgctgagcccatggaggatgccccaggctggcgggactgggaagcagagggctggtcttaaaacaggtgtgtccagtgctggaggcaagtccttgtcgtgactgtccagcgccactccatgtctctcctgtccttggatgttggggggctcagcctcttgcatgggtgtcctgctgggcgctgggccccgccactggccccctgcttgctttggggtctgagttagctcctggctccactgagcaggccgtcagctgccagcccaccacgcggatacccaggccctgttccgaggcctggaacagctgcttccgaagaaggggctgccttcagggaaatgcgtgcaccgtgcagc

SEQ ID NO: 360345 - DNA, 1242 bp, Homo Sapiens
agcggtgtggtcctagaaaccaggtggtgttttcctgaggaaatgacattttcctctggatcagagctgaggaaggtgcctctgtgtgtcccgtggccgctgtgacactgaccacacacctggggctggaaaataatactcactctcccacagctctggagcgcaggagccatgggctgaggccagaatgtttgctccaggagcgtccctcgtggtccgttcaggtgcccagagttgcgggccttgcacgccttgtacgccttgttccctggcgcctcctccttccatgtgggtgtgcagcatcccgctccagggccttcagcctctgcgcccctcatctgctgatgcaggtgatggcatttagggcccacctgggtactcctaggattcacctttatcaccgcatgagggagcattcccaggttccagggattagggataggactgggattcctttggggactgctctcccgcccaccactgtgccggaatgtgatgcacacagcggccagcatatacaaaggccccaggaggacctggggtggctggaacaggacctggtgccgggagcaggcggggccggggattcccgacaaaggcttgatgtgtacttgaagtgagcaaagggttttgaataaaccaagaactggatcagatttatgttttttatagatggggtcctttctgtgtgaacggattggagggtcccggggtgggagctgaggcccaggaagagggcgttgcagccggactgatgtatgggtgggaaggcggccgatgcatttctttgccatttttctccccgccgagcttgggtcctcatggagggcggatggcagacatttcactctgggatccgatgcctgtgcatctggaagacttccccaggtgcctgggtctaagaaccaccatctgcctttgagtagagtttccataaatgtaacattcgccaatggatggaagatggccgcacctctaaaatcacagggagcttttcagaagaaaatagaatagcacagcggttctcacggactaagctggcaggggacagtcccctaacatctcagctaacacctaacggtgtctgtgtccggtgaaagcggcttcagcagggacagtcacagagcagcgtggagtgagctggcttgtggggtcgtcttttccgtccccttctatggggcctgggagaagggagcggcagatggccaggccccaaaacgggacatcgaagtcacctccagg

SEQ ID NO: 360346 - DNA, 480 bp, Homo Sapiens
  misc_feature (26)..(26): n is a, c, g, or t
  misc_feature (79)..(79): n is a, c, g, or t
aaatccttgaacgcctgctgtggggnctcggccgggtgcctgcctgaatggtgcaactggtgtaaacccccacccccanagttccctgtccctccatggaaatttgccagcctagtgaggaagatccctcccccaagtcaaataacccacaaggtaactgccagggagagacacccgggataatttcctgtgaaagagaggacatggggtggctccgagagcccctgacagagggaactttgtggtcctagaaaccaggtggtgttttcctgaggaaatgacattttcctctggatcagagctgaggaaggtgcctctgtgtgtcccgtggccgctgtgacactgaccacacacctggggctggaaaataatactcactttagatttttcattttatgtgttcatgacaacataaatatttttcaaagatttagaggaattttgcaatgtgtttgcataaataaataccagtttatgttc

SEQ ID NO: 360347 - DNA, 906 bp, Homo Sapiens
agtagtggactcagccataaattccatgtgaaaactcaggctgttggggagctcatttcttagagcctaggcataaacaaagttacataatagtaaatgatatatataaacacgtaaaagcaatattatatttttcatttggaaagaaaaaatactaatttttgaaaataggtagaaactgagggaaaagaatgatcttaactggtattcgagaccttgataatgccaacacttagaatattaccaattttagtagtagtttgctggctcatctttcttctttttcccctaataggttctgacttatgctggagaggagtaggaagtaatatgagcaggaactcttgggaggccagaacaaccaacctgcgtatggattgtcgaaagaaacataaagacgcaaaaagggaaaatgaaaccaaaataataaatgtcagctggttttgatactgaatgtgaacaaggctcacctaaggaaactgacccagaaaacagttttagctgacaaagaagaaatttcagagtgaaggaattttaaaaatctggctgacggaatatcattctggttgccatctttttctgtggaactcctctgccatttcttcctaagtaattacttcaaaaattaaattcaacttcttataaaggaagaacaagatagtccttgaaaatactttttgtatataatctctttgccctctatcctgagtaactaatggacatcttctcatgcaaggtttacatgaagcctttttaaataaatgagtcaaagcacttgtattttccagcctaggctttgtgtgaattataggctatttgaaattttatttctgattatgtcaaatacaccttccgattttgtcatttttgtttaaactgataaattacaagtcaacattgagtttt

SEQ ID NO: 360348 - DNA, 980 bp, Homo Sapiens
caaggacatcagcacctcacgcccatttacaggcccctcacatgagccactgctccttctctttgatgaagtgctccgcccagcggcgtgtcagctccaggtacaggctgggctggtgaggcaggtagtccaaatacaggcgggtgggtgtcttcttgggaatggccttctcaatctgggtgccctcgtgccactcattgaaggaggtaatggaaacgatctcgggcctcactgtcagggccgcctgcagggccgtctcatagtacttgccattgaccctgttgcgcgtattgtggttgttccagggccgaatgctggtgtctatgtagccaggccccacactggggatgaacatgaggttgttggcatcacaaaagttcttcacagctttccagttctgatgggaagaaccaaaggagaaaccattggaggcaaagtaggtgtacatgccgtcaaatccggcggccaggatatcgtgggtgtggccctcctccaccagcagcgctatgaagaccccatcgtagggcgtgttgcggatcgaatggggcccgtttggtgtcaggaggtgggcccaggcctcaggggacgtcaggtatgagtcgtagatataaaagagtgggaggctcttgcccatgctgttcttatagcggtaaaatgcaccatgggagccatacgtgtcaatgatgtacttgatgttgtcatgtacagtgatgtcatcccggcccttgtagggttggatgtggaaggccacctggatgctgtactgatgggcggtgtccagaatggcgggcaccaggtcatctgagggctccccgttatcatcagccatgccaggtgggtaccaggacaggaccaggacgccgatggcggcttccttgagctgggtcatatgctcccgcagcacttcggggtcccgggagctgtagggccccagctccgggtagaagctggagcccaagtcgtctggggggctgtggcgg

SEQ ID NO: 360349 - DNA, 473 bp, Homo Sapiens
  misc_feature (68)..(68): n is a, c, g, or t
aaaaattgccccaagaggttatatgtgcattccccgaatttaatgcttgactggccccctcttgaaancctgtggtcccaaccaaatcacttttgccagggaattgaggatctagggatatgttgagcacttgagtagaggtgatactcaggattggcactccacttctatcactgatctgattctctgactcgtctgtcaaaagagaaggggttatcctagctcagaggtcttcagccagagaactgcatccaaaatctgtggtctagataatacctaagataacgaccaggtcaaatattacatgactgattgaggcctatggaagggaacatagtacagtgatttagagcccatggtcagagggccctgtgtgcatgcctccaccagatcttagctgtgcaatcttgggtaaattactgtacctctctaagcctcacttttctcattattaaaatggggatacaaattct

SEQ ID NO: 360350 - DNA, 585 bp, Homo Sapiens
acacagtcctcccatacccatacactctctttcatttgcagagtataaacacccatctctcactcattcacataatgaatttcagctccttgtgtcccaatcaaggagaggcctcactggaattatgggcatctgagccatcttcatgttccaaggccccagggggcgcttccaagagtggatcctttatggggagaagataatgggcaaaaaagtgctcttcactgatggaccagtcccagccttttctctccttggacaatagagttcttcccttgaacagccacttccctaaaaaaaattccaaaattctcccacatcatcccctttatgcttaaaatcatcacacactcccttctttgtcctcccctcttgcaaactcaactcagagccctttggctccagaaagattttctaggtatcaggagagagtagcaaagcctccctcctctccttgcctttctcccttgtcagagaaagaagttgattctgtggagaggtaagaaggatcttgaggtctagagcctgaaaaactccttgggctgttctccaaactagatgggaacataaggtgcgattgcatct

SEQ ID NO: 360351 - DNA, 529 bp, Homo Sapiens
ggagaaaaggtgcttgaggaccccactgcctaaggacctgctctaggaaacattcccactccctacaccctagctgcccctcacagtcaacccttaaggacctcaaattcttggcaaggggtaaagagttgaaagtgccaagtcctagtggttttgagaagcctctggtctgctctttctgctctgtaaagtcttagttgccagagtcccctatagcccccacatcgctcccttcctcctgccctccggccaccctggaaactaatggcctaaaggtgctgtggctgtcctcctaaaatccattccctcctgatggggtggaggaatctgtgaagcccaccttcaggagaggtctcggggctcgggctggtgctgccagagaaagggtgactgaaccagaaaggcctaggggaaagcagctcaaactgcagccatccccttagtacgattactaggatgtcccttgccttccttttgcctcctccacccaacccctaaaataaacagtatgatgaaacctcaaaaaaaa

SEQ ID NO: 360352 - DNA, 456 bp, Homo Sapiens
agcttgcggagcccaggtgaacaagctcagcaatcggacatctctggggaaaggaaggtggcacagaccatgttccctggttcctccctgccccttgccaggcttccttattccttactatgggaagaggtcatatcccttccctgcccctcgctgtctttagcaagcaggtttcactgcttcattagaagaggacaagtcaaaagtgaatcatttttcactacttaaggaataaatccaagagctttccagagactggctgctgcagccctgggaatgtctgtggaattactatgtggaaatggaactttgtgttatgctctagacattacagttatttgagtgttactcgttactgttgaggtcagtgcttcgtggcaaatggctgtactggatatcccagctctgctgcccttgttttgctgcatgttaaataaaaccattttcactgtaaaa

SEQ ID NO: 360353 - DNA, 1258 bp, Homo Sapiens
  misc_feature (383)..(404): n is a, c, g, or t
ggtggaccagttccctcctgtggaacagtgggggaacctatgaccccagaggacgctgtgatctccaccttcaagccaggcaggctgccctgagacgaggagggctctggtcccgtcactctccatgccctgacaacagtgcttgtagctttgatgtggaacaggggccctgggcatttctgctgagaaccaaactgctgctgtgataacctctcctttggcccctaaaaggacctgtttttatctacctgtgtgacttgaagtggccatatgctgtcaggggtgcggagtggcccctgacttcactgctgtcccgggaacatggacccccaggcttggcgtaggtgtttgcttccttctactggcattcactgaagccactnnnnnnnnnnnnnnnnnnnnnnagtctctaaagagagactgtcatgggtcattccccacaagagccacatcctcacacctgacagatgcacggcccaaggggctgcagccctgttgcaattccatgcttcccccgccaaccagctcctgctgccatccccagggaggtggcccaggaaggtgcctggcccagaataaggaactggcatactgcaaagtccccagccctgcctctggtggacagcatcgtcctggaacggccacggagtgatgagttgtgtgcttgtccctggcagtggcaggctgtgtcctatggacatcttggcaggacatggaatttggcctcatgacaggccaaactagggataggaaggaaaatgaagagagccagtatttccccttctccagaaggcaggtactcagctttctgggaaaagcgtgcctccagccgtggggacaggccatcctactgactacctcttgcttggcatgaaataaactgctatcctccccttggaatctaccgccactctacatcctactgctttggcctccctctcctctcaccagatggcatgtggtgtggcacctgtggctggacacaggaggcctcaggatcacaaatgttacactagacatatgtcctaatgtgctgcccagaaacctcaactgttccccagctactgaggggcactgtcagcgagatgttgggtctggaggtgatgagatcgggccacacttgagctgagtcaccagaccctattgcttcaacagtgctttggcccccgccagcttgtcccagccacctctaagctgcctgggatgtggatccctgggggaacattggtacttcccaagcccctcccggtccaccaaa

SEQ ID NO: 360354 - DNA, 1665 bp, Homo Sapiens
agcggtttcggccgcccttggacatttacgacgtgctgattcgcctgtctcctcgccatatcccgcggcaccgccaggctgtggactcgccagctgcctccttctgccggggcctgctcagccagccggggccctcatccctgctgcccgtgctgggctatgatcctcctcagctctatctgacgcagctcagggaggcctttggggatctggcccttttcttctatgaccagcatggtggagaggtgattggtgtcctctggaagcccaccagcttccagccgcagcccttcaaggcctccagcacaaaggggcgcatggtgatgtctcgaggtggggagctagtaatggtgcccaatgttgaagcaatcctggaggactttgctgtgctgggtgaaggcctggtgcagactgtggaggcccgaagtgagaggtggactgtgtgatcccagctctggagcaagctgtagacggacagcaggacattggacctctagagcaagatgtcagtaggatgacctccctccttggacatgaatcctccatggagggcctgctggcttgaacatgctgaatcatctccaacaaaacccagccccaactctctctctgatgctccagcattggcgcgcaggggcatggtggcccatgtagtctcctgggcctcaccatcccagaagaggagtgggagccagctcagagaaggaactgaacccaggagatccatccacctattagccctgggcctggacctccctgcgatttcccactcctttcttagtcttcttccagaaatcagagaaggggatgtgtgcactgggagaggctctgtctccttcctgcgtgccaggaccgtgtgcctagactgtagcatcgcctcttgcactgcagtgtcaggcctttagatgggacccagcgaaaatgtggcccttctgagtcacatcaccgacactgagcagtggaaaggggctatatgtgtatgaatagaccacattgaaggagcacaatgccctcctgtgttgatgccacttcccagggtggagacagtggcaaaagaaccgaggacaggaaaggattgggtaggtgaaggggtcaggggactggtagtcacccaatcttggagaggtgcaaaaagcactgggggctacccgttagctgcatctgccctggctgtttgcccgttcatgtcacaaactgccactactatgtacctgcagtggggttgcagagatgggggagactcaagtcttactccccaggagctcccagggcccaaggaggagaatgctgcctcctttcagtctggtctacacccactttctggtagcctctctgcttcctgtaattctggctgtttttccagactcagctcaaatagtgcccctccttaagcccatccctcgcccccagcctgaggtgatctttccctcctctgaactattagagcagttactgtctgttcagttcgtttggcaggcacacacagtggcataaattctattgttttgaactctgatttaaaattaaattgcagctgggcgtggtggctcatgcttgtaatcccaacacttagggagtcaggagaatcacttgagctcaggagttctagaccaatctgggcaacagagagaccccatctcttttaaataaaaagttaaattgctt

SEQ ID NO: 360355 - DNA, 1132 bp, Homo Sapiens
ggctggtacggtccggaattccgggatatcgtcgaccacgcgttcgggagaacccgtttgattacaagcagataattatctcagtgagatgggggttagttcaaggaagtaaggaggggggaggatgtgaggaagttagaacaacccaatgcttatttgatgggctgaataaactattcaggactgaactatttttgagcactgtgaggtggcacagtattacctgcttcaaaatcaactgataccaacatttttatctttgtatcttatctctgtacgtgtgtgtattgaggaaatgctttactgactcagaggaaagatcatgaattctccattggcaaaaccacctctgtcctttcggcaaggctgcatacttccaggcagacgcaccttcacgagaatgctcagctgggcggctccacgctcatccagtgggcctaggttctgactgaccagcgaacaaaaactgtgacagagatctaggatttcattcaggcagtgaaacacctacccgggaaaacagagttggcattaggaaaggaaggaaggtacatccatgaagttaaagtgttaggagaacagtctgattaatagctgatctaattaatagctgacctcccaaatctgacaggatagacactgccacgtgcaaggcctgccagcccctcagacgcacaaaatgcgtaaaacaaatgcatcctttcctggctaagcgagtattactctcttagccctgcaccaaacctccaatctagccacatttaactcttcatttcttagacccgcagagtgtcttcctgcctctgagctgtgagtgttgttccctttgcccgggatgctcttgtttttaataccagttcaagtcccactctctcagtgaagcactcccttccccactatagcctttagtgaaccctcgtttcttgcttctttattatctgtactgttgtccacttggcaattgttcaggcctctgtgttgttactgatttttgtatggaaaaaaatatatatgtcttgtttttccaactagattgtgagctccttaagggcagagccatgaattatacctctttgtatccccagtgccttgcatacagtaagcactcaataaatatttaatgatgatgagg

SEQ ID NO: 360356 - DNA, 354 bp, Homo Sapiens
  misc_feature (16)..(16): n is a, c, g, or t
  misc_feature (224)..(238): n is a, c, g, or t
cagagtgtccttcccngccccgaagctgtgaagtgttgttcccctttgccccgggatgactcttgtttttaatacccagttcaagtccccactctctcagtgaagcactcccttccccactatagacctttagtgaaccctcgtttcttgcttctttattatctgtactgttgtcccacttggcaattgttcaggcctctgtgttgttactgatttttgtatgnnnnnnnnnnnnnnngtcttgtttttccaactagattgtgagctccttaaggcagagccatgaattatacctctttgtatccccagtgccttgcatacagtaagcactcaataaatatttaatgatgatgg

SEQ ID NO: 360357 - DNA, 865 bp, Homo Sapiens
  misc_feature (403)..(518): n is a, c, g, or t
  misc_feature (547)..(659): n is a, c, g, or t
  misc_feature (672)..(688): n is a, c, g, or t
ttagccttcaaaaacggatttacttgaaactgtgaggagaaacaagtgcacgggtgcaggtggcggctgccaggattgctccggtcctacctagtgggtgcctacccaggcagggcacagctcctgctgcaaggtcaccttaccagggggtgcagaggggctcatgatcagatggcacagcgctttcctaatgcaggcaggctacatggcccccagaaacaaccaaatgcagaatcaggccaaaacccacacagccctgaccccctcgtgctctggctggtctcccggtcagcagcccctgagggccggcaggcaggccactgagctgtgggtgacacagggtagtccacggtttgcacagtctcattcccattcaaagacaggccccaaggctggggcgcannnnnnnnnnnnnnnnnnnnnnnnnnnnnnnnnnnnnnnnnnnnnnnnnnnnnnnnnnnnnnnnnnnnnnnnnnnnnnnnnnnnnnnnnnnnnnnnnnnnnnnnnnnnnnnnnnnngttagccaagcatggtggtggtgggtgcnnnnnnnnnnnnnnnnnnnnnnnnnnnnnnnnnnnnnnnnnnnnnnnnnnnnnnnnnnnnnnnnnnnnnnnnnnnnnnnnnnnnnnnnnnnnnnnnnnnnnnnnnnnnnnnnnagaccctgtctcnnnnnnnnnnnnnnnnngtaccagccgcatggagactatctgctgcttgcatcttctctaaataattacggggatgaggagtccagtgatgttcctggtctctccccagaagtacagacaggttgggccacgttaacactggacttgatcatgattccaggagttttattctcaggacaggtgaggttctatag

SEQ ID NO: 360358 - DNA, 384 bp, Homo Sapiens
ccggggcatctttgagccctttggtaaaagtgagtagaagtgagagaaaccctctgaagggaattggaagaagtggggagggtgaagtgtttgaagtgtacttctctgttgtaccctggcccgtgattaacttgcctgccatacgtcatagtgggcatatgagtcctatgcctgtgaaagtttggctccatctctgttcatgtgcttggtggacaaataagttagacacaaatcaaataataggccaggttaagaaagattaaaaaatacaaaaattagccaatgtggtggtgcacgcctatagtcccaactagtcgagaggctgaggtgggagggtcacttgagcctgggaggtcaaggctgtagtgagcctcggaaaaaaaa

SEQ ID NO: 360359 - DNA, 1051 bp, Homo Sapiens
  misc_feature (65)..(79): n is a, c, g, or t
  misc_feature (479)..(488): n is a, c, g, or t
tcaacggtctccagcggacaaagcttgcagagaggggcagtggcccggaggcaagggtggcggtnnnnnnnnnnnnnnnatgggtcacaaaagtagagcaactgagcttgctgcctagcggtgccacttccctgctctgcgctaaggctatcgtcgaaggcccagagacaccttgaccctggaaacccaatccagcacgtcctgcctccccacaaatatccctcaccccaaatcgctgtggttttgtctcctcaaagcgactcccaatggatttggatttattcagatagaactcttcggaagtttttcagatttttcaatttcaagaatttgcatgttttaagtgaagctgaaaccgcgaaggctcaggttacactttaaaatatgcaaggcttccgtgcggccccgacatttggtaaggctcaattgcttaagagataagataggaataaggacattgctttgagaatttggggtgnnnnnnnnnnacttttgtcacaattcagagcttcattccctccggccgtccaggacgtcgagagagcggctggccagagctcagccccggcgcattcgcagggacgtgtcagctgggcaggctataatttgcattattccattaagttaggagcagcgctgataacgactggaaagttcgacggctgggtgggcccgcgacccgcaggcctggcgagcaaccatcgaaaataaaacaattgctgtccttggcggcaaaggcctctatggacgcctccagggcagcgcagggaaccaaagggcaccccagatctctgcgggttcgcgccttgcctcgtgggggacaggaggttctctgtcccatgaggttcagtcaaggacaaggagccgggaggggaaaggggcaggagccaaggagagaaacctgaaagaggcaaactttaaatatatcgtaattctttaagggggtgggctctgtgtttctttgcaacttcacagtctcaccatcctcggctttggagtggatttggcagtgaggacaaggacggaacgccggtaggggagtagttgcttg

SEQ ID NO: 360360 - DNA, 465 bp, Homo Sapiens
  misc_feature (25)..(25): n is a, c, g, or t
  misc_feature (34)..(34): n is a, c, g, or t
  misc_feature (39)..(39): n is a, c, g, or t
  misc_feature (51)..(51): n is a, c, g, or t
  misc_feature (62)..(62): n is a, c, g, or t
  misc_feature (160)..(195): n is a, c, g, or t
  misc_feature (342)..(357): n is a, c, g, or t
ggaaaactgggccctgaaagccagnccctcaggnatggncccccggggaangtttggaaganccaccgccgtaccttggaaatggcccaggctccctgctcccacagaatcccagcgctgggccaaagggacacaaggaaacataacttcctgccataannnnnnnnnnnnnnnnnnnnnnnnnnnnnnnnnnnnaagtagcaaaggaccattaattagaagaataattactgctaccctatattatcccaacctgttcaatttctatctgccgcagacaatgctaataatggcaattattgcttctataaacatcccgaggcagcactcttccccccgcannnnnnnnnnnnnnnnttaaagaatatatataaaaagttccccggctcatttgcatagcttcatctttaccttttcccattcagcccttgcaaaagcatatctattcaaagcccttgcaaaaag

SEQ ID NO: 360361 - DNA, 350 bp, Homo Sapiens
  misc_feature (41)..(41): n is a, c, g, or t
  misc_feature (271)..(271): n is a, c, g, or t
  misc_feature (339)..(339): n is a, c, g, or t
cagagactgcctgcttttataattcatcccccaacagcagnctattgcataacacattgttaccacccacaccattttgttgagtaaatgaatgaatgcatgaaccgaatcagaggattctattgtctaaataaactttggaggtgacttagtcttcccttccctctgatccttagatcttctttatctctcagttcaacatatattgctcaaatggttcctaggtgcaagggatctggaagttattaaaatgaaatagattttggaccantgacctttgacaaattatgatctacttaggagagataatatggaaatcagtataatactactagaganagtaaaaaaaa

SEQ ID NO: 360362 - DNA, 1067 bp, Homo Sapiens
  misc_feature (56)..(72): n is a, c, g, or t
  misc_feature (165)..(165): n is a, c, g, or t
  misc_feature (261)..(261): n is a, c, g, or t
  misc_feature (909)..(921): n is a, c, g, or t
attgtacatgatcagttatagggctgtaatcattaattgttggcttcaaatgtggnnnnnnnnnnnnnnnnntcatgccaaggagggaatggggtgtttcaagtcaggcagcgatgattctggaaggttggaaatgtaaggttagaagcttggctggtcttagtnaacttgttcccttgctcccaccaagaagaggtaccaaatgtgagacctgagatctcctccaatatctgtcctctgcagttccgggaaactaatcantgaagtacacaatgcagcagctcctccacttcctttcctccgaggtcctcctttccattctcccacctaagatactgacacaccgccatggtttccacattggaagggcagaacactgtgcagtatcgtgcacacttggctgggttaggaatagaggcggccctaggggtcaccttcatgcaagtattgacagctaaaaattaaagtcccttagaggcagttgacacagatactacgttctagaagagaattaaatttaaacgtcaagtttaaagggatcataattctgcaggtatctttctctgagtgactgaatgtgactattgcattagggtaaatgaattaagacgtgcaagtgggatttactgtatgttagaaaggagttttgcagccaagactgccttgaataaaatgtgtttgcactgaaaaaaaattttaaattacttggtctctggttgctgtaaaggtcatcccaagatggatgttctgtttatattgtatagtatttcatatgaaataattacagttcatgaaatgtcttccctaatgttactgatttataacagcacatttgtaacatggtttttatcgtgtcagtgtaccatactgtaaatgatgattacttgtcatgcttagtataataacttnnnnnnnnnnnnnggacagggatttttgtaagtctatatttgaaagtccctccctatggtgatactgtgttcatgttgtttatgtagtgttgtgtgaaatatccattttggattgtgttactttttaagatattaaataacatttggttatatgtcgaa

SEQ ID NO: 360363 - DNA, 275 bp, Homo Sapiens
  misc_feature (18)..(18): n is a, c, g, or t
tcaagcttggcacgaggnaaatgagtttcaacatgaaatccttaacactgaactagtcctgaggcctcagcctgctcactagataccagacctctaagaaagtagaaacagtgctggtttcatactttttacccactcgattttgtgctttatagggtagacaaaaaggaaaatgagcagataccaaagtgatcctaagagcaccaaagatcacactgctcttagcagctgggtagctctacaagttaacttgaatgctgagttcccacttgctg

SEQ ID NO: 360364 - DNA, 467 bp, Homo Sapiens
agaagggtctgatttacaattcattagtttctttgcttcaagaatgaagcctcctgtcctaaccatccttaaccccaaagcaggctaccttctccacagcttctcagctgggggataatgtaagttacctctatgcacaaacaagtgtatctctgtcaggatatcatgcagtgccaaccccttcagagttttcaactctgtaatatctagaggagcagttaaggcaaagggaacaagttccagaacaaacatactgcagagaattttgaatccaaacccgggcaagagactttttaaagtaaggcttttaatcccaacacaactgtttctctttcaacttgaagctgcacgtgttggactccaattctttatttttctttgtttcatcttcagtaagggctttctgaaagatagagttgtaactccttctagtagagaataaagccaactgcgttttcttttaaaaa

SEQ ID NO: 360365 - DNA, 1632 bp, Homo Sapiens
  misc_feature (15)..(15): n is a, c, g, or t
gaaactagaagagangcggtgacaagggcccgcacaccgtctaagtagcgaggcctgggtggcgaattcggcacgaggctgtaagtgccagggtctcagggtcaggtcgcggctggtcactgtgcaggcgcttgggtgacgcgacgatctcagcggatctggtcaccttcgtctccccgccatggagacctcagcactcaagcagcaggagcagcccgcggcgaccaagatcaggaacctgccctgggttgaaaaataccggccacagaccctgaatgatctcatttctcatcaggacattctgagtaccattcagaagtttatcaatgaagaccgactgccacacttgcttctctacggtcccccagggacaggcaagacatctaccatcctagcctgtgcgaaacagctatataaagacaaagaatttggctccatggtcttggagctgaatgcttcagatgaccgaggaatagacatcattcgaggaccgatcctgagctttgctagcacaaggacaatatttaagaaaggctttaagctagtgatcttggatgaagcagacgccatgactcaggacgcccagaatgccttgagaagagtaattgagaaattcacagaaaataccagattctgcctcatctgtaactatctgtcaaagatcatccctgccttgcagtcccgctgcacgaggtttcggttcggtcccctgactcctgaactcatggttccccgcctggaacatgtcgtggaagaagagaaagttgatataagtgaagatggaatgaaagcactagtcactctttccagtggagacatgcgtagggctctgaacattttgcagagcaccaatatggcctttgggaaggtgacagaggagactgtctacacctgcaccgggcacccgctcaagtcagacattgccaacatcctgggactggatgttgaatcaagatttcaccacagcctacagaaatattacagagttgaaaactctggaaggggttgggcactgcatgatatcctgacagagatacacttgtttgtgcatagagttgactttccatcttcagttcgaatacatttattgaccaaaatggcagacattgagtacaggctttctgttggcaccaacgagaagatccagctgagctccctcattgctgcatttcaagtcaccagagacctgattgttgcagaggcctagatgctctgagggccattcacaattctcagggctcagcagtgatgggagaacagaggacagttccaggataaactgctgcctggggctgtgggatgaatcagtcaccccgaatcttggaaaaacccccttccaggagaggatgggcaggcatttaaaaagtaccatttttgtggttgtttggagcagggatgtacaaaataattttaatgtattaactcatactgcctgtcttttataggggaaaaaaataaccttttttattttaaagttataaggtttttaccttttagttgcttggatgacagggaattagcctaccccattttggtctggaacagaagactttcaaatttaatatggtccaagtgtcttcctactcaaggtaaacattatctccaaaattacatttatgattctaaaaaaaa

SEQ ID NO: 360366 - DNA, 382 bp, Homo Sapiens
  misc_feature (30)..(30): n is a, c, g, or t
  misc_feature (35)..(35): n is a, c, g, or t
  misc_feature (150)..(150): n is a, c, g, or t
tcatgctgaagataatgatccagctttgancctgntggtcaggaggggaggtggggacagatgctggagagaggaactccttatcttgtaaggtcccttcccttagtttctgcatggtctttaagcaaaagaggacctctgtcttccaanagaggcaatgggtcacttctgcaggccaggaggtacaggagaatctgggggttcaatgtctcaagagtgtctcctcagatagtccatctcagatatcagggaccccacccttccctttggggccctgactttggagaagggacttccctgggctggaaatttggccttctctggagtcctgcaccttgtcttctgccctctgacccctggctatagaagagaagcatttcgt

SEQ ID NO: 360367 - DNA, 452 bp, Homo Sapiens
  misc_feature (43)..(43): n is a, c, g, or t
  misc_feature (73)..(73): n is a, c, g, or t
  misc_feature (80)..(80): n is a, c, g, or t
cctgtaccctgcccaactacgtggagtgtgtgggcgcctgagntgtcctgaaccagccccttcctgccaacgnttacccnacacctggttccagagcccccagcttctcctggagagcccggaccctcagggccctgaaccgtcgctctctggctgcttcctctgtcccttgagggaggaagtcctgggacccagggaggggaggggcctttgtctagggaagggactggtagggaagggacgagtctaggctgagggcaagatgggaggtcagaggtgacagaagcgttcaggggtgcctgggcctccccaggagctgtggactcagttcctgacctctgctttggggttcctggggtgggcttggggtgagtgtagttctggcctagcagcaccctcttgtggcttgttctagcgtgtattaaaacttgacacacacccacacacaaaaa

SEQ ID NO: 360368 - DNA, 433 bp, Homo Sapiens
ccctaaagctgtccttccaagtccagattgccctggggtatttgccacaaaaaagaaagcatgtacattatcctatcgttcatttaagtaaaatggtaataaaatattttaaggggcctattaatatttaaaatcccttttcctacctatggcaaaaatctacagagaaactgaactggcaaaattaactacctggagcaaaacagatgtgcagatctaactaaaacagagctatagtgaaacaaaatgagattgtaagaagacattaaagctattgatttgatttttccatagcaagcaccaaaagcttatattcacagttcctgtgtttcatattagacttatagctgaattggtattttgctgaaaattcctagaaaactgcttgatgacaataaaaagtaaataaaagcactgctaccttcaaaaaaaa

SEQ ID NO: 360369 - DNA, 746 bp, Homo Sapiens
  misc_feature (16)..(16): n is a, c, g, or t
tgaatgtccccagcantggtcatccagccaccagtgccccccacacaaatgggcctcaggatctcaggccttccacgtcaggggtgaccttccggagccccctggtgacttccagggctcgctcagttagcatttcagtgccatctaccccacgacgaggtggggccacccagaaaccaaagcccccttggaaatgatactctttcatcagggttgcctatggggccacggcgacaggtatggccccttgccagggtaggaggacattcatcacccagggaaccccaggtattaaagaagcccctgtgggggcagacagacatagcaggggtgggcagtgcctccctttatcctgacaatctctagtcgattcttgcctttttctcccgattgcggatttgggggccacctctaagatgcctctctccagccctgtctcaaccatactccaaattagtgccaacccaggggcctggcacctcccacatcatccattgtcttgctgccaagtgcgaataaacggtgtgattgccaacctggagggtcccctcttatcccttcaagccaagcttcctgctcaggattagtttccagctaagtctgcaagccctagaggagtttttccaggctgtctgtgaagcctggggaacacaacggcaactgggagatttgtgagtgaacactgtttcatcttaatatgcttctgaatttattttcatgtactaaatagatcagctcatcaaagc

SEQ ID NO: 360370 - DNA, 417 bp, Homo Sapiens
  misc_feature (40)..(41): n is a, c, g, or t
  misc_feature (64)..(65): n is a, c, g, or t
  misc_feature (76)..(76): n is a, c, g, or t
  misc_feature (91)..(91): n is a, c, g, or t
  misc_feature (105)..(106): n is a, c, g, or t
  misc_feature (200)..(200): n is a, c, g, or t
ttaaatgaaattaaggccagggcaccagaaaaggcaaacnnatggcatgttttctcacttattnntgtgggagccncttgaaaatttcaanaacaattgaactannatggacataaagagtagaagaatggttaccagaggctaggaatggtagtggggggctgaagggaaggtggggatgtttaatcggtaaaaaaatntttagaagaataagacctactatttgatagcacaatagggggactatagtcaataatgcacatttaaaaatagtgtaattgaatggtttgtaactcaaaggataaatgcttgagggaatggataccccattctccatgatgtgcttatttcacattgcatacctgtatcaaaacatctcatgtaccccataaatatatgcagctattatgtacccac

SEQ ID NO: 360371 - DNA, 485 bp, Homo Sapiens
  misc_feature (79)..(87): n is a, c, g, or t
  misc_feature (315)..(315): n is a, c, g, or t
  misc_feature (357)..(357): n is a, c, g, or t
  misc_feature (393)..(393): n is a, c, g, or t
  misc_feature (426)..(426): n is a, c, g, or t
  misc_feature (436)..(436): n is a, c, g, or t
  misc_feature (443)..(443): n is a, c, g, or t
  misc_feature (453)..(453): n is a, c, g, or t
  misc_feature (465)..(465): n is a, c, g, or t
  misc_feature (475)..(475): n is a, c, g, or t
tctcacatgtcctcagtgaacttgttctgatgcaggcagatgagcagctcttaatctgcctgaactctcaagtccccannnnnnnnnctaaacaacagcaacagaagccaatttagcaataacccgcggcactggggctgcacataagttttgtccccaaatcctacttctgaaagtttattttgcgatatgacctcactagttacacagaacctgaacatgtcctcagcagcactgcatgtgatagttaggaaaggacatgtaaaatattcttaaatatggatatgtattaggataaattattacaactggctnaaaaaaggaatgagggcaggaaatgtgttggacacaggaaangctaacaggtaggtggaaaagggtgagctgttggcntgttgttattatggatatccgtatggtaatatntgtgtttggnttatggncccttttttnaccccttaaccnggtttggggncgggtttccc

SEQ ID NO: 360372 - DNA, 833 bp, Homo Sapiens
  misc_feature (788)..(788): n is a, c, g, or t
  misc_feature (794)..(794): n is a, c, g, or t
gaatcccattgaaatgactggagaaatattaaaataaaatatagcagagttggaaaaccagaaatttgaacagtgaaatttctggaagataagaagcagatgatttaagtaccagttaattaaaggatggaacagctaagccattccactcatctttggagcatctgattctggagtttgccaccaggctaagaaagcagctatctgaagtgggagctctgacccaagaaatgctgggatcggagaataagggaattatccaaaatggctccgaagaggaactgaagttaagctgcccacatgatctctctaactatgatgacctgccacttccgtttataatcaccacataagtgcctgtaatcatttgtgttcattaaaagtgaaccagaattcccatttggatgaaaaaataacacttccaactttaatcttaggccctcatttataaatatggacaaccaagaatcatcaaatttgaagaaaaccagtaacataaaaggaggcatgaaattaaaattaacctgttcaagaagatagttactaggagaaacatgaaatttttaaattaatgaatcaaaatcttcagcaattcataaagatactgtgttcataaagaataggatgccatgaaaaaaatatttagagtttctggaaattaaaaatttgattatgaaactgaaacactcagaagatggactacacagcagaatggattcatttgaagcttaaattcatgaaatggaaggtattaattggtcttagacgtttcatcagcaacttaattncttagnaaaaatctttctcagagtaactaagcaaaatgaacaatg

SEQ ID NO: 360373 - DNA, 1095 bp, Homo Sapiens
gttagactaaggagtagtgatagacatttatagagaatgacttaacacttcagaaagatcactttgattagatgtcctttagtatttggtattcggtttatattattatacaatcttgtcctctttttttaagcaaccaggttttcctgtgactgtgacagtagagagtccttcatcctctgaagttgaagaggttgatgattcttcagagagtgttcatgaagtgcctgagaaaactagtatagaacaagaagcattacagctggaacatgaaaatgcccagttaagaaatataaatttctctttgtctgaagcccttcatggcacagtcattgacaaatatgatcctggagtgatgaaggtgttttggggcagcattgagaattcttttcagaagtttcatgctttcttggatctccttaaagatgctgggcttgggcagcttgccacaatggactgggatagatcagtcagatgtgttcaatgactaggtcatccccaggatgacttctaactgttagtaatccacgctgaaagaagaaaagaaggcgcttgaagatgaaaaaccagaaccgaagcagaatgccctagggcaaatgcaaaatatccaggtttctatttgtatgcagtcagcattacaatgaaggaacagtaatgaagtttcagaaaattacaggtgatgctagaattcctttgcgcatcgtcgactgcctgtatcctggtgcgccacgttgtcgtacatccacgacgggcttcaggaacattccgagcaacaacgtaggagtcccagctactgagcagcggcaggagtcttttgaaggattcattgctagaatgtgttctcctgtcagccagatgcgagcttctggaactggaagtcaaagaaaagaagaggagtggtccagaaatagcagatcttcttcagagaataagaccaaaacaggggatataccgacagacactctgataagcaacagcctggaaaggacctgcattctctgatctgactgtcctgaaaaccagaaaagcaaagaaactagggaaacatagttctttggttaatgaaccaaattaaaagtaggtctatgaaaaaat

SEQ ID NO: 360374 - DNA, 679 bp, Homo Sapiens
  misc_feature (342)..(409): n is a, c, g, or t
  misc_feature (602)..(614): n is a, c, g, or t
ggctattacttattgtatgagcttttgttgtttacttggaggttttgtcttttactacaagtttggaactatttattattgcttggtatttgtgctctgtttaagaaacaggcacttttttttattatggataaaatgttgagatgacaggaggtcatttcaatatggcttagtaaaatatttattgttcctttattctctgtacaagattttgggcctctttttttccttaatgtcacaatgttgagttcagcatgtgtctgccatttcatttgtacgcttgttcaaaaccaagtttgttctggtttcaagttataaaaataaattggacatttaacttgnnnnnnnnnnnnnnnnnnnnnnnnnnnnnnnnnnnnnnnnnnnnnnnnnnnnnnnnnnnnnnnnnnnnctatataaacaaacaacaattactgttatctatatgcctttcagcgaaaacttcctttaaacccaccctggatacccgacaggttcatgcatggcctcttgcctgtcaccaccccccagaataagtctacttccgaatcacctctcccttcggcccaaagatgcaccacttggcccatccagtagtggagttnnnnnnnnnnnnntttcttaacaatgatatctgtctatgctccgcctggcgtgcgatcggttgtcgcttcacccaccg

SEQ ID NO: 360375 - DNA, 759 bp, Homo Sapiens
  misc_feature (489)..(571): n is a, c, g, or t
  misc_feature (626)..(626): n is a, c, g, or t
  misc_feature (634)..(634): n is a, c, g, or t
  misc_feature (647)..(647): n is a, c, g, or t
  misc_feature (683)..(683): n is a, c, g, or t
taacattccacatcgtcctccctttctctaagaggccatctctaagatgtcagatgtagaggagagagagcgagagaacatcttccttctctaccatcactcctgtggcggtcaccaccaccacctctcccgcccttaccagcagaaagcaatgcaaactgagctgctttagtccttgagaaattgtgaaacaaacacaaatatcataaaaggagctggtgattcagctgggtccaggtgaagtgacctgctgttgagaccggtacaaattggatttcaggaaggagactccatcacagccaggacctttcgtgccatggagagtgttggcctcttgtctttcttccctgctttgctgctttgctctctgaaacctacattccgtcagtttccgaatgcgagggcctgggatgaatttggtgcctttccatatctcgttctctctccttcccctgcgtttcctctccatccttcatcctccattggtcnnnnnnnnnnnnnnnnnnnnnnnnnnnnnnnnnnnnnnnnnnnnnnnnnnnnnnnnnnnnnnnnnnnnnnnnnnnnnnnnnnngtaaagccaagtaggctttaagataaagtgggtgggtcttttgggatgaggggantaaggcanttttaaaataaantaccaatatcaggaagccattttttatttcaggaangtaaggaaccatatttcagggtatggaaagtttaaccaggcatcctttggggcaatcctaccaatgcaggagtttt

SEQ ID NO: 360376 - DNA, 746 bp, Homo Sapiens
aactttatttcaaacatacattatgtgtccaagactgttatggccaatattgtgttttagttttatgttaacatgataaagtcatgtgcactgtaggaccatctgtccctgtccacccttcacagctgcccagatgcagagggtcgcgcggctgtgtgtgaggagtgagcctccctgctgcccccaggggctcctccgggttgtctcaggattctctgcaatccaaatgtatccattctggctgaagcccagccagaatcccgagtggaagaaacgggggaaaattcatattttccttctgtttaaacttcaattccaaaggtgcacagatgtattcataaaggaagacattagatccagccattgtggccaccaggctctgtggacccatctcagtggagaattcgttttggacccatggctccgtgcagctgtggactcgagtgccatccactggtgtgagtcttgcggggaggccacaggaaaacgttctgtgccaagtgccgcctcgctgtgtccggcatgggactgcgctggagggtccggcgtggaaggcagacctcctgtacctctatcgttcccatttgtggcatccaaaggcggaaggctcatggcttccccactagaggcggcgtcttgggctttcccattggattgtgaaaggcattaagactgtttggagatgttggctgtatttcctgtcacatcaggttgtatgatgatgaataaaaggtgctgtgacccgt

SEQ ID NO: 360377 - DNA, 153 bp, Homo Sapiens; identical to SEQ ID NO: 162376

SEQ ID NO: 360378 - DNA, 1952 bp, Homo Sapiens
  misc_feature (805)..(815): n is a, c, g, or t
  misc_feature (834)..(862): n is a, c, g, or t
  misc_feature (865)..(882): n is a, c, g, or t
  misc_feature (1489)..(1536): n is a, c, g, or t
agcggctttcctcttcacattccatggtcaaggcaaagataaagatttgaattctaagtcagccagtgacctctcagaagatctgttcaaagtacacgattttgatgtgaagattgacttacaagttcccagctcagagtcaaaggctttagccatcacctccaaggctccgccagccaaggatggggctccaaggagatctctgaacttggaagactacaaaaaacgacgagggcttatttgagcacacccagcctgctgcttctgaccctgcatgccccatcgcagcgtcccacctttcctcctttcctttgatttagcctctttgggctggagcagctgttgaactgggaagagactctaaactgccagtcatctgtaatataaaccatttgctgtatagacctcctttgtctgcacaccatctcccaccagcctcacctcccccagggccccacccagtgtgggcctgggctctcttgggctttatccatgtctttagatttgtgtttgccttttgtttttttaaccgcgcagttcattggccactctgcacgcattcagtattaccatggagctgggaatcttgcttggagccccctggggcaatagcagcagcaccaggcggtctcctctacagactgccttggcccacccattgaacattcggcacgtgaccttgtggggggagcggggattgggcacctgcgatcctctttcctctcttcaatctttctcttccgcccttctttttggaagaaggggtttcaaaaccagtttagtttccaaaaagtgtacatttgtnnnnnnnnnnntctaatttgagagcgagannnnnnnnnnnnnnnnnnnnnnnnnnnnngannnnnnnnnnnnnnnnnnaaaatgcagtactctttgtatcagtctgtcatgggtctatagctgtttcagatttttttcagctgtacttgagcatctgaaactgcaagaaagaaactcattaaatgtgattcttcttactaaacaggcctgactgctgtagctgtgtaacttccccattcccacctactcttcccatcctttcccaactttggagaaaactccccagtttagccccctgacctgcaggctgtgtcctggcaggtgtgggagggaagcccatggccaggtaccagggagggcagtgaatgtcttgctcttcccatgggtacagcccacagcttcttggctgaacgtagaacttctttttctcacccagtataccagcctcttcctggtgattctgttttgctgctttggcaagaactacattttgtttttaagagaaatttctgaatatgaatgtggagagcaaacacaaaaagatttaagttacgcccgggtgcaagtagcatcacgccctgtaatccccagcacttttgaagaaggccttaaggcggggtggaaatcacctggaagttaaagggaagtttgaaggaacccaattttgtacctaaaacaccgcgtnnnnnnnnnnnnnnnnnnnnnnnnnnnnnnnnnnnnnnnnnnnnnnnnctttttatagtccctcggggacatactgaggattgtgtgaggcgccatatggcccctctgtttaaatccaccccaggctattaaccttcatggaggaggggggcgcattcaaatcaaccaagcgtgagcataattaccacactattgggacaatacttattggtgttaaccggctcccgataacggatctgcttcgcctcagcagataccccaaaagaatatagaatgggcactaaatgtggatctaactaccacaagatatctgtgcggggtgtgcaaccattatatctgggagtataaagtccttccaccccatctaaaaaaataataaatatattagaggggttatggaagaaaaagaggttttcttccaaatacatataagattccgcgcgccctatattatgtgacagggt

SEQ ID NO: 360379 - DNA, 430 bp, Homo Sapiens
aagaactgtaaaaaatatttccatagggtatagaaggcatttgtaatactgttggttccaaatgtgctgacatgtagcccagtggaggaagatgtttctttggaagcctgcccatctttctgtaacgcaccttcaacctgagataattaagagtcattacgtttcccagtcccatgtcacattgaccagtcctgtggtcctatggctaaagcggaggacacggccacaagctgtgagtcatgaaaaggagggtgcaggtgataggcaaagggacccattagccagtttacaatgactggcaactgaccagatagagcttaccgtatgtccatgtagagttgctcatattagtctgtaaataattctatgcatagtgaatgcagcttctgaattattaaactgatgctataaatgtgaactgacaaaaccc

SEQ ID NO: 360380 - DNA, 325 bp, Homo Sapiens
  misc_feature (176)..(176): n is a, c, g, or t
tcttgctccagtgtgaactcgctggtgtggaacgaggttgcccttttgactgaaagatttcccacattctccacactgataaggtctttctccactgtgaactcgctgacggtgaacaaagctgcgcttatgactgaaagatttcacacattctccacacttgaaaggtctttctnccggcgtgaactcgttgatggctcctaagatgtccttctgaactaaaagatttcccacattcttcacacccataaggtttttctccagtgtgaaatcgctgatgttgaatgaggctgctcttttgactaaaggatttcccacattctcc

SEQ ID NO: 360381 - DNA, 929 bp, Homo Sapiens
gtggaccggtccggaattcccgggatcggtaacctgattctaaggtccccaggttatgttcacctgatgacatgagaatgtcttgtttttggaaagcctggtcatgcaatttagcagaaggtttgcggtgaggtggaaggcatttatttgctttgtcttgctaaccctcaaaatcaaagcctgtcccagcctgacagcttccagcagaaagtgtcagaaccagaggcccagccaaggcccaggcagggcaggcggtcctcctgggccctggcattgttcttacaaatggagggcatggccatcttctctttcagggacaggctggcctgacatggaaggtgaaacaaggcagcagcccctgcctccaggagaactctgcagactgcagtgccggggagctgaggggtcctgggaaggagctatggagtcccatccagcaggttacagccacatcctctaaatgggcgcgatttgtcctgccacctagaaaaagttcacatgtggacagtgagcagccaaggtctcttcagagggaccccaggccagctggtccagcacaggctaagcaagggacccccagagcacaggcctcaagagaaggcctcagcaggcccactgccgctgtccagcttcctcgggccacacaccccgtcacatctgggtctgagaggccttgcgggaagacctcatgggacgcaaggactccctgggcagagggtgggcccctggtcctggaggcacagaatcctcgacccacacgactatgtgacctctttataactggggaagacttcgatgatgatgtgtgatctgggactggcaggttattaatcgagatacacttgttaggagggacagggttcccctaaggcacttttaaagatactctgtaagaaccattaacaataaacttactgtcaatcaaaaaa

SEQ ID NO: 360382 - DNA, 1026 bp, Homo Sapiens
cccggttcccttcctaacaaaggggtttctggattaataacccgccccagtcccagatcccccccatcctccttggaagtcctcccccaggttttaaagaggtccacatagtcgggggggttcgagaaatttggttccctccaggacccaggggccccaccctctgccccagggaagtccttggcgtccccatgaggtctttcccgcaaggcctttcagaccccagatgtgacgggggtgtgtggcccgaggaagcgggacagcggcagtgggcctgctgaggccttctcttgaggcctgtgctctgggggtcccttgtttagcttgtgctggaccagctggcctggggtccctctgaagagaccttggctgctcactgtccacatgtgaactttttctaggtggcaggacaaattgcgcccatttagaggatgtggctgtaacctgctggatgggactccatagctccttcccaggacccctcagctccccggcactgcagtctgcagagttctcctggaggcaggggctgctgccttgtttcaccttccatgtcaggccagcctgtcccttctggggtccccaggcgacctcagagccacccgagtcctgcacgccacggctgcacggaggctggacggtgctcccgctccacttcctttttctaggcaggtcttgactgaagcgggggcctggctcctccattttggatgaaggctgtttgctgaaacacactcctgttccttccagctccagttcttgggagtccttttctagatacttcagccagcgactctctgagggctgcgatttttcctgctgcttcacattcccagcctgctggtgtcccacgttttcttcttcactggcactgacagtttcttctagagacctgcaaaaaggactgcttctctccacaagctttgcatgtccacttgacactcttttttacctggtgcgcctggaagaggcggcagctgcagcagcgtagcacacgagaacgctgaagcgacgcatccggaaaat

SEQ ID NO: 360383 - DNA, 655 bp, Homo Sapiens
tcgctacgtggaggtttggtgtttggataagaggcactgatctttcccaaccatcatccatcgccgtgcgctccagaaagtcagagcaggagtcagcagaagctggaacagattatgttggtatcagccgaaacctggactttgctccaggcgtgcgcatgcagacattccaagtgaccatccttgatgacctgggacagcctaccttggaaggcccagagaagtttgaattacttcttcagatgcctatgggtgcagtgcttggagaaccaaataaaactaccattttcatcgaggacaccatcacggactgtaagcagagtgcttgtagttcctttgattgaaagactttaagagggaaaaaaacagccaagatatgtctcctaacaacagaatgaaactctactgtttatagatcttagcaattctgggatatcagtgatattgtactgtcattggtgttatattctggtgatatgtggaaatgtaatttatatgactgcatggagatagaaatatatatacctagaaaacattgagcccacaaataattagactgtgttcatgttctttttctattttgttttactttgtttctgaggcaagtaagaaatccactgtgatcaattaaatcaaaagttaagatcaaagaaaa

SEQ ID NO: 360384 - DNA, 423 bp, Homo Sapiens
  misc_feature (64)..(64): n is a, c, g, or t
  misc_feature (304)..(304): n is a, c, g, or t
gggactttgcccccaggcgtgcgccatgcagaacattcccaagtgaacccatcccttggatgancccgggacagccctaccttggaaggccccagagaagtttgaattacttcttcagatgccctatgggtgcagtgccttggagaaccaaataaaactaccattttcatcgaggacaccatcacggactgtaagcagagtgcttgtagttcctttgattgaaagactttaagagggaaaaaaacagccaagatatgtctcctaacaacagaatgaaactctactgtttatagatcttagcaantctgggatatcagtgatattgtactgtcattggtgttatattctggtgatatgtggaaatgtaatttatatgactgcatggagatagaaatatatatacctagaaaacattgagcccac

SEQ ID NO: 360385 - DNA, 525 bp, Homo Sapiens
ccgtgtgaggagacccagctctccgtgctgccacttcaggggtgcggcctgatggaggggaagacgacggaggcgaagaccatagaggccacggctccctgcgccggcctggcggctgccccaccacccccagatggaggccctggcctcctcagtgaaggccaggcttccaagcctgcagcggcccgggttacccagccagctcactcggaacagtagccagtgtctggcaggctccagagggtggacggagcggggcccattctcaggtcaaaagcaagatttctactgtcatgtgggatttggatggtcctgggggctccccagcatttctatcctgactgcctcttgggttgtcaaaacccaaggcagccttgacagggaccccccggccctaacacccatcaggagttggagcagttcctgcaggagcctgttccttcccctggtgacgcccccttgcctctgcctggtacccacatgacttggaactgaactaacatttttctttaaaaagcaaaactt

SEQ ID NO: 360386 - DNA, 596 bp, Homo Sapiens
  misc_feature (272)..(272): n is a, c, g, or t
  misc_feature (277)..(277): n is a, c, g, or t
  misc_feature (444)..(444): n is a, c, g, or t
  misc_feature (489)..(489): n is a, c, g, or t
  misc_feature (507)..(507): n is a, c, g, or t
  misc_feature (515)..(515): n is a, c, g, or t
  misc_feature (533)..(533): n is a, c, g, or t
  misc_feature (556)..(556): n is a, c, g, or t
acacaccaaggggggccagctcagcctctgtgcccaccctagctagcaccctgggtgaaggtgaggcctgggtgtggagcacaaaaccacaggcactcactcagggtatcagagcagaaccaccatgcacacttgttctggttgtgcgctgtgcagggtgcccggccctgaggctgtcagggctgagtctacttggaggaaagggcttctttttctaattcctaggaaggtgctgctttcataagcacatgcccttggccagaggcagtagnggctngttcaggattttgggggtcggggtcacaggtggaaggtagaaagatagagcttccactgggtcctcacatcgtgggcctccttctctaacctgcagcccctgccccaacccccactgttcagtgcgagtcctggggcagttcctccttgcagctgctgtggggagcnttggccccggctgggccagcacgagggcggtttaagtgtttttancgcccagcaagcaagacntctttaancggcccattctgttgctnggaaccttttcttctaaaaattnagcagttgaacccattgaatttattgaggtgaagttgttg

SEQ ID NO: 360387 - DNA, 1216 bp, Homo Sapiens
  misc_feature (43)..(79): n is a, c, g, or t
ggataatcactataggggaatgcagcttaccgcggggcggcgnnnnnnnnnnnnnnnnnnnnnnnnnnnnnnnnnnnnnatcaggccaaatcggccgagctcgaattcgtcgagagcggggcggcgacggcgacatggagagcggggcctacggcgcggccaaggcgggcggctccttcgacctgcggcgcttcctgacgcagccgcaggtggtggcgcgcgccgtgtgcttggtcttcgccttgatcgtgttctcctgcatctatggtgagggctacagcaatgcccacgagtctaagcagatgtactgcgtgttcaaccgcaacgaggatgcctgccgctatggcagtgccatcggggtgctggccttcctggcctcggccttcttcttggtggtcgacgcgtatttcccccagatcagcaacgccactgaccgcaagtacctggtcattggtgacctgctcttctcagctctctggaccttcctgtggtttgttggtttctgcttcctcaccaaccagtgggcagtcaccaacccgaaggacgtgctggtgggggccgactctgtgagggcagccatcaccttcagcttcttttccatcttctcctggggtgtgctggcctccctggcctaccagcgctacaaggctggcgtggacgacttcatccagaattacgttgaccccactccggaccccaacactgcctacgcctcctacccaggtgcatctgtggacaactaccaacagccacccttcacccagaacgcggagaccaccgagggctaccagccgccccctgtgtactgagcggcggttagcgtgggaagggggacagagagggccctcccctctgccctggactttcccatgagcctcctggaactgccagcccctctctttcacctgttccatcctgtgcagctgacacacagctaaggagcctcatagcctggcggggggctgggcaaaaccacacccccaagtgcctgtgccccagagggccttcagtcagccggctcactccttcaggggactttttaggaaaagggttttttagcctagggtttttccctcgctttttaaggaacccaagccccccctggcaagggctaaaagccacccaggggccccctggggccccggacaagtgcctacagtttccccccgcgcccgggcaagacgtagggaagccccaattacctgggttcccccgc

SEQ ID NO: 360388 - DNA, 1296 bp, Homo Sapiens
ggtgtgtgctcgcgaggcgcacaagtggacactgagtatctctgtgcgccattggaaaagggagtgtcttaatcctacagatgtgcctagggtagaaacgacatgtaatgtgataggtggaccgcatgtcaccactatgggctacccgccgttgacagatattcaataggataggggtggagccggtggaatatcagggcatccaattttttcatacacgatgtgacaaggacgatctaggggggaataagccctcgttccccataaaaaattgccacaacgaaggaaatggaggcgccatctagttaaagcccccttttttggacaaccaggaccactcggggaagtgtggttggttaccaagcccccggccaagggcttatgagggctcccttaagctgggagttcagactgcaccaggaatggaaacagggtgaaaagagaaggggcgtggcaagttcccaggaaggctcacgggaaaagcccagggcagagggggagggcccctctctgtccccattcccaacggtaaaccgccgcgtcagtacacaggggggcggctggtaacccctcggtggtctccggcgttctgggtgaagggtggctgttggtagtggtccacagatgcacctgggtaggaggcgtaggcagtgttggggtccggagtggggtcaacgtaattctggatgaagtcgtccacgccagccttgtagcgctggtaggccagggaggccagcacaccccaggagaagatggaaaagaagctgaaggtgatggctgccctcacagagtcggcccccaccagcacgtccttcgggttggtgactgcccactggttggtgaggaagcagaaaccaacaaaccacaggaaggtccagagagctgagaagagcaggtcaccaatgaccaggtacttgcggtcagtggcgttgctgatctgggggaaatacgcgtcgaccaccaagaagaaggccgaggccaggaaggccagcaccccgatggcactgccatagcggcaggcatcctcgttgcggttgaacacgcagtacatctgcttagactcgtgggcattgctgtacccctcaccatagatgcaggagaacacgatcaaggcgaagaccaagcacacggcgcgcgccaccacctgcggctgcgtcacgaagcgccgcaggtcgaaggagccgcccgccttggccgcgcggtaagccccgctctccatgtcgccatccgaaaaattccgggccggtgccagcggagagagaggggggggacgatggtagggacgagaaagggggg

SEQ ID NO: 360389 - DNA, 1714 bp, Homo Sapiens
cggcgacggcgacatggagagcggggcctacggcgcggccaaggcgggcggctccttcgacctgcggcgcttcctgacgcagccgcaggtggtggcgcgcgccgtgtgcttggtcttcgccttgatcgtgttctcctgcatctatggtgagggctacagcaatgcccacgagtctaagcagatgtactgcgtgttcaaccgcaacgaggatgcctgccgctatggcagtgccatcggggtgctggccttcctggcctcggccttcttcttggtggtcgacgcgtatttcccccagatcagcaacgccactgaccgcaagtacctggtcattggtgacctgctcttctcagggtgtgctggcctccctggcctaccagcgctacaaggctggcgtggacgacttcatccagaattacgttgaccccactccggaccccaacactgcctacgcctcctacccaggtgcatctgtggacaactaccaacagccacccttcacccagaacgcggagaccaccgagggctaccagccgccccatgtgtactgagcggcggttagcgtgggatagggggacacgagagggccctcccctctgccctggactcctacccaggtgcatctgtggacaactaccagcagccacccttcacccagaacgcggagaccaccgagggctaccagccgccccctgtgtactgagcggcggttagcgtgggaaggggtacagagagggccctcccctctgccctggacttttccatgagcctcctggaactgccagcccctctctttcacctgttccatcctgtgcagctgacacacagctaaggagcctcatagcctggcgggggctggcagagccacaccccaagtgcctgtgcccagagggcttcagtcagccgctcactcctccagggcacttttaggaaagggtttttagctagtgtttttcctcgcttttaatgacctcagccccgcctgcagtggctagaagccagcaggtgcccatgtgctactgacaagtgcctcagcttccccccggcccgggtcaggccgtgggagccgctattatctgcgttctctgccaaagactcgtgggggccatcacacctgccctgtgcagcggagccggaccaggctcttgtgtcctcactcaggtttgcttcccctgtgcccactgctgtatgatctgggggccaccaccctgtgccggtggcctctgggctgcctcccgtggtgtgagggcggggctggtgctcatggcacttcctccttgctcccacccctggcagcagggaagggctttgcctgacaacacccagctttatgtaaatattctgcagttgttacttaggaagcctggggagggcaggggtgccccatggctcccagactctgtctgtgccgagtgtattataaaatcgtgggggagatgcccggcctgggatgctgtttggagacggaataaatgttttctcattcaaaaaacggaaagggccccccagcagccgggaacattggtcggcccgccctcgggcccctcgaaagaagccttttctagaacccaattttcgttttgggccccgccggggccccccaagtaacgcgaaaggtggaaaccttggggtccataagccgtggttttcccctaagggaaaaactccctgggccccatggaactaaggggcctggggcatttctctcccccaatat

SEQ ID NO: 360390 - DNA, 865 bp, Homo Sapiens
agcggggcggcgacggcgacatggagagcggggcctacagcgcggccaaggcgggcggctccttcgacctgcggcgcttcctgacgcagccgcaggtggtggcgcgcgccgtgtgcttggtcttcgccttgatcgtgttctcctgcatctatggtgagggctacagcaatgcccacgagtctaagcagatgtactgcgtgttcaaccgcaacgaggatgcctgccgctatggcagtgccatcggggtgctggccttcctggcctcggccttcttcttggtggtcgacgcgtatttccaccagatcagcaacgccactgaccgcaagtacctggtcattggtgacctgctcttctcagctctctggaccttcctgtggtttgttggtttctgcttcctcaccaaccagtgggcagtcaccaacccgaaggacgtgctggtgggggccgactctgtgagggcagccatcaccttcagcttcttttccatcttctcctgggtaggatggccaggggccggttcttgggtcaagggtggtggagggtggggtcccccacccacctgtaccctgctgtgctccccctgcagggtgtgctggcctccctggcctaccagcgctacaaggctggcgtggacgacttcatccagaattacgttgagcccactccggaccccaaaaactgcctacgcctcctaccaggtgcatctgtggacaactaaccaacaggcacccttcacccagaacgcggagaccaccgaggctaccagccgcccctgtgttactgagcggcggttagcgtgggaaggggacagagaggcctcccctctgccctgatttccatgaagctctggaactgccagccgtca

SEQ ID NO: 360391 - DNA, 604 bp, Homo Sapiens
cccgctaatgtgaagtattagtgacaaaatagcagcctctcttttcaatggcgaaactgtcggcattagcagttttgggtaagctggcggtactataacacgtactggaaacctgttcctcatcaccacctaccagattctggaaatgccgtcttctagaaaacgatggcgtttgtggtggtcttcttttgaaaggaacagtaatttgtgtggatattgttaaagtgtttaaagaatattttgacaattaagtttacattttacaattgctttattttttattaaaatagttgtatataaatattaccctatttcactgttgttcaagtaaatctaaaccttgtagacaagtgagtcatctgatatgtatagaagctgtgatatatagagtacatttattgtgtaaatgtttatgaatataattgttcctgtgtttttataagttggggatattttgttgttttacggcaacaaaatttattgcatttaaatggtttttatgtaatagaaatcacgcaaaatagtgaaggatttaaaatatgtatatgatacatgtaaatgtacaaactttagaaagaaataaatccaacaaatttcaatcatt

SEQ ID NO: 360392 - DNA, 621 bp, Homo Sapiens
cgggtcactgaggaccgatgcatctttgccagtgtaagtcctattatgagtgtgcctctgtcagatggcaagaccttcattcctgggcagggaaacaatgcttacgtgttccccggggtggcactgggagtcatcgccggcgggatccggcacatccccagatgagatcttcctcctgacagcagagcaaattgcccaggaagtctctgagcagcatctgtcccaggggagactctacccaccactcagcaccatccgagacgtgtctttgagaattgccatcaaagttctcgactacgcgtacaaacacaacctggcttcctactacccagagcctaaggacaaggaggcttttgtaagatccctggtctacactccagactatgactcctttacactggacagctacacttggcccaaggaagccatgaatgttcagacggtctgaggcagtctcagaggctagtatggggctagatgaagcccagagtaacacccacaatataaatgggttccaaaatggcccaagtgaatccttgtcgctgtgttttttcttttaaactttctggtgtgagaggagatgccaaggcatacagtgaataaaagccttgtctctgaaaa

SEQ ID NO: 360393 - DNA, 754 bp, Homo Sapiens
  misc_feature (23)..(23): n is a, c, g, or t
  misc_feature (65)..(65): n is a, c, g, or t
  misc_feature (108)..(108): n is a, c, g, or t
aacctcaaatgaacctgcaaaangtgacagagcccctgggaaaccttgagtatatgggtagtccnaactggagaattaagtcccggatagcaatctgggtcaaagggncagctgtagccaaagacctgccaaggtgttaattttcatgtaaccccaaattccttagagggatccagtcatcccccaggggctcatagtagatttgtctcattggagctgtcatccagggacttgattcggctccgtaggtaaacatgaactgtctcaaaagaaagtcttccacctattccccaaggtgatagtccagttttggcactgggcagctgcatccacgttagtcctttcccagtcaggaaagctgccctcattcacaggcatgaaccagctctcagagtggctgcccccaaaggggttgacgtagatggccatgacaggctccagggtgctgttcttggtgagacagatctgcaaggacaaggccaacatcacgtgcaccagcccaggcttgtacttgttgctcttcagggtgagcagcatgcgcttcctccaggaagggtcaaaccagctgcccagccgcatgtcattgctgatgaagatggagtgtacctcaatgcggctatcctgcttctgcagcaggtactttagctccaggtcctgcaagtctgtctccagcccaagaaagttttccagggactcggccacctctggccggcacagcccatgggccagcacatagcccgaaaatgcctcgtgc

SEQ ID NO: 360394 - DNA, 571 bp, Homo Sapiens
gcagggactctggaatgtcctcacggtatagttgatgttcaggtggagctggggtccatgggctaatctcttacacatcttttttctcattagggggtagaacaagaaggcttagagtttggcagctttgttacaaacatccctctggcatttcctggtctctggcacatcataaccaattggaaacctgcagtttggggtagggctggaggatcgctcctgtggaaagggagagccatactgcacggacgtagcgtttccctctacaagcactaggagcacctttctcaaggacaagaaatggtagcaaccaaaaggttggtcgaaggaaacaatccttccttctggtggtgtgatcccggcttcctcacagagcccttttttccttctgcccagctccatcccaccagagtttctacccccgctgaggcatctcctgggcacagaccaccacactctaagcaggctggcctgggagttagggtcctgcccacctcacctgggagttggggtcctgcccacctggagtttagcacactggtcgctcacttgcttccgtcgaacgaatcct

SEQ ID NO: 360395 - DNA, 1024 bp, Homo Sapiens
  misc_feature (11)..(11): n is a, c, g, or t
aaggagctggncctcagtcagcctgatgaggacaggtcagtggccaacccttttgccccagtccttcatctggagacagtcacatagtcacgtcaacagttcacccaaagagaagaggtggggcctggcttctcccacagggcacagcctaactatggagacccagggctccttcctgctgcactaggcctgtgctctccctattgccttcaggtggtgtgatcccggcttcctcacagagcccttttttccttctgcccagctccatcccaccagagtttctacccccgctgaggcatctcctgggcacagaccaccacactctaagccggctggcctgggagttagggtcctgcccacctcacctgggagttggggtcctgcccacctggagtttagcacgctggtcgctcactttgctttggtctgcacacctggtgtgtgcatgtgtatactgcttgtgccatctgtgtacccctctccctggagtacacttgtggtcacactacagtggggacatcaagaatgcaatatttatggattgctgcatgattcttaaaaatgaataaaactgtttacaagggaaggagagctaactgcaaagtaaaaaccccccaaacacaaaaactcaaccttgtcggccgcctccggccctcaaaaaactttcctaaacctttcctttgggccccccgggccccctaagggtaagtgaaccatggcccataacctgtttcccctaagaagatccctgggccaatggactattggctttgggatctctcccccaaaataaaaaacccccccgggcgggacaacccgaaacggtgtcttagaccaaaatccacatatgggaatcttcctgaagggccaattactggggaaccaatccaaacagcgaggtccccaggcgaaggctctcaatattacaaaatttaggcccccgccgccctgggcaaccctcattgcgcaaataaaccgggtgggtaaattctcatataaaccacatctctggccacaaacatgg

SEQ ID NO: 360396 - DNA, 461 bp, Homo Sapiens
tcgcgggatcacacaagcaaagacttctagtcaagcccttcaaccaccgtgggctccccccagggcctggcaggaacgtcacagtggcctcgagcaggagcccccggtgccttatcgcccagctacgacgggggtctccacggcctgcagagtaagatagaagaccacctggacgaggccatccacgtgctccgcagccacgccgtgggcacagccggcgacatgcacacgctgctgcctggccacggggcgctggcctcaggtttcaccggccccatgtcactgggcgggcggcacgcaggcctggttggaggcagccaccccgaggacggcctcgcaggcagcaccagcctcatgcacaaccacgcggccctccccagccagccaggcaccctccctgacctgtctcggcctcccgactcctacagtgggctagggcgagcaggtgccacggcggccgc

SEQ ID NO: 360397 - DNA, 716 bp, Homo Sapiens
atcttaatctgagccatagattcttgagatttaaaaagtctgtccagtgactgcaatctgattatgaataaactattttaactattcattcttgctgaaactgaagtgtacacaatagcacactgttggcatgctgaggcaaaacattgggttcttttgtgttctaccttcaaaacaatctgtttgcatttgaaatataagtgtttaagctttttaggagttagtgtaataagagaatgtgaatatgttgggaaattttcagatgccattaataattgtaattttgttgttaaattaacaaggactttaggataagcctcttgatgtttttgctttaaattggaaagcatgtctgtcaaattggcaagtctcccttcagtttctatatatcaccccaggagagggtctctgagttggtgttgtacctgtaccactcacatgtagctcaagtgtaatttgtagtgtttacattcaagctgggatcttgattggttaaattaatccacataccactgccactgctgaaggaccaggtgttggaatacacagcattacagactataagcaaagcaaacaaaagttgatccttacatatgccatccttctgtgtcattttgtggctgttctgtgtttttcttcctagttatttattattgttaataacttactttttcttacattctgttgtaaataaaatacaaagcaatcttctttgc

SEQ ID NO: 360398 - DNA, 781 bp, Homo Sapiens
ctggtagccaaacttaaataaataatccatagaatatcacatacgttcactccatcttcatctctgaagttagtggagaccatcaaaatgactgtacatttcataactctgggaagatttcaaatgtgaagtgcccctgtgcattttcttggccatagcacggcattcttgctttagctgtgctttcctgggatgagaagatcttggtgtatttaacacataagctttgttagaaatcacctctgaagatcatttcattttctcactttgggttgttgcaagacaaagcaaaggaaaaggaacacaatgaaggaggccgtgacatttttagttgccaccgttgtaactcaaacaatatgggtttgttggtgaactgatttatcaaggcttctgttacggttttgcatctgtgtgtgaggaaaattttaatttatttgggaagtatttattaggccatgttgttggtcctggaaaagaaatctctaagtaggcacagttgtgggtatattatgcagacacttaccacaatacctgcaaaagtaactgtggttttctttcaagacactgtaataaacagtgaactaagagaatagattctgatacatctcgataaatcattctctgcaaaagtttcagggctaatgtattttatgtgtatttttaaattctactttctttggcatctcttcatggctcagcgacacaaagtaataggtcattggctggttacgtcgataggaatttactcttaagaaggccagtgtatagctgactctactta

SEQ ID NO: 360399 - DNA, 853 bp, Homo Sapiens
  misc_feature (234)..(234): n is a, c, g, or t
attgatggggcgaacgcgtcatgatcacttttccacaggagactggctctgctgggttcgctcgtacgtaactgagggtcgaatgcggattgatgtgtgtacttgtagcctgtgtgagtagccaatgcagctgttctctccctccattcttccacaacagtctcgcagtgggcagtaaaactttcccaggcgtagcttctattttgaaacaccctggcagctgggacaccaccnagcacagctgagttccatgctgagctcctgggctcaagaggttgctgactcagggcagcctgcccacccacctatcaaggggagatggcctgcgctggcagccagtacactatggtctggatcccaggcatacctggggctcctacctgacctaaggcacctcaagttccctggagcctcactgcttggcttgaccaggtagggttgagacagacagtgcttgggcaggaagcctcgggaatcaattagacctgagttctaacccaccccaccactttctaggtatgtgactttgggcaagtcgcaacctctctactcctttttcttcagctctaatatggagaaagagagcctggatgggcgtcactgtgaggactgaattagctcgttaatatacaacacttgctacagtgactggcgcttggtaagcagggaatacacacagtattttatcacaagttttcatatttgtaatatttattataatcaatcgtctgctcaagcatgttcaaaaggtcaccctgaaccacacggtccagagtccttacatggtccacaatagaaggcattgatttagctgaacagtcctgaacggagtgcctcccaccagagtcgcgtg

SEQ ID NO: 360400 - DNA, 505 bp, Homo Sapiens
aactcttactgctgcgccagtgacccaggtggagagggaccctgaaccaaacagaacgtgtgctaattttccgaactccaaactgtacactcatattcatttttaaattgtatttttccaaaacttcaaaaaggacgatgaacgtgggggataggaaacaaaacctgtaaacgttgtgaatgggctcagtggactctgggaccaaaccttctgtaatctctaaaacaatgggaccaagagctggatggaacctggagtcaaaaagaactgcttcagtccccgctgtaccgcctgcctagctgtgggagcaggcagggcgcctgggagcctgcgttttctggaccgttccatgggactcatccctacctcacagggctgttgtgaggtgttgtgtgactgcgtgtcctgcaaacgcccagctcggtgcccagccagcggtgggcacccaataaacgctacaacataaatgtgtcttcttgtaattaaacacggatttttattcaaa

SEQ ID NO: 360401 - DNA, 682 bp, Homo Sapiens
  misc_feature (66)..(219): n is a, c, g, or t
acatcatcaaatagaccaacattcatattctagaaggataaattatgttgttaaaaagtttaccannnnnnnnnnnnnnnnnnnnnnnnnnnnnnnnnnnnnnnnnnnnnnnnnnnnnnnnnnnnnnnnnnnnnnnnnnnnnnnnnnnnnnnnnnnnnnnnnnnnnnnnnnnnnnnnnnnnnnnnnnnnnnnnnnnnnnnnnnnnnnnnnnnnnnnnnnattactaagagatgtttaagtacccttagcatgttagtagatacggttatttctccctttagttctcttttgagatttatagtcactcaaataaagagataacccaaacataagcgtcacaaacaggctttcataccattcttaatttggtcctgtaattcttcattgctgtattaattttctgatgcttttaaggatgttttataacaaattgtgtagctttttcccaatggaatgtttattctgaattatctaattcatattgtaagtatagagggagtttaacataaaattattaaactaatatttgtgaaagaatgtatttgtgcatttaacaaatatgttaatcctcagactgttattgggcagctgagcatacaggaataaaaataacacaatttttatgtgtacaatatttatggaatacgttactggacccaataaataatttagttaataacaa

SEQ ID NO: 360402 - DNA, 410 bp, Homo Sapiens
  misc_feature (16)..(16): n is a, c, g, or t
ccaaaaagggataccncaggccgatggtgttcagccatttagcagctgaaaaaggaaacagtgcacaccaatgggaggcagcctgcgtagccctcatcaggcaagacagactgaatgcaggagtgggtgattagctgctccttgaacttgaggctgccttggcagcaggggcacagcaggcctcaagagcccctaattgtctcagggttcaaaggaagacactgacctttcccatcccggtagcttcagggaagatcatagttaataacgtctctcaacaaatgattacttctttgtttccttgtggcttcttgtctgtctgagtcaacgaatacacagacttactggattatagaagagaaaattcacatctgccttgttaatctaataaatataattacagccccttt

SEQ ID NO: 360403 - DNA, 375 bp, Homo Sapiens
  misc_feature (12)..(12): n is a, c, g, or t
  misc_feature (37)..(37): n is a, c, g, or t
  misc_feature (89)..(89): n is a, c, g, or t
taattggaccgnccccctaacatcctgaaaaccctanaaccataatggatacctgaattggttatgtaaaacatccataaatagtaaanaatgaattccaatgtgaattttaaaatgcaaataattgcctattgtttataggaaataaacctaaatataaatgaaattgaatccagtaaatttatccttgggctaaatggttctaccccttactaggttgccccaattagtggcactagttggcagagctgttcatgagctgctagttatcattttggagtcagtttgaaaccagcctcttaacacactgctgttaactcataaaagagaagagtgttccatttcagtctcaataaacacttccctcattctttc

SEQ ID NO: 360404 - DNA, 279 bp, Homo Sapiens
tttttttaaaaacccaaaacacttgtctatgcatgagaaagcattttctctttcatatccattacctaattctaacagttattactttatgtacttccaaactttgtctcttatagaatttctaaaacccagataatagaactttcctttaaattgatttcccttcaacttaccccacacccaaatcccaaaacccagagcgcaaaggctgtgaatccaaatatagaaaataatctggaggtctgtatatcaaatcaaatgtacacttggccattagtg

SEQ ID NO: 360405 - DNA, 571 bp, Homo Sapiens
cagcccttcagccaggatgacttcctgcgtagcctggagcatgctgggccccagctcacctgcatcctcaagggcgactggctgggtctctacaggcggtttttcaagtccccccattttgatggctggtaccggcaacggcacaaagaaatggccctgaagctggaggccctgcacctggaggctatctgtgaggcgaacatcgagacctggatgaaagacaagtccgaggtggaggtcgtggacctggtcctgaaacttcgtgagaagctggtgcgggctcagggccaccagctccctgtgaaggaggctacgctgcagcgggcacagctgtacatcgagacggtcatcggctccctgcccaaagacctgcaggctgtcttgtgccctccctagaacaaagccaagggccacggtcccagggccctaggtctgcctgagcctcccactccccagtggtggcggcactgggccaagcacacgctccccttccttggccccccgcccagactgcaggctccccttcctgcaccaccattgtctcagcagtaaaggcgacatttggaaccac

SEQ ID NO: 360406 - DNA, 469 bp, Homo Sapiens
ctcgtgaacatcaggaagatgaaatgaaatggttcaagactggaacaataccattatctgcatcttgactcctgggagataatgatatctcctgctttcctctacagacctaccagttttctctgctttaagggaaaatccaaatgcatgagacctgtgcattcttctacataatcaagagtctggtttcttccatcggagtgtatggagttaaagtggtatactgtacatggcatggtgtgataggtgggaatatgagctactgggggaaaaagttcttacttctagccacttatacaaagagaggccatctcagtgtaatctgaaaaaatgctcactttataatgctgtatccaaggcccatcaaaaactaaatggatgtatttgtactaaaagttggagaaagttgaatatctaaacctctgagcaaatctttcttaatttagaaaataaaatagagcatcattgt

SEQ ID NO: 360407 - DNA, 414 bp, Homo Sapiens
  misc_feature (317)..(317): n is a, c, g, or t
  misc_feature (339)..(339): n is a, c, g, or t
  misc_feature (376)..(376): n is a, c, g, or t
agggccaacaggctgttattacggctgactcaaccccgcagcctgggcgctgcctcatcattttctccccttttgtctccggatccaggtgagggaatccagtgatgccatccagctgtccatgctgagaacccaacgaggggcttccttcccgctggagcccacgcctgcgcccagcggggaccccgagctcaagtcccggagttaattctccagcttgcagagctgagagacgcccccatcctggcccactctctctgccccaatagaaaaacctgggacccacctggggtcttagggcaaggctgctgggtctntttccggtggggcagcagcttnagcctgacctggggtcccttcccgcctgtgaaccttncctgggtcataagacaaagagaaggccctggggcaggg

SEQ ID NO: 360408 - DNA, 413 bp, Homo Sapiens
cagcacatgtccatgttggggtaaagacgtggagtggtcgtctcgcccatccgatatagagtccagaggcgcagggctcattcccaaggtcccttggccgacggcggccgggtccggctagaccaggctcctgtgaggcagcccagcgactctgtctcctctggctctgcccacagacacactgtcacccaatgctaggagccactgcttgaggaagcctgggtttgtcactgcctgcagccacagactactcctgcctcaaaacgacgtcacgacactgcagagcaggccagctccagctgcacatggccgcctccatctctacacaactttgagtcacagaaatgtcacgtgacctgcagaagccaagggtcctcctccttgggggtctcttttactgactctgtgactcc

SEQ ID NO: 360409 - DNA, 474 bp, Homo Sapiens
agttatgctttattcacttctgtggaattacaagtgagagacacttttaggacctgatggacaaagcaggagattcactgtcagcttccctggtccctctccttacttctgtgggccttgcaccgtcttagtttacacatctgccaaaggggtagaattacacttctttttacaggtaaatgtcaaggcacaatcagttttcaggaagtgcttcaagaccccaggtgaaatgaaaatgctaagtaccctctgaatggccatgcctgttaccaggtgctgcttcttcagatgatggggagcacttttcagggtgaaattcaggcgagttttgcccaggcctgctgtcttgagtacaaatgtgaatgatcgactgactgcttgttgccaaactggaaatgttctgtagggatttactggcatggtatcattcctagaagaaaaaaagagagaaacttgactgcacattaaaaaaaa

SEQ ID NO: 360410 - DNA, 469 bp, Homo Sapiens
  misc_feature (23)..(23): n is a, c, g, or t
  misc_feature (33)..(33): n is a, c, g, or t
  misc_feature (40)..(40): n is a, c, g, or t
  misc_feature (59)..(59): n is a, c, g, or t
  misc_feature (64)..(64): n is a, c, g, or t
  misc_feature (100)..(100): n is a, c, g, or t
  misc_feature (243)..(243): n is a, c, g, or t
aaaacacttttagggaccctganggaacaaaanccagganaattccactgtcaagcttnccccnggtccctctccccttaacttcctgtgggcccttgcnacccgtccttagtttaacacatcctgcccaaaggggtaagaaattaacacttcctttttaacaggtaaatgtccaaggcacaatcagttttcaggaagtgccttcaagacccccaggtgaaatgaaaatgcctaagtaccctnctgaaatggccatgcctgttacccaggtgctgccttccttcagatgatggggagcacttttcagggtgaaattcaggcgagttttgcccaggcctgctgtcttgagtacaaatgtgaatgatcgactgactgcttgttgccaaactggaaatgttctgtagggatttactggcatggtatcattcctagaagaaaaaaagagagaaacttgactgcacattaaaaa

SEQ ID NO: 360411 - DNA, 470 bp, Homo Sapiens
cctccctgcctaactgcaatgccccaggtctttgaaaccctgtcacccaaataaatgatgctgttgtccatgtgcaagcaaccaaattaatgtgggtggaaaaaccccaagcttagtgatttgggcaaattagtttatctgtcacatagccagtggtggtgttaaatcactctctgtttgaggagtaatcactctccccccatcaccaccctgtcttcctttcggtgtggaagttagaacagccaagtcaatccgtttcagtgactgagcgatctacatttctgtgttttgactgccccccaggaggagtatgttgtgtagtgcattttgtttgtccatagtgctgtctcgtggtcctccgaagccacctctaatgatcataattgcctcttttattcttctctagtccgtgtctttgcaaaatgattctgttacctatgctataaattatggaaaataaactcattatg

SEQ ID NO: 360412 - DNA, 145 bp, Homo Sapiens
tgttattcacagttacactgctggtatatggagagacaggagttgaactgagatcctctagatacaaaacctctatacttaagagtataccatttatgatattttctctttaactcacaaataagggcatcgagggtaaactgac

SEQ ID NO: 360413 - DNA, 1190 bp, Homo Sapiens
  misc_feature (946)..(979): n is a, c, g, or t
ggcctgggtggcgaattcggcacgagggtcctggtcccatccgagccgccgtagcgcgagtgccgcgggagttcggcagcccaggtcgccaaggcaacgggctccgctgcgggttgcgggctgcgggcgctaggctgccccggggaggcgctgcggaccggcggcccaggcacggagaggcggcgagaccgcagaattcccgtactgattagtcaacagtggaaaatctgaagagatgcaagcaggaaaaagaaattaaaccaggcctgaggagcgatgcgacaggcatgatggaggtcgagtcctcctactcggacttcatctcctgtgaccggacaggccgtcggaatgcggtccctgacatccagggagactcagaggctgtgagcgtgaggaagctggctggagacatgggcgagctggcactcgagggggcagaaggacaggtggagggaagcgccccagacaaggaagctggcaaccagccccagagcagcgatgggaccacctcgtcttgaatctgaccttgtccaagaaggctggacgagagaccttctgtcccctcccagagggggaaccctggcactggcccagcagcctcttctctgagctccatgtcccagataaaccaggccagactgagaaggctccccagaggcctctgtggcctccactccgggaaagccctctgcccacacccacaggcttcacattcccaccaccttcgcaccgtgcccaggtacactttcaagacactgtaaccacaagatgttatttattgagctggcgccgggacttgggcggggcctgccctacagtgagcagcccacacaggaacgctcctctcgcgagcggcccgggcagggaccctgtcccaacaccaacacctcctctccagcccaatcttctgggtccagacctgcttgtcccttttttagaaaacacnnnnnnnnnnnnnnnnnnnnnnnnnnnnnnnnnnagcagatatggagagagctgacaatcaattcacattttttaagccattttagctaaactgtcattgtgcatctctgaggttccctcatggagctccacagatccatttttagggaagggattttggctcaaaacgatctgaccacctctgccctgtccaccaggataagtgacacctaggacccaggaaataaatgccgatgatttgtgtg

SEQ ID NO: 360414 - DNA, 579 bp, Homo Sapiens
  misc_feature (471)..(471): n is a, c, g, or t
  misc_feature (509)..(509): n is a, c, g, or t
ggcagaagcatgatggacagaatggtttaaatggggtctgctggctgctgcatagagctgaacaggaagggcggagatgggtgtagggagcccagggaagccggccgctaaagtcagccaggtgagagctgtgagtggccagagccaggtatagctgtggggatagcgagaagtggagggacctgggctagggggcagggggacaggaagagtcccggatgcctgtccagaggagtccttggggcctgagactcaaacatcttccaacctagagattgctggactctgccactgaccatggggcaggcctgacttaaatgtggtttcttctctaagaaagtatgggcagtctaggacttggaggctagcccggggcccggcagagggcctctggcatgcagtagtgccaaggacctgctggctctaacctgccccctcgagtgccagctcgcccatgtctccagccagctncctcacgctcacagcctctgagtctcccttgatgtcanggaccgcattccgacggcctgtccggtcacaggagatgaagtccgagtaggaggacttcgcctccatcat

SEQ ID NO: 360415 - DNA, 1170 bp, Homo Sapiens
  misc_feature (918)..(958): n is a, c, g, or t
cacggagaggcggcgagaccgcaggagacacggggaagagacagagaggagggtaaagtgagaatcctgcccgcaccacaggtctggactgctaaccttgaatcctggtttcttaaattctgcctccgcttctgactgaggaccactggattttgaggaaactttggtcttaattcccgtactgattagtcaacagtggaaaatctgaagagatgcaagcaggaaaaagaaattaaaccaggcctgaggagcgatgcgacaggcatgatggaggtcgagtcctcctactcggacttcatctcctgtgaccggacaggccgtcggaatgcggtccctgacatccagggagactcagaggctgtgagcgtgaggaagctggctggagacatgggcgagctggcactcgagggggcagaaggacaggtggagggaagcgccccagacaaggaagctggcaaccagccccagagcagcgatgggaccacctcgtcttgaatctgaccttgtccaagaaggctggacgagagaccttctgtcccctcccagagggggaaccctggcactggcccagcagcctcttctctgagctccatgtcccagataaaccaggccagactgagaaggctccccagaggcctctgtggcctccactccgggaaagccctctgcccacaaccacaggcttcacattcccaccaacttcgcaccgtgcccaggtacactttcaaagacactgtaaccacaagatgttatttattgagctggcgccgggacttggggcggggcctgccctacagtgagcagcccacacaggaacgctcctctcgcgagcggcccgggcagggaccctgtcccaacaccaacacatcctctccagcccaatcttctgggtccagaactgcttgtcccttttttagnnnnnnnnnnnnnnnnnnnnnnnnnnnnnnnnnnnnnnnnncagcagatatggagagagctgacaatcaattcacattttttaagccattttagctaaactgtcattgtgcatctctgaggttccctcatggagctccacagatccatttttagggaagggattttggctcaaaacgatctgaccacctctgccctgtccaccaggataagtgacacctaggacccaggaaataaatgccgatgatttgtgtg

SEQ ID NO: 360416 - DNA, 342 bp, Homo Sapiens
  misc_feature (24)..(24): n is a, c, g, or t
  misc_feature (42)..(42): n is a, c, g, or t
  misc_feature (50)..(50): n is a, c, g, or t
  misc_feature (64)..(64): n is a, c, g, or t
  misc_feature (74)..(94): n is a, c, g, or t
  misc_feature (224)..(247): n is a, c, g, or t
  misc_feature (279)..(302): n is a, c, g, or t
tcctcctacttctcctcttgacancgaggacaggaggggganaagggganacctgggcagaccngccggctctnnnnnnnnnnnnnnnnnnnnntcacatcatactccaatcataaccttgtatattacgcagtcattttggttttcgcggacgcgcctacctaagtaccatttacagaaagtgactctggctgtcattattttgtttatttgttccctatgcnnnnnnnnnnnnnnnnnnnnnnnngggggattccataaaagattcaataaaagacnnnnnnnnnnnnnnnnnnnnnnnntgtataaaaattaaacaagctatgcttcgactcttaaaaa

SEQ ID NO: 360417 - DNA, 687 bp, Homo Sapiens
  misc_feature (133)..(192): n is a, c, g, or t
  misc_feature (222)..(319): n is a, c, g, or t
  misc_feature (539)..(559): n is a, c, g, or t
ctggtacggtccggaattccgggatatcgtcgacccacgcgtcgctcagccctggggtcccagcctgtgcccccagcttcctgcccacccagccccgagcattctcacacagagaaagaacaagcaagggctnnnnnnnnnnnnnnnnnnnnnnnnnnnnnnnnnnnnnnnnnnnnnnnnnnnnnnnnnnnnagggacaaaacaaaacattttcctttgggnnnnnnnnnnnnnnnnnnnnnnnnnnnnnnnnnnnnnnnnnnnnnnnnnnnnnnnnnnnnnnnnnnnnnnnnnnnnnnnnnnnnnnnnnnnnnnnnnngtattttactgatatcaccaggatagtttactctccttctagctttctgcttaccgcacactggataacacacacatacacacccacaaaaatgctcatgaacccaatccggagaaggttccagcaggtcccccaccctcccctcctcctcctacttctcctcttgacagcgaggacaggagggggacaaggggacacctgggcagacccgccggctctnnnnnnnnnnnnnnnnnnnnntcacatcataccccaatcataaccttgtatattacgcagtcattttggttttccggacgcgcctacctaagtaccatttacagaaagtgactctggctgtcattattttgtttatttgttccctatgc

SEQ ID NO: 360418 - DNA, 1061 bp, Homo Sapiens
acctacagtcaagcaaaggacctggcaaagggaagcatcgtgctgaagtatgaaccagattctgcgaatccagacgctctgcagtgtcccatcgtcttatgcggatgtgcggggaaaggcctccattcgaactgtgtgtggcccaagaatgaacggcttcattatctcaggatgatggggctggaggtattgggagaaaagaagaaggaaggggttatcctcacaaatgagagtgcagccagcaccggacagccagacaatgacgtgactgagggacagagagcaggagagcccaacagcccagatgcagaagaggccaacagtccagacgtgacaaaaggctgtgacccggcgcgggtccatccaccccggtgagcaggcccaaggcagcgggggcccacacccctcacacgcaaaactggcttcttctggtcactggtgtctgaaaccaaatccagagcagcctgtggcctgtaaagcatatatttctaatgactgcagactggtgggatcataggagccttctgaatgaccaggactgctttctttggagctgatgaaaatgtactcttttagcgtgttagaaatcacttgttttattatgtttctttggccaagctgggtctagtgtttcttttgctgggaatagactttcaaaagttgtacttctatcaagaaacaaaactgcccttgcagaaatttcaggtcttttgttaagcctgtattggtcttaaggtgcagtattttttaaattattatttatagaaagaatctataaattcttggggaagtgtgttataagctttaataattacattgagctgcacctcagtggtgtgtcattaacatgcagtggggttaatatctgaggcctcagatgactttgtgccttttggaataaagggtaaaataaactctcccagagtaagagctgtatcgtgaattgtcatactaattattgagggggacttatgtgcttttattgaatggagtgctttacaatttttatttttaaatggggttgggatccttggaatatttcaataaaattgataaaatat

SEQ ID NO: 360419 - DNA, 667 bp, Homo Sapiens
gcatcctctctgaacttcagtggggactgggctaagttattggtccttacattcttcattaactctaatgcacctgtttcagggtgttggggtttttctttgtttttactctttcttctcagtcccctctcacaatgtccttacagcctctgcctcagggactgatagaaaggagcagaaattccagggagtaaatggacttcagtgaaatgcctggcttccagcaaaggattctctgaaatggaggcttcacatttcctagttcttttctgggttctaacctcaacaacctcctaggttagagagaggttgcacagattggtggaaaaatctgtgagctacttcagattggagaagaatttgactctgcctaccttctgcctacccctgcttgacagaacctttctgaggacattccatcctgctctccttctacccctctctcttccatctcagacatggtcttacctaagctgagagagaactctggacccaaagatgctgtggcaccatctcagcacttcacatttccttcccccatacaatctttctctatttctgacttctatttcctgtgctgtgctggatccctgattcaggagatgagagcccggctaagcaatgatcctcaactttttttgagtcacagatccctctgagaatccct

SEQ ID NO: 360420 - DNA, 358 bp, Homo Sapiens
  misc_feature (85)..(85): n is a, c, g, or t
acatatgtatatatagtatttatacttgtatattacagagatagagggaaaagacacctcattctcacgccttcaaccataagcnctagttctcctctttttttgcttttaagatgagacacagagggacacttgggggctgaaaggaaggacctccctgctagagctgcacggccaagcccttccttggtgctttctctgctatctccagctctcttgctttctcttccctggggccacatcttctgatcatgaccagtctagtggcattaccatgctgcttcatatgttgtggctcagtgagttgtctgtggagaaacttgactaatgaataatgacagagtagaaagaatgtgaa

SEQ ID NO: 360421 - DNA, 404 bp, Homo Sapiens
  misc_feature (14)..(14): n is a, c, g, or t
gacaaaggcctggngccaacacaatctgtaggtaattgtcacccccaccgccttgggagcagtcctgcgcgcaataggatgatcaaaggtctgcaaaagtaaataaaactcgtctagataaattcctttacactcctttgttacctacttcttgcccttagcgtcagggtaagagaatttagctgccttcagcctttattctctcccgaagctttgcaaaacctcctggacttccaagaaggtttgcgtctctccttataacttttcccaccaccctgactgatctcctacatctcccccttttgttttttgcatcaggttttgttgattgaagagtacagatgtgcacagcagcaggtttgtcaggcgtagcgattactgctcgtataccggctttgcagttg

SEQ ID NO: 360422 - DNA, 230 bp, Homo Sapiens
cccagcattgactatatttgaaagagctacacttgaaaaggtaccatatcttcacatccacactgcataaaaaaaccccaaaatggggtactaaaaataaacacccctccccaaaaaacgcactcaggcatgcacacacatccacacgcatcctctcagttcatcagtgcactataactgagcttcaggggtgagagccagagctcagatgctggaagtaaacctttggc

SEQ ID NO: 360423 - DNA, 1082 bp, Homo Sapiens
  misc_feature (590)..(603): n is a, c, g, or t
  misc_feature (1019)..(1019): n is a, c, g, or t
  misc_feature (1043)..(1043): n is a, c, g, or t
  misc_feature (1066)..(1066): n is a, c, g, or t
gacagttgtgttacatggatatattgcttagtgttgaaatctgggcttttagtgtacccatcaccgaaatagtgtacattgtacccaataggtggtatttcatccctcaaatataattttaaacacacactcgtgcccacatggacaaattatatcacatgactgaggaaacttagaaattccttttccctgaagatctgttaagaataggtctcatctcctgccctggttaggtgctatattatatggagaagggtattgagactttgggggtcatgtttgggctgtgataactggcttgaaccagtgaccatcctttctgcctcgccaaggtctcttataccagcttcttcacatatgctggcttcctcccagctttcccttctgacttcttgttactctgcaactatgtgtcaaggccttaccttttcctgatgttttcaaacctcctgcattactttgatcatcacttcttcagccatctcactgaagtccttggtgctagctgggctttgtgacaactttcaccttctctgaactttttccttgctgggaagcatctgcgtgtgtgagggggctacggagggaannnnnnnnnnnnnnaagagagaggcaaaaggatgcttcaaaagctataaacaactctagcaagcatcctaagtcctatgtgaggttttgcagttctagtgaatttctgttttagtaggtttcaattagcatttactgcctaaaggagaaaaaccatatccaaggaccttttagccatgcttgctattaccaagctggaccagtgtgatgtagatccaacatgtcttcagcttacagatgctctcagaacagttccaaggaattgaagagagctaagtttttatgctgaagagggaggaatgggaggcactagctaggtcctaactattgctaggaaataggaaatgtttattttctcctttattattggggaaattatctaatttaagggagtaacccttttcattagggggttttttttaatggactgncccatcactacaggaatatggttncctttttattaaaattaaaccangtgagggtggggttgt

SEQ ID NO: 360424 - DNA, 414 bp, Homo Sapiens
  misc_feature (15)..(15): n is a, c, g, or t
  misc_feature (27)..(27): n is a, c, g, or t
  misc_feature (312)..(312): n is a, c, g, or t
  misc_feature (329)..(329): n is a, c, g, or t
ccttggggcaacttngctccccaccgncccagctggtggtggtctcgacaccacgctcgttgcggggtcacacgccagagctggaaaggggaggtccagccccaagtaaagcgacaaagtaaggacacagtggtggccaagggctgtctcctaaccccagtcccgaaagacagtgtggaaagtccgccggcgcgccagcccttgaaactctgccggtccggccgcggcccctcccctgcgcgtccccacctgttgtgaagctgcccaagctccttcttgcccaaatgctttggaaactgccaaaggacactnagaggccagggaatgtnacaggcaagcataaatatgcagaagagatggaaccaaaatagcgggcaggcagggccggcgctcgtgggggtcggtgatctggag

SEQ ID NO: 360425 - DNA, 1019 bp, Homo Sapiens
  misc_feature (22)..(22): n is a, c, g, or t
actggccagtacctcgggttanggtagcgaggccgggtggcgaattcggcacgaggctgcccgctattttggttccatctcttctgcatatttatgcttgcctgttacattccctggcctctgagtgtcctttggcagtttccaaagcatttgggcaagaaggagcttgggcagcttcacaacaggtggggacgcgcaggggaggggccgcggcggaccggcagagtttcaagggctggcgcgccggcggactttccacactgtctttcgggactggggttaggagacagcccttggccaccactgtgtccttactttgtcgctttacttggggctggacctcccctttccagctctggcgtgtgaccccgcaacgagcgtggtgtcgagaccaccaccagctggggcggtgggagcgaaggtgccccaggctcggggaaggtggaaaccttttccccgctccccaagtgattgttgcgcgctccggtgaggggacagtggtacctcgatttcccgtgtgccagcttcgggactcagctgtgcttttgtgtctctttgattagcaaaagcaaaacgaattcctccccgaacactaagcttcctggaaacttccctagacctaaacttgagaaccgcatataaaatgggccttgagggtcctgtcgtcagtagcgggttacgtgattgcaaaacgagcaagtttaaaacggaagtgggctttgggctgcaggagccgctggcattctgacagttgagccggaaggcagaggtgagagtcccaagattggactaaaaaatgtcccaggcaggtgggagcccaactcgggccaaaccttcgttgaaaggaggaacattcggtgcagcgtccggaaccttattattatgacacgggccagctcacaggattactttttctaggccaatctgtgaccatcctcatgaaatctctatttggtgcctgtgtcaaacgagcctactgaacattgaacaatatccgaccttttgatctttggattcca

SEQ ID NO: 360426 - DNA, 635 bp, Homo Sapiens
  misc_feature (489)..(554): n is a, c, g, or t
ggtccggaattctcccgaatattgtattaattatttaaagtgtgcaaagcaaaataacaaaaaagagaaacgccaacaaaaatcagcagatgttgaagacaggggtctcgggggtgggctccggaacccacatcctggagtcaggactttcctcagtgactgtgtgtaggggggtttcagggctgaaccccacctccctcccaccttcctcccacctcacctgtcgcacccactgtgaaagttggaatatgtggtctccctggcctcagggctctgactctgccagggtggggctctctaacccacaggtgttggctgcctggcccatgtgcccactgtctcttccacttggtctgggtttggcaggcactgcctgctacttgagggccaggatgctcccccagggaagaaacggaatagtgtggggtgtgtgcagggctgcatcccgcagatggctggaatattaaaattcttctatattggctggtnnnnnnnnnnnnnnnnnnnnnnnnnnnnnnnnnnnnnnnnnnnnnnnnnnnnnnnnnnnnnnnnnnccaagaataacaagcatgaaaaccaccacaaacacagtaccacaccagaccgaaacaaggttttccggggggggccccccc

SEQ ID NO: 360427 - DNA, 350 bp, Homo Sapiens
ggttaaaatcactattgaaaaatacgttttgtgtatatttgcttcaacaactttgtgcctttccctgaaagcagtaacccaagagttaagatatcccctaatgttttgccttaaactaatgaacaaatatgctttgggtcataaatcagaaagtttagatctgtcccttaataaaaatatatattactactcctttggaaaatagatttttaatggttaagaactgtgaaatttacaaatcaaaatcttaatcattatccttctaagaggatacaaatttagtgctcttaacttgttaccattgtaatattaactaaataaacagatgtattatgctgttgcaaaaaaaa

SEQ ID NO: 360428 - DNA, 493 bp, Homo Sapiens
gacaaaatcttactttccagaatcccaaaatgatgtaggaaaacagagtaccaaggaaactctgaaaccaaaaatacatggttctggtcatgttgaagaaccagcatcaccactagcagcatatcagaaaatctctagaagaaaccagcaagcttataatagaagagactaaaccctgtgtgcctgtcagtatgaaaaagatgagtaggacttctccagcagatggcaagccaaggcttagcctccatgaagaagaggggtccagtgggtctgagcaaaagggagaaggttttaaggtgaaaacgaagaaagaaatccggcatgtggaaaagaagagccactcgtaacagcgaacggtcagtcaaggatcataagtttttactgccagtattgagaaattcgtggaagaaatgtcagcaggaagtaaaaattcaccgagaagtgtgtgtgtgttcgctgcttccacacattaatggcatgattttttttatgc

SEQ ID NO: 360429 - DNA, 489 bp, Homo Sapiens
gctggtaccggtccggaattccgggatatcgtcgacccacgcgttcgcaacgcctttcctgtgttatggcaacagggagtgggcatctcatctgcctgtggtcagctctcagacggcagggagcggagctgacgttggctgtgcttggtcaccgctgccatgccgcagaggatgcgcctagctgggctggggccacacgactattatgttggccttgaacggggactgcagagccctcagtttgtctcccttgttcctctgtggctgaggtgggagggggagggtggggtaggtcccccagcaagaaagagggacaggagcaccccaggcaggaccaaggagtcgggaggcccctgccttctgtcctccatggtgagggcacagatgtctccccagagcccagcgctggcagaatggattctgctcctggctttgcttctgcggcttcggtggagacagttatggaataaaatgttccttgcacccaga

SEQ ID NO: 360430 - DNA, 401 bp, Homo Sapiens
acccccaacatgggctctgcctcaccctcaggctcctaaagggcatcctgtttactgatcttagtctttcatcaccctcatactcagtgtgtccctcattccctgcccacctccccccagtactctcaccccttttggaacaaagccagatgggaatgctgttaccttgcctaaataagcactgtttgccaggtgagaaaggaaattaaaccacagaactgacatgcaactggagtggagtgagttatatgaagtcctgatggacaaagtcagatatgatcaagagaaattacaaaattaattccaaaatatggaaaataatgctacaaacaaagtttcacagagtaaaattcaatacaaaaaacatgctgaaagaagcaattgaagtggtttaaaaaaaa

SEQ ID NO: 360431 - DNA, 457 bp, Homo Sapiens
  misc_feature (339)..(393): n is a, c, g, or t
  misc_feature (443)..(443): n is a, c, g, or t
caggaaaaaagagccactgatggcagatcacaggaagatatgggacagaaaaatggcatttgggtcctgagggtggtgcttataagtctcataagtagaatgtaataatcaagtgtaagttatttcaaatgtatatatcagatttacacaaagcaggtagttaaatatatgttattaaggagctaaaagaaatagaaaaatggacagagacacaggtcagggatctgggaaggtatggagatagagattaaagctgtagaaatagcccagagagaacatgtaggataaaaagaggaagccctaggaacaaatttttgaaaaaagaaatgggtcatttgnnnnnnnnnnnnnnnnnnnnnnnnnnnnnnnnnnnnnnnnnnnnnnnnnnnnnnnccccaaaaggtcaggagaggcatccagaagttctccaaggaatgaccagnttggagggaccttt

SEQ ID NO: 360432 - DNA, 713 bp, Homo Sapiens
aactgcactcatagggtgctctgaggtcaataaagcagagccaaggccacccagttgcctttttgcctttggtaacataactctgggagtcttggtttatcctgtgtgtcagagagtgggcagaaataacggcctgaaggttactgaggaagaagcactggatgggagactgaaatggacagtctcggagcctgttaatcagctgatcaccttacaccatttaataataaaagagctgtacctacacgttgcctttacactgccccccctccatggtcaaatgacctagttcagtcagtgatggggcttccccaggtttggctattgaactgtcacttcaggcccatcctacactgaaagctcttgggtctggctgttctctgtgaaatgctgtagtctctccctttccagaattcaggttcagggcacagaacccaggcttgtaccatggtggtgggagaaaatgaccactggccaagaggactgctgacctgtgcaccaggctagtacttatgactacaaattcttactgcttctctaatcaactctgagggaagagggcatctgatcattacaaaagggagggcttataagtgatctcccaagaaggcagtgatctgctagtgcctttggctctgtacctctgctgggcatctctccaaggtctaaggtaacatattaaaatgtttttgtcagctaatgcaggctcagtg

SEQ ID NO: 360433 - DNA, 429 bp, Homo Sapiens
  misc_feature (375)..(375): n is a, c, g, or t
tagcagcaacattgcagagagcctgtgcaagcctggcccatcaggcagagagcaccgtggaatcacagacgctgagcatgtccatggggctggtggctgtcatgctaggaggagctgttcagttgaagtcaagtgattttgctgttctgaagcagttgttgcctctgttggagaaggtatccaacacataccctgatccggtcatccaagaactcgctgttgatctccgcatcaccatctctacccatggagcctttgccactgaggccgtcagcatggctgcccaaagtacactggaacagaaaagatctgggaagggaaaatagaagagcaggcaacaaaccagttcatggaaagacccattgatgtaggttnttaggccaccttggaacaacaggcagagccatggaggacagcccccccaggaca

SEQ ID NO: 360434 - DNA, 423 bp, Homo Sapiens
  misc_feature (340)..(340): n is a, c, g, or t
  misc_feature (372)..(372): n is a, c, g, or t
tcacccccaaacactcactttgaatgctgcatgaatctcgtggggggtccctgcccttgcgacccccagatacctccacttgctaccgagtcaacgtgtgtgccatcttccctggtccaggcaccactcagctctggctcttcctgggaggtcagccgaggctccccccatgctcctggtttctgcttaggaggtggggacttgggctgggatggggacggcatacccctcccaggcctctccctctgcctttctgttcttaatcagggttggatccaagaaggtgtccagtgcttgggcctggggtgggggggaaggtgttagaggactccaggagctnctgcacccctccccaaatgtccatcttttctncagacgggggctctgtctgggggagcacccacaggctgcctttgggggtcc

SEQ ID NO: 360435 - DNA, 438 bp, Homo Sapiens
  misc_feature (58)..(58): n is a, c, g, or t
  misc_feature (105)..(114): n is a, c, g, or t
  misc_feature (125)..(125): n is a, c, g, or t
gttattaaattaatgattaaaattggcgcctggttttattttcggatattccaatgcncctttatggtagccattgaatgatccaaatattggatttaccctttnnnnnnnnnncctgagtatcnattgcatgaatttttatctccctatggttatatcctgcatcaagtggataattttgaagtgtgttcagaatataaaattgaaattttagagttgttgaaaatcctgacttgttgaaaactaatatatatgtacatggatttctatagatgtgtttgtttagaagtgggtagatattgcagataagactgttcttcagaatcatgttaactattgggttgtgactgaagtagtccagggtttgccttgaaaccattacattctacatttaccaaattaaacaaataaaaactgtattaaatgttgcaaaaaaaa

SEQ ID NO: 360436 - DNA, 271 bp, Homo Sapiens
  misc_feature (195)..(218): n is a, c, g, or t
  misc_feature (240)..(240): n is a, c, g, or t
cattcacgccgagccgagggtatcttttataccaacaaattagatgactgaggtgtaatggacaaatcctatgcacaaagtgagggtatctgaatatgtgggcgggagtcaaaaatttttagctactttaacactaaagtcaaactaaagtagcttcaaaaagacttctcaagatgcagtatggcctgctgaggnnnnnnnnnnnnnnnnnnnnnnnnaagacagagagtcgctcgtcgnccagggcgcagtgcagtagcatggatctcag

SEQ ID NO: 360437 - DNA, 419 bp, Homo Sapiens
  misc_feature (363)..(363): n is a, c, g, or t
  misc_feature (377)..(377): n is a, c, g, or t
  misc_feature (383)..(383): n is a, c, g, or t
  misc_feature (388)..(388): n is a, c, g, or t
tctggtgccaaaggagggagctggggaactgctagaggagcatctccgagggcatggcaggactagagggctttgggcaggagctccgggagctagaggtggcattgagcaatgggggaactggctcagagtcccccttagaacctccactgccccttaaggaggaggaggcctacgagagcttcacctgtccccctgagccccctggccccttcctcagcagccctttgcggactctcaaccagctgccaagccagcccttcactggccccttcatggctgtgctctttgccaaactcgagaacatgctgcagaactccgtctatgtcaaatttcctgctgacggggcttggtgggcccagntgggcctgttaacncccagnccctngttccgttcttttcctggttaaaaaccaaca

SEQ ID NO: 360438 - DNA, 560 bp, Homo Sapiens
  misc_feature (276)..(292): n is a, c, g, or t
gggctcaggccaccctcccaagtagctaaaactataggcatgcatcaccacatcatttcattgaagtatttattaggtaccatcatgagctaggtgcagttctaggtattgagttttatcagtaaataaacatgatcatcacagaggatgcacaggaagcatttaataaattcaagaggaattcagcctcatgaattatgaaatactgggaaatcattcatcatgtaaaaactggatataaaaagaaacctttcctgtaagagattagcctcttcnnnnnnnnnnnnnnnnncctacagccaagccaataaaatagagcacgtatctcagcagaactgcagacaattatgctggtattactgctattcattggtggtgtgctggaggttgaaattagtccagtaaagcaagaaaatatatatataggtgtaacctaacgactaaagtggaaaagtaagagtcattatttacagattatgtgattgtctatgtggaaacgcaaaagaatcatattaagtactttgaactgaaatggttcaacctctagagtcaaccgcacg

SEQ ID NO: 360439 - DNA, 536 bp, Homo Sapiens
  misc_feature (345)..(345): n is a, c, g, or t
  misc_feature (351)..(468): n is a, c, g, or t
  misc_feature (472)..(472): n is a, c, g, or t
  misc_feature (491)..(491): n is a, c, g, or t
aaaccccccagggcattaaggcacctaacctaggtccccatttcctttggtttgggttaccttattttttcctttttgggttcctcggtgtgcagaggcttgtagagagaaccctcagggcggtgacccgctgcaggaaattcggcccctcccagctccccctcccagttacccaggagccgatttggagccccaggccttccccagctgagtgtctgtcagcttcattctctctcagctgtgcagtggaagagcaacaacagacaggtgaccttcttgggttgtgcttcacaatggactgggaaaaacatctttgaaatcaggaaatcaggccgggcgcagtgnctcatnnnnnnnnnnnnnnnnnnnnnnnnnnnnnnnnnnnnnnnnnnnnnnnnnnnnnnnnnnnnnnnnnnnnnnnnnnnnnnnnnnnnnnnnnnnnnnnnnnnnnnnnnnnnnnnnnnnnnnttanctgggcgtgttggcgggancctgtagtcccagctacacgggaggctaaggtgggagaattgctt

SEQ ID NO: 360440 - DNA, 450 bp, Homo Sapiens
  misc_feature (265)..(382): n is a, c, g, or t
  misc_feature (391)..(391): n is a, c, g, or t
  misc_feature (393)..(393): n is a, c, g, or t
  misc_feature (399)..(399): n is a, c, g, or t
gggttctcggtgtgcagaggctgttagagagagcctcagggcggtgaccgctgcaggaattcggccctccagctcccctcccagttacccaggagccgatttggagcccaggccttcccagctgagtgtctgtcagcttcattctctctcagctgtgcagtggaagagcaacaacagacaggtgaccttcttgggttgtgcttcacaatggactgggaaaaacatctttgaaatcaggaaatcaggccgggcgcagtggctcatnnnnnnnnnnnnnnnnnnnnnnnnnnnnnnnnnnnnnnnnnnnnnnnnnnnnnnnnnnnnnnnnnnnnnnnnnnnnnnnnnnnnnnnnnnnnnnnnnnnnnnnnnnnnnnnnnnnnnnttagctggncntgttgncgggagcctgtagtcccagctacacgggaggctaaggtgggagaattgctt

SEQ ID NO: 360441 - DNA, 437 bp, Homo Sapiens
  misc_feature (30)..(30): n is a, c, g, or t
  misc_feature (81)..(81): n is a, c, g, or t
  misc_feature (398)..(398): n is a, c, g, or t
aaaactctgctaaactgggtctgaagcttnagttttctaacaggtgctgctgcacaggtggaaaggagccgtgggaatgtntgtgtgcacggcccagacaagggcagggctgaggggcctccgactcagctgggggtagacgggctcgaatgtggcctgggagagcctaggggcccccaggggtctgcttttctatgtgagcctttaaacttcagacaggccaccaaactgcacctgcaggggctttggcacaggagtgctggctttggagggactgtggccttcatcgtggtcctctgcccacacctccacgcacacagacagtgccctaggagggaaacagaactaattacgagggggaggcaagaggacgccaagcaaggagtggtgattctganaaaaatatttattaaataaaacaaaacaagttctccgtg

SEQ ID NO: 360442 - DNA, 444 bp, Homo Sapiens
ggcacgaggccacctgccccgcccatgctccccatcagcagcatccagactttcaggaagggcaggaccagccagtccagaaccgcatccctcagcagggactgataagccatctctcggagggccccctaatacccagtggagtctggttcacaccctggggggtgtgtcactgtgatgggacacgtaggagtccacccttaaaaccagcaccctgtccctcgaggctgccgagtgggtgtgtggactcgggggccttcccacaaaactagcctccggctctgggcccgagacagccgcaggccccagccactgaatgatactggcagcggctggggttttatgaactcctttctggtattttttcccctctatgtacaaatgtatatgttacgtctcaatttttgtgcttaagtaaaaataaaaacattttcagacaaaaaa

SEQ ID NO: 360443 - DNA, 956 bp, Homo Sapiens
ggctttgtagttctctttatgataatcctttatacttgctctcagattccacaggcctctgtttatagagtggcaaaggcaggcgagctgtggtttattgtttataaattttttttataaatgttatggtattcaaagccactgacatttaatatttactgaagccattccttagacagcagtggtctttatccctttctggaaagaaaaggaaaatgaagggtaattactgtcaccatggagattgtagaggtaaggttggggtataggtcaggcctggcctttctttgtcatctgcttatagtctagtgctaagtatgccactaagtttcagatatatggaatactttatttttttaaaggtatataaactctgagttattgagaattaagtattcactgtatattaaggggaagcttttgccaagttgtggtcttcaaatttatgtttactcttcctattggcagaataggtgctatttaagagtaaaccaaaggataagcagagggagtccctataaccaaagatggacagcatagcccctggatagcccagataaacccactctttgtatttaagaaatgtttctttcctagtggtgaggggtgggtaactgtgaaagagctttatatcttgtctattcatggtattatagctgtatattcccccaggatgataagcttgattgaaatcctgtatttagtcatatattatttgcgctgcttcatttgtatcatgtgcaatctctagaccaaccctatttttaaactctggtacagcatcattttgtacatattcccagctgcagaactagtatcacttatctcagcaaaagagattgtttgcatggaaagattaatagcactgattagatttctaatattttgcatttttgaaatgtttgttttctacgtgattatatttaaaactttagtaaatactaacatgaaaccat

SEQ ID NO: 360444 - DNA, 956 bp, Homo Sapiens
ttagattttttaaaaaaatatgacttcatctgtgatgctgtgtactttatgttgcataacatgaaccctaagaacagagtgagctgctggacagcaagtttcatggggtgcagtaattaacacaccacatagtataaatctgaaataatgacaaatgtgttaagggccttgggatattgggccatgtactctgaggagcacaaggtgaggtgcaggttcctgcccctaaagaactctatcttttgagattagcaactaacagtgtgagcccactaataggatgtgaaagttgtcaaaatcaagttctggtcattgtgttaaaaatcctaacaaatagagctggggaaggccgtgaaaggacgattttcatgcacagatgtctgataatgaggactatcattaaaagactgcacaaaaccacaccttgcacaaaggccatcacaacctgacacacacaaaaaatacttctatgaggacatttgcccagcaactccctgtccaatgtccaactggcaacatccttgttattgatccttgtagccaaggataattctctcaaaacaatcatttttgctttaaaaaccgttgtcttccttgacctccctgtatatgcacatagtttactgtggcacttgtattcttattgcaatgcctactcctgaataaacatcattttctttcagagagtctccctctctgttatttaggctgacaaggatatgccaagaagtagcttggatatagcagttaactctgcctttaggatatgtgtatggggatataagagttaactaaaagctgacctttgagttggtccttgaataaaagaagaatagattccaaaaataagaggaataaataatgatcctgagctaggagagtacattttgcagacctttggtttccatattaagaaattcagatttttatgtacaataaagaagttctggaattct

SEQ ID NO: 360445 - DNA, 319 bp, Homo Sapiens
aaaacctccggctttggaaggctgtctcactaatgtccctaaaattaacattacagccctatgcttcaggttaactgaaaagaaaaccagcctgaacaacatccttatgtcccatggcttgctctcagctcctcttggttgggcctagggcagccagactgtctagttccaatccttgttctgccacttgtcacctcagacaagttatctaactaacttctgtatgcttcagttacctcatctacaaaatgcagataataatagcacctactttttaagttattaagaggattgagttaataaaaagatttaaaaaaaa

SEQ ID NO: 360446 - DNA, 415 bp, Homo Sapiens
  misc_feature (12)..(12): n is a, c, g, or t
  misc_feature (66)..(66): n is a, c, g, or t
  misc_feature (73)..(73): n is a, c, g, or t
  misc_feature (131)..(131): n is a, c, g, or t
  misc_feature (376)..(376): n is a, c, g, or t
  misc_feature (394)..(394): n is a, c, g, or t
gagagcccctgngggatgggatggatggggcccagaagttgggtgggggttgggtggggaagaggntccagantgaggtccctaaaatatggccctagtggaaccccccggaggagatattagaattacanctagaaagtgagagaaatagaagttgtaaaggtgatagaagccaagtcctatataaatcagtcacaacaaatgtaaatggactaaagttacccagttagattgaattaataaaatccagctgttttaatctatatatttaaaatatgaaggtacaaaaaggttgaaagtttttataaaggagagtgataaagatatgccagtatacattaactagaaacaaatgatgcagctttagtatcaaacnaaataggattctggaacngaaagcattagtaacaatttg

SEQ ID NO: 360447 - DNA, 1403 bp, Homo Sapiens
aggaggtaggaggaggcatgttgtgcggtgtcgtgggagtggggtgtcagtgttgttgagatgtgtggagagttgggggggttacatgggccaggcttgcagcggcctgttgagcccttggtataggagtctgggtggcctcgctcgcagcccgccagccttccagctagctgccctgcaccggcagccccgccgtggcgggaggcatggaggaggtcatcgtggcccaggtggaccatggcttgagctcagcatgggtccccagccatcggcgggtgaacccacccacactgcgcatgaagaagctgaactggcagaagctgccatccaacgtggcacgtgagcacaactcgtatgtgggcgtccctgagcagccccgacgccgaggctgtggagcccgacttctccagcatcgagcgactattctccttccctgcagccaagcccaaggagcccaccatggtggccccccgggccaggaaggagcccaaggagatcactttcctcgatgccaagaagagcctgaacctcaacatcttcctgaagcaatttaagtgctccaacgaggaggtcgctgctatgatccgggctggagataccaccaagtttgatgtggaggttctcaaacaactccttaagctccttcccgagaagcacgagattgaaaacctgcgggcattcacagaggagcgagccaagctggccagcgccgaccacttctacctcctcctgctggccattccctgctaccagctgcgaatcgagtgcatgctgctgtgtgagggcgcggccgccgtgctggacatggtgcggcccaaggcccagctggtgctggctgcctgcgaaagcctgctcaccagccgccagctgcccatcttctgccagctgatcctgagaattgggaacttcctcaactacggcagccacaccggtgacgccgacggcttcaagatcagcacattgctgaagctcacggagaccaagtcccagcagaaccgcgtgacgctgctgcaccacgtgctggaggaagcggaaaagagccaccccgacctcctgcagctgccccgggacctggaacagccctcgcaagcagcagggatcaacctggagatcatccgctcagaggccagctccaacctgaagaagcttctggagaccgagcggaaggtgtctgcctccgtggccgaggtccaggagcagtacaccgagcgcctacaggccagcatctcggccttccgggcactggacgagctgtttgaggccatcgagcagaagcaacggcagctgaccgactacctgtgtgaggacgcccagcagctgtccctggaggacacgttcagcaccatgaaggctttccgggaccttttcctccgcgacctgaaggagtacaagacaggaggtcc

SEQ ID NO: 360448 - DNA, 907 bp, Homo Sapiens
cccgccccactctggactcccgcgctgggcgcgctgaggcggcccccgagcgagcgcgcgtgcagccgccgccgccccgagcacccgcagctccggcgccgcggcgagacggagacggaccgagccacgggcccccgcggccgcagcatctcggaggagaacatgcttgccaactcagccagcgtgaggatcctcatcaagggaggcaaggtggtgaacgatgactgcacccacgaggctgacgtctacatcgagaatggcatcatccagcaggtgggccgcgagctcatgatccctggcggggccaaggtgattgatgccacaggaaaactggtgatccctggtggcatcgacaccagcacccacttccaccagaccttcatgaatgccacgtgcgtggacgacttctaccatgggaccaaggcagcactcgtcggaggcaccaccatgatcatcggccacgtcctgcccgacaaggagacctcccttgtggacgcttatgagaagtgccgaggtctggccgaccccaaggtctgctgtgattacgccctccacgtggggatcacctggtgggcacccaaggtgaaagcagaaatggagacactggtgagggagaagggtgtcaactcgttccagatgttcatgacctacaaggacctgtacatgcttcgagacagtgagctgtaccaagtgttgcacgcttgcaaggacattggggcaaatcgcccgcgttccatgctgaacaatgggggagctttgtggcccagaggtgctaaggagggcactggatctgggggatcacaggcccagaaggaatcgagatccagccgtcccagagggagctggaagctgaagccactcatcgtgttatcaccattgcaaaacaggactccactgtccaatctac

SEQ ID NO: 360449 - DNA, 655 bp, Homo Sapiens
  misc_feature (487)..(497): n is a, c, g, or t
ctgagaagatttttgactcttgtgtctactgttgattgtttgcttgagttctcaaagacctgtggccaggtattttaaaaagtcgtctatttctttctagttgcatcaacttgcacactggtgtctaactatatgtggtattcggaacttgtaattcttattgagcagccattgcctatattttctcagctcctcactgatttctttatatgagctcagctgacaagcaaatgcagctattttgtttaccctctcttcataccggaccatcaacaacagtgttctaactcatccctgatggtctgtgagatgtagactattacacaagattcaagttactcgtaagcaacttttagatagagttggtcctgttaggaggagactcttgatgtcaccttcagtatcttgaaagcgggtcccctccccgaggctcttaattctttgaaaacttgatgctgtttcagctgaaaaattagcaagactgttnnnnnnnnnnngttgaggggagctgtttaagaaactgaaaagtaattgcaaactacattggataattgtgactttcagttgttgttctgtatcagttgaatttttgtgctcttttccctgtgtacgtggtggttctatttttctccaataaaacttttatttaaaaaaa

SEQ ID NO: 360450 - DNA, 385 bp, Homo Sapiens
  misc_feature (32)..(32): n is a, c, g, or t
  misc_feature (85)..(101): n is a, c, g, or t
  misc_feature (123)..(123): n is a, c, g, or t
tttagggaagcagggtctggcttttaatatgnactgcaaaaagcagcttctcactgatatttttttgttgttgtttctggggggnnnnnnnnnnnnnnnnnaatgcctttgagtgcatatttncttcctcgtctgaaaccgaactcccaaagtggctttctttagccctggctggaaaaccacctctcaatagccttaagcaataaatagatgagtagagaatgtggcttcaactgggcttattaaagtaagtgtgtctagttttcacttgaacaagtgatagctgcagatggcgaaagaaacccatttaatttttgtagcttacaggtgggtagaaacaaaaatgcaattttaaaaccttaaataccaaataccaaccattgcc

SEQ ID NO: 360451 - DNA, 473 bp, Homo Sapiens
  misc_feature (18)..(18): n is a, c, g, or t
  misc_feature (26)..(26): n is a, c, g, or t
  misc_feature (75)..(75): n is a, c, g, or t
ctccttgggtgcatcaanctcccccngctggaaaatttgggtaaatatcaaacccactggaactggaatttaaanttctgaagtcttttctgaagcaggccactcccctgtccccaggctcagtctccccatctgtaaagagtgggcttgttcaacacacttttagactctcgagagaaatatgatccctctacctggaaaatgcccactggcatgaaacacctgattttgtgcccaatttcaggtgtccacagaacttctgaaatcctcccatcacctgaaaaaagtgatcctgagattttagctgactttttctgttctgtaatcagaggggactgtgatttgggccaatttcttcctcatgggcttcagtggagtcagctgtggaatggaacatcaattcccaccccataggcatgttgtgaggtttcgctaagaaacagccataaaagggccttaagagttaaaaaaaa

SEQ ID NO: 360452 - DNA, 1608 bp, Homo Sapiens
gtatgcagtgtctgggttatcccacccttaataagcctgttacctccagaagcttctgagaagaatgatgtgaaaagacagggagtgggttctaggcaaagaaaacataatgaccatttagaggagtcagtagcaaagctcacagataaagtattttattactatctgaagttttcttttgttttcatgcaggacattttaaaaacgtatgtggcagcagaaacttgtttctcaatagaaaaaatacattcagaggcatttctgggatagtctatctgtgttagtatttggtgctatctatgtccagccaagttatctaccctcaaattctgactaatcatgtttgtgctttgggtatttaaaattacatacatatatattctttttgccaaaaacaaaagtcttgcttcttgtcaaatgattgctaaagtagatcttacattttttgttattatgtatatatttatacacacccccaacacacttagtgatttctgttatttcctagggagcacagctttaaggctatgagatacaactaaaaggagcccatctatttggttttccagccaattattgtactcacatttcaggggagaatctgaaattcctgtcatgtttacagcaacaatctatcattcctggctagctctcagcctctctctccttccataggttagaattatgtcattttgttacttagtggccacgtctatttctgagaaagactggttacatttatgtggcatctcaggtatcattaaggaaaagccagagcaggggtgagcagaggtcaaaaccacagacgcagcagggccatttgccgcctttggccgggatcacaaccactgcagtctcccagcaggtaggccttgccaagcctaaggctccccatccaatctagacagaggggcgctcagagcagactttgccgtagcccatgtctggtgagcacaacagggaatgaattgggcactccactcccccgtctctctggcccagccctgaactagatgagctgcatttcatggagcccattttaaaacctctttccttatgactttgttactcaagtccagagttctctgtgcacttctgctagataaggagtgtaagccctgccccccagcactggcagcacgctgggccctccccacacaggacaccgtgcagttccgggggaagctgactcaaatcaaccttgaaatctcatgaaaacaaaatgacttgtctttttatttgatagtgtaatatcattcattttataaattttttagggtttttctcgtaatattgtacagttttgcatggcctggtgtgatcattttttggttagaatataatgctgacaaatgtggatggaggggaagatactgctttagcctatcactccttattttattttgtttggttttatgccctcagtgtcttagggaactttataagagatcctctgctaccaaacaatgatgtggattcttttgcacagaaatatttaaggtgggatggtaaaaaatgtcacaaaagactcctcaccaatactttatgttgatatcacttaatattaaccagactttgctgtattgcaataaaacagagaactgttaa

SEQ ID NO: 360453 - DNA, 749 bp, Homo Sapiens
  misc_feature (452)..(487): n is a, c, g, or t
  misc_feature (637)..(637): n is a, c, g, or t
  misc_feature (676)..(676): n is a, c, g, or t
  misc_feature (729)..(729): n is a, c, g, or t
gccagaattatgagccccagtcctggccctgacccatcccctcttctgaccatctggagtctgccttctgtgccccaggtgcactggcttcactctgctcggcggactggatgagctcattcctgtcacagggcctttgcatgccctgtctcctgggccttggctcaggtcttggtgtggccacctccgccttgtcacccggcagcctcacgcctgcctccctatccttccaggaagtagagggaggcctgaagacccgggaatcctccaatggctctgccctgtcgccctgtttcaatcctctgcctggtgtttacatcccttgtttctgtttttgtttcctgtatctcctctctacacctctgtgtctaatacagtagccattattacaatgaaagaaaataacacattcagtccctcagtgccactagctatatttccagtgctcggannnnnnnnnnnnnnnnnnnnnnnnnnnnnnnnnnnnatggtagggaacatgtccatcatcaaagaaagttctagagtgtctgctccttaagacaggactctatgtacatggtcccagctgtgcccccagcacctagtgtgggggtctgccatgcagtggggcatctggggagggtaaatgggattnggtgatggggatgggcacactgtgtttagggcaatgctngggtgttaccccgagttcggtaacctgcctttttggggtgagaggagccacancattttttctctgtggcccg

SEQ ID NO: 360454 - DNA, 419 bp, Homo Sapiens
  misc_feature (396)..(396): n is a, c, g, or t
  misc_feature (407)..(407): n is a, c, g, or t
tcgttcagttctctaggtgaggactgtcctggtggcttgtcctggatggtggctggggaagtggatgcctgaataccaggatcctcgagaagagatgactccctgccccatccccctgcctaccctcctcctcaatggcccctctctcagtggatgtgagtaaggattaggaccttccccacagagccaccttttggccaggactcgtgggggatagtgggggcagtgctgagttctaggagtgttcctggaagtttggggcagtgagtgctcagactggcccaggtgggagagttcactagcttgcccaggccttagcaggagctgctgtgctgtctttctgtcccatactgagcattgtgataggaagctgccacacagtgccctgggaaactnacttggcatanttttccatgggg

SEQ ID NO: 360455 - DNA, 294 bp, Homo Sapiens
  misc_feature (41)..(41): n is a, c, g, or t
  misc_feature (47)..(47): n is a, c, g, or t
tccggcccgggcgacagagtgataacctgtctaaaaaaatnaaaatnaattgtataatcatattgcaattttctttgcattactgatgaggaaaaatctcaaagtaattgtaaaaaatcctggatatcacatagttgagaaacaaagttattttaaacttacaggactctgtagttcacagttgaacactgtggcttcctgaaatatcaaagaataatgtacattaataagccagctactatcggcatcttgtaaaaattcaaaaattaaacataaataaaagttcaaaatatg

SEQ ID NO: 360456 - DNA, 692 bp, Homo Sapiens
agggggcctcttcggtgttggtgagacagcagccaagatcttaaaaagcaacatcgatgtgttatttgcagacgtagctgggtgcgaagaatcaaattggaaattatggaatttgtgaatttcctgaagaatcccaagcagtatcaggacttaggagcaaaaattccaaagggagccatgctcactggtcctcctggtaccggcaagacccttcttgccaaagcaactgcaggggaggccactgtgcccttcatcactgtgaacgggtctgagttcctggaaatgtttattggcgttgggccagcaaggggttcaactctgccaccaacgtcgtggtgttggctggcaccaaccgccctgacgtcctggacccggccctcatgcggcctggccggtttcatcgccagatttacactggtcccccttacattaaaggcaggtcctccatctttaaggtccacctgcgcccactgaagctggacaagagcctcaataaggacaccctggcgaggaagctggcagcgctcaccccaggcttccctgaacgggatgactcagcactacccctcaacagagatgactttgatgactctgcccctcagcagggcttactaagcactaccccttaacagggatgactccgcactgcccctcaacagggatgactcagcagagatgactcagcactgtcc

SEQ ID NO: 360457 - DNA, 440 bp, Homo Sapiens
taatttgtaaaggtttgaggtttaattggctcatggttccacaggctgtacaggaagcatggtgctgacatctgctcagcttctggagaggcctctggatacttacaatcatggcagaaggcaaagggggagccagcatatcttacatggcaggaacaggagcaagagagacagaggggaggttcttcacacctttaaacaaccagatctcgtgagaacttactcactatcacgagaatagcaccaagaagatggtgctaaaccatgcatgagaaatccacctccacgatccaatcacctcccacctggccccacctcaaacactggggattacaatttgacatgagattatggtgaggacacagatccaaatcatgttcaatatgtaattaacctttctgcctttttcaaaaataatttggaaaattaaggactgtttg

SEQ ID NO: 360458 - DNA, 403 bp, Homo Sapiens
  misc_feature (42)..(42): n is a, c, g, or t
  misc_feature (73)..(73): n is a, c, g, or t
gccaaaacttgaaatcgtccctcaaaatgacgaagcttgaantgtccctcaagatggatgtgaatccttacantccttttcatcatttcctttgtaaaaatgacgagtgctgggtttttgttttaagaagcattatgaaggccagacttactcatttttctcccccaagtgagctgcaaaaggcccctgttaggcccctgtttcctgagcagtgatgtgctgctcttcttggtggggctttgggctgggaggggaaggcgggtcagagatgggggacctgtggctgccatgcaggagcccctgcgtcatctcgttggactctttaagggagtcaggaatagatgtatgaacagtcgtgtcactggatgcctatttagaaataaagtgtatgctgctgaattgg

SEQ ID NO: 360459 - DNA, 1428 bp, Homo Sapiens
  misc_feature (77)..(77): n is a, c, g, or t
  misc_feature (1127)..(1127): n is a, c, g, or t
  misc_feature (1328)..(1328): n is a, c, g, or t
  misc_feature (1340)..(1340): n is a, c, g, or t
  misc_feature (1347)..(1347): n is a, c, g, or t
  misc_feature (1352)..(1352): n is a, c, g, or t
  misc_feature (1379)..(1379): n is a, c, g, or t
  misc_feature (1394)..(1394): n is a, c, g, or t
  misc_feature (1414)..(1414): n is a, c, g, or t
ctacatggtgatctttctaggggccggagtccaggtgttccacatacgccccttataaagcccacccccccaaaggngcctcataaattcgcgccttaaccccccatatggcttgtggccccctctttccttttgtgtcagaaaaaaggggggcccgtgggcccctcgggggtttcccccttgtgtgaaaggaatttttttccaaagcccatgttggcggcccctggggggggaaaccccgggaacccggaagggcctttcaatgaggggcccaaaggccccttgccaaattgggcccccttttccccaaaaggttttttaaagaaagggttccccccagttcaacccatttttttcaagcatttccattggccccccaaaaggaatcctgttggggttaaccctggggggactttgggcgtttcagggccttcccccttggccttcattgccagcccagccccaagccaagcttctccccctgtgaagaggggggtggctggcttaggggttagggggccgagagggctttcagttctgcctctggacagtgtgtctgacctccagatgatggaactgagccacccttagcctggccctggcccatccccctgcacacttatctcggggacctagaagccagcccttttccctgcgagaccccacacaagccacggggtggttgttccgaggggtcataacaactacaggctgcagaaagcatgggattcattccaagaactcgttccacacagcagtgcctgtggtggaggggctgctggctaaagggctggtttcctccagcgctccctggctccagccttcactcatcctgaagtattcctcctacacgccacagttctcctgtaccatggcctagacccagaagaaaataaatacacacgcaggaagatatagttaagctgcgtatttttatatcttctatgcattcactgccccaaatagaattattgggtgtgctaaaggtagacagcagcaatttgttattctcaggcaaaaaaaactgacccagaaaaacagacttctatggccttttgttaccaaggtgagccaagattgccaaggaacacggggtgccctcatctcttgggggcactctcccaggntgctgacctcacctgggccgacggggggcagaagaggctcagaggagatcgaggcaggtgctggtacctcctgggaacggtcccgccaccccctttgcccccaacaaatcctgggggcccctccaccaagccccacatgcttttccgccacagcatcgttttcaagttttcagcttcaaagtttgaggccaggttttgacngggtgggggttntcacacngggtnacgaggggggcagacggaatggggatntgatttttttcattngtttatctgtgatttaaagntagggaagaaagaa

SEQ ID NO: 360460 - DNA, 610 bp, Homo Sapiens
  misc_feature (27)..(27): n is a, c, g, or t
  misc_feature (180)..(180): n is a, c, g, or t
aatgtccaccctggaccctggaacaangcccatgttattcccaaactcacttcctctaatacttcaatatggatcataaaaatagtttacacctttatgcacatcaaaatacaaaatacagggcacaataaaactgaactggaaaaaggtatggccagtttcttttaaaactacccctgntgacccagcaattctaatccaagggaatttacgtgcaaagaaatgaaaacctatgttcacaaagacttacgtaagaatggtcatagcagctttatttataatggccaatcctggaaacagcccaggtatctatcaataataggaaattaagaaaacaaactgtaatattgtcatacagtggaatactactcagcaataaaaaagaacagcaataaaaaaatgaagccttgtagaaaagcgtacatgttgcgtgactctatttatataaagttttagaacagaaaaatcttatggtagaaaaaggaacagtggttgcctttgagggtcaagtagggacaggaattgactggaaagggcagtgtggaaactttctagggtggtgataacgtttcctatttccatagcactatatgcatttgccaaacctcag

SEQ ID NO: 360461 - DNA, 525 bp, Homo Sapiens
gctcagcagctctgtcccgggacagtcagggtggactcaatctttctggttctccacagaagacgtctctgcaagaagcctggagtctgtttcaggccaggaggaggggatttgctgagggccaagggggttctgggacagagtctggaaagctggtcttcaggctctcagtcccaggctgggcaggcacggtcacttcacttcagcctttcagtccctctctctctgcctgtgggaatctggacacattttgggaggcctcccaaggctgtgggacgtgcttgctctggcagctgcagggttcctgtctggcctccctggtgagcagaggggcggccacggcgggcggtggcctagagacccaggacctgggcgcctgggaaaatggaatgcaacccacattgtaaagccactggcatctgattatctccatttgaacacacagcacagaacaatcatttaaatgttattttggaaaggggttttggggacacagaagaataagtaaacacatctcggaggctt

SEQ ID NO: 360462 - DNA, 585 bp, Homo Sapiens
  misc_feature (556)..(556): n is a, c, g, or t
gctgcgggcgcttcctagtccgctcgggcggccgcccaggcgaggtgcggcctccgcacaggcggggggcgtaggcgcgcggggcccgccatggctgcgtcggagctctacacaaagtttgccagggtttggatacctgatccagaggaagtctggaagtcagcagagctgctcaaagattataagccaggagataaagtcctcctgcttcacctcgaggaaggaaaggatttggaataccatctagatccaaagaccaaggagctgcctcacttacgaaatcctgacatacttgttggtgaaaatgacctcacagccctcagctatcttcatgagcctgctgtgctccataatctcagagtccgctttattgattccaaacttatttatacgtattgtggtatagtcctagtagctataaatccctatgaacagctgcctatttatggagaagatattattaatgcatacagtggtcagaacatgggtgatatggatccacatatctttgcagtagctgaagaagcttacaagcaaatggccagagatgaacganatcagtccatcatcgtaagtggagagtct

SEQ ID NO: 360463 - DNA, 566 bp, Homo Sapiens
  misc_feature (34)..(34): n is a, c, g, or t
  misc_feature (59)..(59): n is a, c, g, or t
aacagtaatcagtattttaattgctgtaattggncatttgaaatagcagtaagattctncagagtggcaatgactgagttggaatgtaagtgtgtccattaatgtcctacatatatttaagatatcgggagtagccattcctcctggttaaatagtgaaagcaggacatggttctccaaggttcacaggtaaaccatcccaccagagcactaatgagcagactgctacatttcacttcatttcgcgtgtaaggaaaacaaattgactaagctgtccccgaatttctagttataacagatgtatttctaaaacaagcagtaaattaacaaaattatggcagacagtgccatattcccggaattccagaagccctggattaatgatgagacccgagttaagtcccagcactgccacttactggcagccatcttaaagtctattcccttatttgtaaaagggacctcttaatccgggattgcctacaccatggcaccattgtaaaaatctggttaagtaaactgtataatgagacataattgaagatcgatcgattttatttagagatg

SEQ ID NO: 360464 - DNA, 474 bp, Homo Sapiens
  misc_feature (15)..(15): n is a, c, g, or t
  misc_feature (27)..(27): n is a, c, g, or t
  misc_feature (38)..(38): n is a, c, g, or t
  misc_feature (50)..(50): n is a, c, g, or t
  misc_feature (62)..(62): n is a, c, g, or t
  misc_feature (70)..(70): n is a, c, g, or t
  misc_feature (101)..(101): n is a, c, g, or t
  misc_feature (191)..(266): n is a, c, g, or t
gaaaaacttaaattnccccctttttcnaaaaaggcggnacaacccctacnccgaacttttgntggtttgnttttgaagaacagcagcttgcccctgtccanacaggctggaagcgcagtggtgcggatcatagcctcactgtaaccttgaactcccggactcaagggatcttctccctcctcagcctctcnnnnnnnnnnnnnnnnnnnnnnnnnnnnnnnnnnnnnnnnnnnnnnnnnnnnnnnnnnnnnnnnnnnnnnnnnnnnccaacttcgacatttttgaaaagtgaaacatataggtagatgtgatcttatctacatatggattttatatttaaccaaaaagtcaaggaataacttggctagtgatgttgtcaccattatcatcaaaattgccttcgttaaggcatttgcttctcttgactcatgtctagaaatgtctagaaagaatataaaaatagatgaaaaaaaa

SEQ ID NO: 360465 - DNA, 349 bp, Homo Sapiens
  misc_feature (289)..(289): n is a, c, g, or t
tgggatggcccagtttgatgtgtcaacttaccctatgtgacagttcccagttattcaatcaaacactaatcagtgtgttgatgtgagggtatttcgtagatgtgattaaagtcccataatcagttgactttgaggaagggagattgttcctagacagtttgggtgggcctgactctatcagctgaaaggccttaggagcagagatgaggcttctctgaggaagaaaaaaactgcacctatggacagctgcttcagcccatgcctgagattccagcttgctctttctgancctgcctagccaggccacataagccaattctttgcaataaatcttatattatagattgtc

SEQ ID NO: 360466 - DNA, 1050 bp, Homo Sapiens
  misc_feature (861)..(935): n is a, c, g, or t
cggtccggaattcccgggattgacaatgcaacgcccacctcatgactcatgacgccctccccaacctgagccaagcacccgacccgccgacgctcagcggcgccgagtgctacgcctgtatcggggtccaccaggatgactgcgctatcggcaggtcccgacgagtccagtgtcaccaggaccagaccgcctgcttccagggcaatggcagaatgacagttggcaatttctcagtccctgtgtacatcagaacctgccaccggccctcctgcaccaccgagggcaccaccagcccctggacagccatcgacctccagggctcctgctgtgaggggtacctctgcaacaggaaatccatgacccagcccttcaccagtgcttcagccaccacccctccccgagcactacaggtcctggccctgctcctcccagtcctcctgctggtggggctctcagcatagaccgcccctccaggatgctggggacagggctcacacacctcattcttgctgcttcagcccctatcacatagctcactggaaaaatgatgttaaagtaagaattgcactcctgtccctctggccttccatctctcccgcccttgtgccccacaaaactggccaacagtactggaagaaactggacacagtcaccagcatcccccggggagggcaaacacagccatgtcgtgccctgatgaagagcaattctgatcacagctgttaatcactgagcaccagacaggcaccaggcaccccataacacggcttcctgtgctctccctccagaggctgtcgcagctctaggagggagctatacaatgatgtctttattagtgtcatcatgagaagccccataagnnnnnnnnnnnnnnnnnnnnnnnnnnnnnnnnnnnnnnnnnnnnnnnnnnnnnnnnnnnnnnnnnnnnnnnnnnngcctgcagagaccattgacgagttacctaaggcaggctctgggagctaaactgcatggggttaaaatcccagcttccggatttcggctaacaagaacctgggtgggggtacttta

SEQ ID NO: 360467 - DNA, 668 bp, Homo Sapiens
  misc_feature (603)..(603): n is a, c, g, or t
  misc_feature (605)..(605): n is a, c, g, or t
  misc_feature (619)..(619): n is a, c, g, or t
  misc_feature (622)..(622): n is a, c, g, or t
ggcgtacgtaagcctgaggcgttatcgagaggtcctgctgacctgtcccagcacctctgccccatccctagaggagatagtacctgtgggaacctaggctgggatggatcaggttatctgcctctgggctgaggtggtggtggggtgtccctggttggggtcttagaaggcctccccacctttggtagggaaatagttctcagaggagaaatgggtctcctgttcagtggatggtgatgggggtactcacctctcagcagctgtgatgctgtgggagtctcaggagctggcaagggagactgctgggcccagtgggggccagaaatgctggtggagccagagcgcgggggcagcgggggcttctcatcctccccatctgaggcatcccggtcatccggtgggtccggctctcgctcaccctctacaggaagaagcagggcgcacacaaggccctggttgggctgggcgtacaggccgatgagctcacccagggtctggaagcggcgcacaggcacaccctgcgaggtctgcacagcccagaaatcttctccatcaggcagaatgcgatacgtgtgcacatgctttctgatacaggaccagagngngaaggccctcgccnaantctcgctgtctcggaccaggaagctgccattcgcgcccgcccgggc

SEQ ID NO: 360468 - DNA, 416 bp, Homo Sapiens
ataagagtgatgaacttctttgttacctgacccttctcttctggaaaagtgaggtgtacattaaacatcttttggtcaccgtgcctcactaagacctttcacattccagcttgtccgactagtgtaatgtacctctcacttctgttttacgttgagcattacgaattaaaatctttacagtctagggggaaaaaaaggcttcaataccagttggcttatgaggctctgcatataattttctctaaaatatgtaactattttgtagtctgtggggactttcaaagccaatttttaaaattagtagtagtaaaggtttttccctttcctgaatgaaaaatcagaaattctaatctttgctataaagtacttaaacacaatacattgcctcagcataaataaaaacatttttattaaaa

SEQ ID NO: 360469 - DNA, 761 bp, Homo Sapiens
  misc_feature (161)..(161): n is a, c, g, or t
gcaacccaaccccactcggaaaagacctgctgaactgcactccggatgtcaaagagcacccttgggaaaaaagaaaggcaggagtgccagcactttcctaagagcctcagctcacttctctcccttcctaagctccagaccggaagtgaatggaaagaagntgcgctgggagctgccctccctgggagcctaccctgcccagcctgagagtggaggctaccagcatcacgcttcccctagtgaaatccatctgtcctgaagggaaccctgggacggggtcaaggaaaccctgttcacccccaccacggggtcaggtcttcaccaaagggaggccgcacggattcccagtcgcaaacccaaagccttgctgcctttgcctctgcttccatagttgtttcaatgtcttttttaaaaatcacatacactcgagtaagactgagtctcctcaccgaagagatctggctgtatcccgagtctctgaaacctttgctccagtcctgtgggagcgtgccgtcccgaggatgtggagccgcaagggctcgccagagggatctcaggagctaggcctcaaggagcgctgttgagtgacaggtctgatgcagtagcttttactattggtggaaatcgatgttttttccttgaaagtctacctttctaagttcagtaaaccaaattagatcatgtatgtgaaagcactttgtaaactatgcagtactccagaaaaggcagccaagcccttaattataactcaccaaacagcc

SEQ ID NO: 360470 - DNA, 541 bp, Homo Sapiens
gggtttggggagacagcgatgggaacccagcagggcacaggatgctaggataaagctgtggcgccccaaaagtggcctgctctgccaacatacataaatacatacagtctgagcttgacactgtataatttggcccagaacaatatgtattttgagctcatttaggtgaatgactttggcattccatgtacccactaggggaagctttatcaggctgcatttgccttatgcagaagtatgcctttgttctgagaaatggcctcagaacacactgttgagctgtctcctttagtgagtgtcatcctctcatccatttcaaaagattgcagatgccgtcttgaagtcctgcttgtaagaaatgcaggggttgggaatggaggagatgacgatgtagttttgcttttagttttcccaaacctgtttacattttttaaaaatgtaaccaacccataattgcattttacttgtcgtggttcgatctgattgtattgtcgaaggactatttttgaacctgtccaaataaactctgcaaagtatttcc

SEQ ID NO: 360471 - DNA, 457 bp, Homo Sapiens
  misc_feature (24)..(24): n is a, c, g, or t
  misc_feature (129)..(129): n is a, c, g, or t
ctgaaccttgaacactgtaaaaanttggccccagaaacaaatatgtaattttgaagcctcatttaaggtgaaatgaacttggccaaccccatgtaccccactaggggaaacctttatccaggcctgcanttgcccttaatgccagaagtatgccctttgttcctgagaaatggccctcagaacacactgttgagctgtctcctttagtgagtgtcatcctctcatccatttcaaaagattgcagatgccgtccttgaagtcctgcttgtaagaaatgcaggggttgggaatggaggagatgacgatgtagttttgcttttagttttcccaaacctgtttacattttttaaaaatgtaaccaacccataattgcattttacttgtcgtggttcgatctgattgtattgtcgaaggactatttttgaacctgtccaaataaactctgcaaagtatttcc

SEQ ID NO: 360472 - DNA, 837 bp, Homo Sapiens
tatgcatatagacgtcgattaaaagcagctggtacggtccggaattccgggatatcgtcgaccacgcgtcgctcctgctcatccagccatgcggtggctgtggcccctggctgtctctcttgctgtgattttggctgtggggctaagcagggtctctgggggtgcccccctgcacctgggcaggcacagagccgagacccaggagcagcagagccgatccaagaggggcaccgaggatgaggaggccaagggcgtgcagcagtatgtgcctgaggagtgggcggagtacccccggcccattcaccctgctggcctgcagccaaccaagcccttggtggccaccagccctaaccccgacaaggatgggggcaccccagacagtgggcaggaactgaggggcaatctgacaggggcaccagggcagaggctacagatccagaaccccctgtatccggtgaccgagagctcctacagtgcctatgccatcatgcttctggcgctggtggtgtttgcggtgggcattgtgggcaacctgtcggtcatgtgcatcgtgtggcacagctactacctgaagagcgcctggaactccatccttgccagcctggccctctgggattttctggtcctctttttctgcctccctattgtcatcttcaacgagatcaccaagcagaggctactgggtgacgttctctttgtcgtgccgtgcccttcatggaggtctcctctctgggagtcacggactttcagcctctggtgcctgggcattgaccgcttccaacgtggccaccaggcaccctgccaggtgaggcccctcgaggcggtgcaatccatccg

SEQ ID NO: 360473 - DNA, 1032 bp, Homo Sapiens
  misc_feature (949)..(985): n is a, c, g, or t
tgctgaggcaagagtccaagggtgcccatgtgggcaaggctctgggccatgccacaagcagagcttcaggcacaagccagcggtcatggagcccacccagatgacaccaacttgccaggatggattggcaccgctcgatgggcctcacctttgggcagggtgctggtggccacgtggaacgggtcaatgcccagggcacagaggctgaaagtcgtgactcccagagaggagacctccatgaagggcacggcacgacaagaaacgtcacccagtagcctctgcttggtgatctcgttgaagatgacaatagggaggcagaaaaagaggaccagaaaatcccagagggccaggctggcaaggatggagttccaggcgctcttcaggtagtagctgtgccacacgatgcacatgaccgacaggttgcccacaatgcccaccgcaaacaccaccagcgccagaagcatgatggcataggcactgtaggagctctcggtcaccggatacagggggttctggatctgtagcctctgccctggtgcccctgtcagattgcccctcagttcctgcccactgtctggggtgcccccatccttgtcggggttagggctggtggccaccaagggcttggttggctgcaggccagcagggtgaatgggccgggggtactccgcccactcctcaggcacatactgctgcacgcccttggcctcctcatcctcggtgcccctcttggatcggctctgctgctcctgggtctcggctctgtgcctgcccaggtgcaggggggcacccccagagaccctgcttagccccacagccaaaatcacagcaagagagacagccaggggccacagccaccgcatggctggatgagcaggagacagccagcccaggaagagcaggtgactccgctctcgacgaattcgagctcggccgatttggcctgatnnnnnnnnnnnnnnnnnnnnnnnnnnnnnnnnnnnnncgccgccaccgcgataaaccggcgggcgcctatatatcagtcatcca

SEQ ID NO: 360474 - DNA, 957 bp, Homo Sapiens
atcaggccaaatcggccgagctcgaattcgtcgagagcggactcgcctgctcttcctgggctggctgtctcctgctcatccagccatgcggtggctgtggcccctggctgtctctcttgctgtgattttggctgtggggctaagcagggtctctgggggtgcccccctgcacctgggcaggcacagagccgagacccaggagcagcagagccgatccaagaggggcaccgaggatgaggaggccaagggcgtgcagcagtatgtgcctgaggagtgggcggagtacccccggcccattcaccctgctggcctgcagccaaccaagcccttggtggccaccagccctaaccccaacaaggatgggggcaccccagacagtgggcaggaactgaggggcaatctgacaggggcaccaggcagaggctacaggtccagaaccccctgtatccggtgaccgagagctcctacagtgcctatgccatcatgcttctggcgctggtggtgtttgcggtgggcattgtgggcaacctgtcggtcatgtgcatcgtgtggcacagctactacctgaagagcgcctggaactccatccttgccagccccagtacactcttctctggaccagatctgtcccagtcctggatgcctcctcctactggtgccttcttttcttccagaggatttctctctccttcctcctcctttctttgggatccctgggttgccctgtcccaacctccttgttaggtgctttcccataggaggcccttcttgagaaacaataaactaggtagaaactaccccgaatacaaagacacgaaaacctctcaaggctgaaatccggcatataggccagatcattcgaaggggggccaggacccagtttggcccttagcaaagggtaaatcgagctgggtaactcatggcacatagcgttcctgttcaatgtatccgacatcc

SEQ ID NO: 360475 - DNA, 689 bp, Homo Sapiens
agcggggatccagccggtccagctgcctctcgggagcccagctcttgggccccctgtactcacctgctcttcctggactggctgtctcctgatacatccagccatgcggtggctgtggcccctggctgtctctcttgctgtgattttggctgtggggctaagcagggtctctgggggtgccccccggcatcctgggcaggcacagagccggagacccaggagcagcagagccgatccaagaggggcaccgaggatgaggaggccaagggcgtggcacccaggtatgtgcctgaggagtgcgcggagatacccccggctcatatcaccctgctgggcctgatagccaaccaagcgcctaggtggcctaccagactcttaaacccgactaaggatggggggcaccccaagacagtgggcaggaactcgaggggcaagctgacagggtgcaccagggccagaggctacagatccagaaccccctgtatccggtgaccgagagctcctgacagtgcctatgccatctatgcttctggcgctggtggtgtttgcggtgggcattgtgggcaaccttgtcggtcatgtgcatcgtgtggcacagctactacctgaagagcgcctggaactccatccttggccagcctgggcccctctggggacttttctgggtccctctttttcctgcgtccccg

SEQ ID NO: 360476 - DNA, 601 bp, Homo Sapiens
actacaagttaactgtaaaattttccctagtggaaggacatctcttcttgtaataatactgtggagatgagatgtaatataaggtattcagcagccaaactatcccccagaagggcatgagtaaggaacccaagaagttctgctctgactggagacaattcggacatgaaacttgaaacaaacttacaggttttgctctcctctttgttaaggcaggcaggcaataatgggttgatgtgttgcaacttctgggctaagatcacatgaattctcggcactaatgaagcaggaggactgtgtactctctgctcctctgctgtgtctgtgcactccatcggatccagcagtgcagaggcatccctttcatcattattcagtatactcagcacaggatccacagacagtatgccatatagctcaagaatgtcatttactttgaaacaatcccaatcttcataaaccttcacaaggcatgcagggcccttctctcctggcaatggaaaattcaaatcaaaaggagaagacaagttcagagagttcagctgttgcccagtagaagcttcagtttctaaacgttttggctctccacaccattgaagac

SEQ ID NO: 360477 - DNA, 499 bp, Homo Sapiens
  misc_feature (46)..(46): n is a, c, g, or t
atcccgtgggccaaccactcaagttaaactgtaaaatttccccaantggaaggaacatctcctctcttgtaataatactgtggaagatgaagatgtaaatataaggtaattccagccagcccaaactatccccccagaagggcatgagtaaggaaccccaagaagttctgctctgactggagacaattcggacatgaaacttgaaacaaacttacaggttttgctctcctctttgttaaggcaggcaggcaataatgggttgatgtgttgcaacttctgggctaagatcacatgaattctcggcactaatgaagcaggaggactgtgtactctctgctcctctgctgtgtctgtgcactccatcggatccagcagtgcagaggcatccctttcatcattattcagtatactcagcacaggatccacagacagtatgccatatagctcaagaatgtcatttactttgaaacaatcccaatcttcataaaccttcacaagc

SEQ ID NO: 360478 - DNA, 460 bp, Homo Sapiens
  misc_feature (22)..(22): n is a, c, g, or t
  misc_feature (32)..(32): n is a, c, g, or t
  misc_feature (38)..(38): n is a, c, g, or t
agctcctgaatgaaatggggantacatggatntcccanggaaaaagagcattcccagcaaaggaaaaaaacacatgccagagacccctgaaggaagaaagccagggtccacctttgtccaaaggggaccagccaaggaaagcccaatgaccgggtgaaatgagtgaagagagcgttcagagaggacagccaaaagctctgtgggccacggcaggactttgtcccttgctgagcaagatgggaagccactgaatgtttgcgggcagggtagtgacatgctgtgacttatgtttaaaaggattactcctttatagcgatgaagaaaagctctataacaaaagttccgttgtggtggttatacagcattgtgaatgtacttaatgccaatgaattgtgtactttaaaatggtaaattttatgttatatatgttttaccacaataaaaataatttttttaaagg

SEQ ID NO: 360479 - DNA, 1332 bp, Homo Sapiens
  misc_feature (973)..(982): n is a, c, g, or t
gccaaatgtactgtctttcatccaccactgcctcctgaaagaccctgggtctgagtcttagccagtccatggagaccttgactgctggaagaggataggcattgtaggactcctcctgagactcattctgtagaggacacttgcacaggatgccaagaaaagacataaagagggccagcaactgtgtccaacatagctgctcatcttggctataagtgtgctgctcggtttcattgctaaagtcacgaaggtgatgaagttgaaacaggttaatgacagtgacatgaactaactgctgagagttgaaagctttttggaatagcagcctcttaaactgttcttccaatttctctcggaagaggggctcaacttttccaagctcttactcaggtacacatgaccgtggaatttaataaaggccttgatgaagtcagaaacaccccacttggttttcacctcatctcggctttccagtgctttagaaagtgctttttgcagattagtggaggcagctgggaaagggaacttcacagcaatgcttctgcagtagtagaaaattgtggtcagatggtctcctttggaagaagctaagatagcgaactgattataaggctgaccattggaggggacaagctgagctgcatgcctatagtaggactctgcctggctggcctggcttctgcatcgagctagaccccactttcaggtcctccagcgtcatgcatcacccagcctcccctatggaccctgccgcggccctgaacccggacccccagacacgccccacccaaatggaacaatggaccccacgatccacaaagaacccgccgactccggcccgcacccctgcccccaccagtgcttcccccaccgcagcacctccgtcctcgcgtcctgccgctagcaacgtcgacccccgtacgacccgtccctacgttcaaccgtctgactcctacctctatggcgcaatggnnnnnnnnnntttctcttttcgccactgttctcaccccccgcgccatttcggcccccgcttttcctcttcccaccccggttcaacgccccgcccgaagctacatgaacggtttctacatacgcatcccgccccgttcccttccctccatcatcaacacacgtctcccgccgtccaccaccgtattttcgcattcgccgcagacagcgccattttatcgtgtgtctcgcaatttagcgtcccatctgccccccatatcgcccggcgccccgctgacgccaacccccactccccgctttctacctttcgcccgcgtcacgccacgttcagcgtgccaatatcgagagcgacaccgccgcttc

SEQ ID NO: 360480 - DNA, 943 bp, Homo Sapiens
  misc_feature (146)..(237): n is a, c, g, or t
tgaccctctttcaagaaatgttcgtcaagacactcgggtttttattgaaaaatttgttcccgctggatcagggaagtccccttgcgcaccccattcgggttaagcgatttctgctgcccttccccgtagcgggatacagcaaccannnnnnnnnnnnnnnnnnnnnnnnnnnnnnnnnnnnnnnnnnnnnnnnnnnnnnnnnnnnnnnnnnnnnnnnnnnnnnnnnnnnnnnnnnnnttgctggcctggacctcacaaaagtgctggcccagccgagatttgttttctaagatactttgtgtcatgaacagttcagtttagtgtcatgaactattcacttcatatttttcttgtattaactgtttaaatttttaaaatatcttgtagtaactctttaaaatgtatgtaagtaaatggctgcagaaagtttttttagagaatcctgcttccatcagtaatacagcaatattaccccatccactaatggtctttgtttccttaaccactactcattaatccttaatcacctcattcaaactaattcattctgcatttttgagtaccaactcttgtcaggctcagtggcagcttctacgacctgatggatggaaaaaaatcaaactctgtgactctatggttgactgccacctctgcaaccttgactcatctgctgaaaaggcaagaagaagaaagggcagcaagccctgttttagggactacataagatgaggggagataagggggacatagatgagttctttaggattgcgtgtgttttgagtttttgtttctaactgaagaaatctgtcaatattaaatagggtgggaaaatggtttcttagaataactgttcaactgtgtgtaaataaggaaagttttcaatgagtattacttattgtaattaatgcagaagacttaacccaggtcgaccgaatgtctcgcc

SEQ ID NO: 360481 - DNA, 459 bp, Homo Sapiens
tttctctgagagaacagctgattgagaatttccattgtaaatagctcagtgttgtatagtgaggcttacgatgttttgtagtcttggcgtaaggacacagcccaagtaactgacgtttcccctccccctcccctctgaggagcctgcctgcctcacaactcaccctcacttcactgaatgaggaggctgagcagctgcagtgtttctgtccggaggaaatggatcttaggccactggacaagaacctgcacccaagggccctgaacccattttcctcccctgtcccagccttcccactttgacagacacttttaactgtgttccttactgctgccacaatcagcatggttgtatagtgccccattaggccatttacatacccagagttatactcaagcagaatgcacaaatggacatgtcataatttttgttacaataaatatgaaatttacaagtaaa

SEQ ID NO: 360482 - DNA, 936 bp, Homo Sapiens
  misc_feature (12)..(12): n is a, c, g, or t
  misc_feature (25)..(25): n is a, c, g, or t
  misc_feature (678)..(678): n is a, c, g, or t
gctccacggccntaatggatccccntaaaaaatccccctgcccctaagatgaacacccctgggctgggataagtttgaatgtgcctgatagtggacatgggtagaatgaaggtggttgaaatgttccatattaaagaacttcccaccccagattgcaagaaaagagagaggaatggagatggcagcacgagcccctacaataaaagcagatgttttgagatcagttatatttcttctgacaaaaattaaagacagaaaccaaagtttacctgaggctacaattaattgggcaataagccaaagacaaatatggcatagacagatttaaacatttctcccttatattaatacaaacactaaaattacaaatacatggattccaaataaaacaaatatttaaaaaatttaatgaataaacactggggtctacagtagtatttgaaggagatctcacaaacaggtttggtttttgaaggttagaactggtggtctagagaattcatttcattccagagagagaaagagaggaatttcttgggttccttcaggaatgtgtctagctttgcctcatgtttgtttgaacgatggatacggcagaagaaagcatgaggatttcacagatttaaggtgcaaaaagtcactgggttctctaagaagtctgggattcttctgtctgcnagtgtggaaacaaattattcatgcaaaaggtcctcttactgttcctcgaggcagctttgtaagcttctgagcacttcccaattccgggtgacttcaggcgctgggagccctgtgcatcagctgctgctgtctgtagctgagttccttcacccctctgctgtcctcagctccttcgaccctgggcctcaggaaatcaatgtcatgctgacatcactctagatctaaaacttgggttcttggaccaggtgcggtggctca

SEQ ID NO: 360483 - DNA, 763 bp, Homo Sapiens
  misc_feature (30)..(30): n is a, c, g, or t
  misc_feature (115)..(115): n is a, c, g, or t
agtgtatattcactctaccatttaaaaacnagagctcttgtaggcattctccatcacatcataaacctgagctttctaaaacagggtgtggcaaactaccatgcatggaccaggnctgacacagtctgcgtttgtaagtaaagttgtaatgggacacagccaatacatgtgttaaaaaacgtctctggttactttcatggtataatggaagacctgagtcattaagagagagaccatatggcttggaaaacttaaaatatttaacatttagccccttgcagaaaatatttgctgactcttgttttaaaagatctctgtttagaatgctacctattgccttctggatagaatcacaactctttaccacaatcaacacagcttcagccctgcttctatatccagcctcatctatttctgctcctcctccttattttccttccggacatgctgatggattgtcagcttcccagatgtgcgagaatctctcctcccttcccaacattctcacaatctccctctgcctctcaagaacttcctgtcccatctctcatgacaaatcctttcttcattctttaagatgcagccccttggctctttccttaaggatgtctgtctggctctattttgggtgacgtgctccttctgcatctcccagagccagccggtgtgtgtcagctacaacatttctttgcatctctgtgtcatatatcaccaaatctgcctaagcttgcatgagtcactgcatgacaacttcagactccac

SEQ ID NO: 360484 - DNA, 1253 bp, Homo Sapiens
  misc_feature (299)..(311): n is a, c, g, or t
  misc_feature (657)..(667): n is a, c, g, or t
  misc_feature (761)..(1022): n is a, c, g, or t
ggggggaagaaattccatccaaaaatgttgcctacagctatgagttaagagtgtctgtacagtgtgtagcttttattttctaaaatcacagatagggcatgtatatgacctataaatatataaatacgattttgtattaaaagttttgtagtttatggcaaaatctggtcctgtggtaggccaaataagtacagtccctgtgaaaggaatgtttgtggcccatgtcagtgtgtgaatgcatagacaatttgaagtttttgatatatttgtgatatttatcttgagcactgcaatctcannnnnnnnnnnnnaccaagggaattcaatgggaatgtttattgtgactttgtcctctgttgcattttaaagttatttcctgtaatttattttcagtacataattaaaaatttgttgtatatataaaatgaaacttgtgattcttttttaaggaatttttcaagtatgtattccacttcataaaccacatttgtttatagtgaaaagagcatgagcaggaaacaccccagttgagagctctaaggcattgtacctcaaaactaagcttgtaaaaagttacttttctgtgtctgtctctataagggaaaacctatgattagcctagttatagatggggatcgttaatttctttctctctcnnnnnnnnnnnggggggtatatgtaaggctagcatttttccagtcactttgggggtcttcttggtgaacaccgattaaagtcacctagtttggttggttcctttnnnnnnnnnnnnnnnnnnnnnnnnnnnnnnnnnnnnnnnnnnnnnnnnnnnnnnnnnnnnnnnnnnnnnnnnnnnnnnnnnnnnnnnnnnnnnnnnnnnnnnnnnnnnnnnnnnnnnnnnnnnnnnnnnnnnnnnnnnnnnnnnnnnnnnnnnnnnnnnnnnnnnnnnnnnnnnnnnnnnnnnnnnnnnnnnnnnnnnnnnnnnnnnnnnnnnnnnnnnnnnnnnnnnnnnnnnnnnnnnnnnnnnnnnnnnnnnnnnnnnngcgtgagccaccgcgcccggcccttagttggctttttaagcgaagaaaatgccggtgttgacgttgcttgttgtggaaaactctgaatttacttgggtgtgatacatcttcgtcccaatccattcagattctggttatatggaatggattcgttccatctgtttttaattgctcacttatctgttcttaaagaatccacctgaaagggtctttaattctttctgccacctg

SEQ ID NO: 360485 - DNA, 822 bp, Homo Sapiens
ctctgccctcatcttgctgtcttgggagaaagcctgctgaagacgttgccacagctactagccacgtgcattagcgggcccttccgttcccaaggctcagaccgtaggacactaccagcaccagcgtgactgtcttgattagcagggtccacttccccaagtagcccctgatgataaagccgctcaaaatggtctttatctctggtatgccagagccacaggcatatggtgcaaatacacgcaccagggagacagccaaaaatgcaaacagcagcgcccataggatgtacattaagtaattcagaatgtaagcactggcaccctctgactgattcaccagcagctccgaccatttctgccacaggggacacttgtctctgtcctcaaaagtggtctcgttagaagtccagcaacactgctcatggctataccagaaggcagacaggcagaccccctccttcaggtccgtcatccagtccacggcgagatcgatgaccccagccaaggtgcccgccagcaggccgatgagcagcatcaccacccatcccgaccaggcatccagcaggctcttgatgaactcccatatggactccttgctcttgctggtgatcttcctgtgtctgtcggtgtcccgtgacttttcccttagccagtcgatggtgtggaagtcctcatacgtccccacatcagggaacggctcatcgaggaaatccatcaggtttccagagccactcatcgctcccgcattgaccatgctaattacacctgcagtgccgcatcgcgcccgcggccgcccacctggacagcatcctcgagcatctt

SEQ ID NO: 360486 - DNA, 505 bp, Homo Sapiens
ccaagggaggagaaccttctttcctaatccccttatcttcatggaaaatggactgactttatgcctatgaagtccccaggagctacactgatactgagaaaaccaggctctttggggctagacagactggcagagagtgagatctccctctctgagaggagcagcagatgctcacagaccacactcagctcaggccccttggagcaggatggctcctctaagaatctcacaggacctcttagtctctgccctatacgccgccttcactccacagcctcacccctcccacccccatactggtactgctgtaatgagccaagtggcagctaaaagttgggggtgttctgcccagtcccgtcattctgggctagaaggcaggggaccttggcatgtggctggccacaccaagcaggaagcacaaactcccccaagctgactcatcctaactaacagtcacgccgtgggatgtctctgtccacattaaactaacagcattaatgcaaaa

SEQ ID NO: 360487 - DNA, 363 bp, Homo Sapiens
  misc_feature (38)..(38): n is a, c, g, or t
cgtgtgtttccccacagggacgaggccattgttgaggnagatggggccccagccctgggccacgccaaccgggctgcagagggagccccggcctttgaagaggaagcccttgagctcgaaggtctggatgctgctgccgaggaggccggggccgtggaagagggggtctacaatggccaccgggaagcctttgcccccaggcatgccactgaatccccagacaggaagatggagccctggccgatgaccagggcctcacagctgccagtcacagggagagaggcccccgcagggggggcagggccctcagcgatgggcacctggtcacttgctggtacccaccgcttgtcgggctagtcgggg

SEQ ID NO: 360488 - DNA, 519 bp, Homo Sapiens
  misc_feature (75)..(75): n is a, c, g, or t
  misc_feature (455)..(455): n is a, c, g, or t
  misc_feature (474)..(474): n is a, c, g, or t
  misc_feature (481)..(481): n is a, c, g, or t
  misc_feature (486)..(486): n is a, c, g, or t
cgtgtgatcccgggaggagctgatggagtagaacctgggcttcagaatggggagctgggaaagcaggaagccagnagacacccgcagggacgggaactcctctagcacctccaggaatgtggggctgttggtgaacttccacttgctgtactctgagggctggcacagggcctccagcctctgtctctcaggctcttctgtggccacctgggccagcttttggagcagcagctgggttgggggtgtggtgatgtccaggaagtaggtgagggcctggctgagtgagcaggggggcagcctcttgtcactgacccagtagctgccactctcatccagggcctccaggcgcactgtctggtggggtgtggggccatccaccactcgctccaggatgccttggaccagggccggctggttgcctgggcaaaacccaaggtgctcccccggcaggtagntcaggccttggccatcctnacagganagttncaccaggatggtggcacggctggatgtcggacc

SEQ ID NO: 360489 - DNA, 426 bp, Homo Sapiens
ctgggatttacaccacgcctagcccagcagaggccttagtcccatttggggcttgggagtgacatttgcttgaggcttatacactggtgtggttgcctggcttgcaggaaatgaccaagctcacacatgctggctgaagcgtaagcagacaactgaggtactcttttgaaggatgaaggtggtggattctcagccctgggggtcttcctcacctgaggacccttcagagccaccctttctagtttgcatttcctggtgcacacatttaaggcataacagcacattcatccctttggtttgggatctcaggaatacagtcccatgcaaagattctctggttttatggcttttttccctttctttacaccatcctctcccataagcacccatgtctttgaatatgaatgtatttgtaaaataccaaaa

SEQ ID NO: 360490 - DNA, 1245 bp, Homo Sapiens
  misc_feature (1211)..(1211): n is a, c, g, or t
agcgggtggggaggaaagtgtgccatggcggagcctgtggggaagcggggccgctggtccggaggtagcggtgccggccgagggggtcggggcggctggggcggtcggggccggcgtcctcgggcccagcggtctccatcccggggcacgctggacgtagtgtctgtggacttggtcaccgacagcgatgaggaaattctggaggtcgccaccgctcgcggtgccgcggacgaggttgaggtggagcccccggagcccccggggccggtcgcgtcccgggataacagcaacagtgacagcgaaggggaggacaggcggcccgcaggaaccccgcgggagccggtcaggcggcggcggcggctggtgctggatccgggggaggcgccgctggttccggtgtactcggggaaggttaaaagcagccttcgccttatcccagatgatctatccctcctgaaactctaccctccaggggatgaggaagaggcagagctggcagattcgagtggtctctaccatgagggctccccatcaccaggctctccctggaagacaaagctgaggactaaggataaagaagagaagaaaaagacagagtttctggatctggacaactctcctctgtccccaccttcaccaaggaccaaaagcagaacgcatactcgggcactcaagaagttaagtgaggtgaacaagcgcctccaggatctccgttcctgtctgagccccaagccacctcagggtcaagagcaacagggccaagaggatgaagtggtcttggtggaagggcccaccctcccagagaccccccgactcttcccactcaaaatccgttgccgggctgacctggtcagattgcccctcaggatgtcggagcccctgcagagtgtggtggaccacatggccacccaccttggggtgtccccaagcaggatccttttgctttttggagagacagagctatcacctactgccactcccaggaccctaaagctcggagtggctgacatcattgactgtgtggtactaacaagttctccagaggccacagagacgtcccaacagctccagctccggggtgcaggggaaaggagaaacaccagacactgggaagtctcactggtctcgagattcccctctaaagaccctcatgtcccactatgaggaggccatggggaactggcccggggacgggaaaagctctccctttncttctttggatggggacaaaagctttttccaggc

SEQ ID NO: 360491 - DNA, 886 bp, Homo Sapiens
tgtgttacgtagttagagattggcccggtgcgtgctgtctaacgtggtgaagtagatcagtagtcgcgcaatttgggcaggattagcttgatatgagggttagaaaaggagttaagggaacgttgcgtgtacaatgtcgtcccggaaggagaaataatgttgtcaacccagaagttatcacgtccagaaaagtcgaagcactgtaggttcagacaaaccggaccaccctgtattaggaagatataagaacgcaatgatatagtgacacgttgggaaaacaatacaattaaggaatgggaaacaaaaaggtagtttagggggatataaaactatgaataagtagcttaaaaattcaagtcaataaagttgtgttacaacacctgggggaacagcatgcagcgttactcaattggacaaatattttccaaccaacaagagtgctatgggtcagagtacagggattgtgtgggaagtcaacaggaatttatcactttggtcatgcagaaagatttgcctccaagttctgatttgtaataaattcttcttggctttagaaactaaaatgtaggctatgaaatgtgttagattcaggagatagagaccaatgaaacacaaacaataagggcttaataacgatgcagtgctataagattatggtaaaaataaaataagtatatgaaaagggcacgcatgaagaattgaaagaatgtcatccttggtaaattaggctagatcttgtggcaatggcacccaagctaatgaagaagagtaaatgatatttgactgttacatatgtatatatagacgaaaagaaatataccataaaccctcgtgccgaattcccacccagccgtcgctaccttaggaaccggttagtaggtactgc

SEQ ID NO: 360492 - DNA, 452 bp, Homo Sapiens
tcagacaactctgcctgggagtgagggctctgctcagcggcctagacctgggcacaacggaacaggccactccgtttctcatcacagacctgaaggcagatggcctgggcgtcgggcttcctctgctctctggcggggcgattttcacggtcaccaggctgcggacaggctgtgggggtggcgggcggtccaaagccaccgcttcacgtaggccaggggagccttggagaaatcaggcctgatgttgctcagcagcggcacctgttgggaaagcacctccaggcctcggggaccatctctctcaggacgcggatggggcgggggaccatctctctctggatgcagatgcgggtgtagtcccagctgggaggagttggtgcggaagggccggatgcggacccagttgtttcctgttggaattaggtgaccttgcatttttcctgggacctggg

SEQ ID NO: 360493 - DNA, 1178 bp, Homo Sapiens
  misc_feature (146)..(154): n is a, c, g, or t
  misc_feature (1155)..(1155): n is a, c, g, or t
ggtccggaattcccgggatcatctgcctcagtctgggccaatctattgcccaatcttcaattggttgcgacttttttgtctcttcccgattctggcattccagagggtcaataggttccttctccacgtgcttttgagggaaatgnnnnnnnnnaaaaaacttttcacaccaccttgaacagactctaaacttaggcactacagttactaagcagcctttggattctttgtttttgaagttagatcttttcagctattagtggaaaatgtgcctcactctactccaggattaccaatagaaatgaaaggacagaaatggcattagtgtttagagaagattatgtatatatggctgtgtgaacactgaaaattatgagggtcaacataaaatcagcattacaggtactaaaacataaatcctgatggctttcaccgttttcttaagagcaaaattgcaaaaagtgatattaacagtcatcctagacgaatatgagcaaatgatttgtttttccttaaaagagcctccaagtgtattgtgatcattttcacactgatcaaagagagcacccttctgtcaacaggtatctgcagttttcaggacctggcagaaattcttctatgttctgcctttaaaggtcaggtacaaaagcagagacagctgccaggcccctctgcccagagctaagtgtctgggaccatgagtgggaaggacaggcttgagcctccttggtcctccagacagcatggggcgctacttgccccttctgcagctgcgcgcggcaaagctgtggcctggccgtggcctcctgccccatgcaacagttggtggacagaccgtacctggcacacggcgccttgtgcactttccaacattttgatgctaaccgtcgctagtcactgagccctgacatttgatctctggccttgaccgcagatttcggaaacttctggcagcccagtgtctactggaaggcccaagccgcttgccagaaagctgcgccccgcccaaaagcactgggttctgcagtccaggggccttcctcagctcccaggtccagggagaactgcaaggtcacctacttccacaggaagcactgggtccgcatccggcccctccgcaacactcctcccagctgggaattacaaccgcatctncatccagagagagatggtccccg

SEQ ID NO: 360494 - DNA, 987 bp, Homo Sapiens
cgccgtgtgggatcctcgggtaccgggagcgaacgaggaggctctggctcagtgcatccactctgggagagcgtggacctggttcctgggggcgatcgacagtcacccatcaacattcggtggagggacagtgtttatgatcccggcttaaaaccactgaccatctcttatgacccagccacctgcctccacgtctggaataatgggtactctttcctcgtggaatttgaagattctacagataaatcagctgcacttagtgatttggaacgcagtcaaatttgaaaactttgaggatgcagcactggaagaaaatggtttggctgtgataggagtatttttaaagatttcgggaaaattctcagtctcccttgaagaagtgaagcctccttctttatgcactggccactgtctaatacctcccagcaatactcagaggagactacctgctggaacctcactagaattgagagatcaaatggttttggctgttttcccactggagaatataaaaaatacacagttaattttagaaacaaaggctgggcatgattccatcctaagcagcaattcttcaggtagctgcccagaagggcctggagctcctctggaccactgctgatctccagatactccctgagaaccgtcacctcggcgtccaattcctgagtggttttcactactaaataatgactcagtgacccagtctcttggccaggacgctgttatggaatttgggtcgtttggcacttcctgcctgggtgcccacctgtctaggattactggacccaagtaggtccagtatctccctggtccagccctgtcttgagtccatcacctttatcattaagaagcagccagtagaggttgatgatgatcaggtatctgcagttttcaggacctggcagaaattcttctatgttctgcttttaaaggtcaggtacaaaagcagagacagctgccagggcccctctgcccagagctaag

SEQ ID NO: 360495 - DNA, 1178 bp, Homo Sapiens
  misc_feature (176)..(176): n is a, c, g, or t
  misc_feature (240)..(240): n is a, c, g, or t
  misc_feature (477)..(498): n is a, c, g, or t
ctgaacaccatcggtgagtcggatgggtgcagaaattcattattccagatcgctgacagatatcacatatttgaaaagatgaatagggcggacatggctcagatgtgtgtctcccaggacaagtgtttcatcttcacttgacgagctatttagtggaaaaaccacaggcgcacctnttgacaggcatcccattcatcaaaagtgtctaactatttgatactggggagataacttattttncttttttcattggcttgacatgtgtatctgttcatgtcaaggtttataaatatatttctaataaatgtgctctattttttagcatgaaccaaatacttggagaggcgctcccagatccatagagctttccttagttttatctgctttgtcccctcctcccccaactacagatgttctgttgtggagccattctagtccttttgtctcatcttgagtcttttaccttgcgcttttgtnnnnnnnnnnnnnnnnnnnnnngcctctttggtctgaaggacattttcccatactgtcagccatggttttgggtgcatgttttaagattgtccattgagtggctttttgttgttatctcggagatataaaatgattgtgggcatgcagaccttagatgcaccctatctttactgagaattatgcatgaataagggctgagtgatagatcagcttaaaattaaaaggactacctttgaggaagaagagcgtggctatatttgcagatgaacttttgaacagaatattcagcttcttaccggcagcgttattgtttcattcttgtgaccattcgtttatcagattttgattttagcggtcatgtaccgagagagttgggaagaacaagggggaaagctcgggattaggtgcattactccttcctttgcaagatacctgggatcctcctcaaaagcgggtggggtataaatgacacaagaactcccccaggagatctcatggtgattcaggctgtgaggacagccctgtgacaggtgacttttcagggacatgaacgaggggatttaatgatttgccctaaaggacttctgtattttttaaagccctggtttacaaccacatgaagctattcctctcctgcagggatggttgcataaaaaaccaattagtcccttcctgggctccctgaaatgggcccttgcctg

SEQ ID NO: 360496 - DNA, 460 bp, Homo Sapiens
tatttcatatctacctacaagtgaccaaaaaaaattttttaggccagcgattattatttagcttcgctctttctagtgcaagaaactgcaggctggatcagtagttcaacagataaacagtcataaaatagtcattgtgcatgttaaatttctttcaatgctttcaaagataaattccaatttctatttacttattcattgtgacagtattactaaacaggtaaggatgggaatattttgttatactgtgtatagtgaatgtattgtactgtgtctgtgaaaactgtgctttaaattatattttcatatgttttgttggggacagagcacattaagtctgaaagcaacagaggtttgttttagaactgaaggcaatttaatcaaaattcctgtcaagaaaagctgcttataaatgtaaatgaaatcacatttaaaataaactgcctctgacccaaaaata

SEQ ID NO: 360497 - DNA, 1004 bp, Homo Sapiens
  misc_feature (792)..(805): n is a, c, g, or t
  misc_feature (980)..(980): n is a, c, g, or t
ttccatgtgttaataccatcatcaccatttaatttttaacataaactttacaatatgtacaattttatttggataatacacttacgtgtgaattgtagaaatcaagcatgtatattatatacatgtgtacacaagcagttgtattcacaggataagtgcatttgatcatctctgatctatatcaagtggcaagctgacctcatctgatacaattagatatgaacacagtacaatgtatagggattgaatgggaaaccagtaactgcatattgggagaacttttcaagtatagaccccacagcacttttcaaccctgtttcaccaaaaagagatggggtatctggaaaggtctaattttgtctccagtgaaaataaacagtacttttggaaggaaaattgcctttacatagaacccttcactcattaaatatcaagcaacacatttagcttccacctactcaaacttctttttctttgagtccaatcatgtctactatagccatggttaatacaaacaggctccatttcagaaacaacgcatgtccccttttcaaggattcatgcacaacagctatgcacaaagaaacagtacaggaatgtgcataatgttaacgaatatatccagctcctctgtaaggtatttagagttctcaaattagtgtttatttaggtcttaaaccgcaagggatttcagtacaaggtacttatttatatgacaactgattattaaagctgcactttttagatttaaaggagataaatttttaatcaccatttaattaacatcaacannnnnnnnnnnnnncattagcaattctatttgcaaataattcagggcatttgtcatttcctgtgaaggatgcagaatattaaatacacatcagtggtcgacatagcaaatagaataaacaatgtgtgactatatgacagctgtggatcttttgactaattaactgccttggctagagtcccatttaagngaaactatttcatttgtaaacaag

SEQ ID NO: 360498 - DNA, 1339 bp, Homo Sapiens
ctggtacggtccggcgtttcgggatatgtcgacccacgcgtcgggtggccgagaccggcggggtgggggacgtgtcgcgcggccgggtggcctcggtcggtaccctgggcgcggagcagctgcctcattagtattcgtacccacgaggcggcgcagcgggccctcggggacagcgagcgtcgcggccatggcttatcactcgggctacggagcccacggctccaagcacagggcccgggcagccccggatccccctcccctcttcgatgacacaagcggtggttattccagccagcccgggggatacccagccacaggagcagacgtggccttcagtgtcaaccacttgcttggggacccaatggccaatgtggctatggcctatggcagctccatcgcatcccatgggcaaggacatggtgcacaaggagctgcaccgttttgtgtctgtgagcaaactcaagtatttttttgctgtggacacagcctacgtggccaagaagctagggctgctggtcttcccctacacacaccagaactgggaagtgcagtacagtcgtgatgctcctctgcccccccggcaagacctcaacgcccctgacctctatatccccacgatggccttcattacttacgtgctcctggctgggatggcactgggcattcagaaaaggttctccccggaggtgctgggcctgtgtgcaagcacagcgctggtgtgggtggtgatggaggtgctggccctgctcctgggcctctacctggccaccgtgcgcagtgacctgagcacctttcacctgctggcctacagtggctacaaatacgtgggaatgatcctcagtgtgctcacggggctgctgttcggcagcgatggctactacgtggcgctggcctggacctcatcggcgctcatgtacttcattgtgcgctctttgcggacagcagccctgggccccgacagcatggggggccccgtcccccggcagcgtctccagctctacctgactctgggagctgcagccttccagcccctcatcatatactggctgactttccacctggtccggtgaccccctggccccagatggcactgagtttttcattcattgaagatttgatttccttgaaaaaacacaaaaagaaacctccgaggcactctaatcccggggctgcggagaacagcagggcaccgaacgggcccagggccaaagcggtacctgaccaagcttctggtacaagcggacatctgcgggccccaatggggggcgattacccgaaacccggtacgcacgataccgcacaaacacccccgacaccgcaccacacgacgcacccacga

SEQ ID NO: 360499 - DNA, 880 bp, Homo Sapiens
ggggatgacgccacggacatggtggccgagaccggcggggtgggggacgtgtcgcgcggccgggtggcctcggtcggtaccctgggcgcggagcagctgcctcattagtattcgtacccacgaggcggcgcagcgggccctcggggacagcgagcgtcgcggccatggcttatcactcgggctacggagcccacggctccaagcacagggcccgggcagccccggatccccctcccctcttcgatgacacaagcggtggttattccagccagcccgggggatacccagccacaggagcagacgtggccttcagtgtcaaccacttgcttggggacccaatggccaatgtggctatggcctatggcagctccatcgcatcccatgggaaggacatggtgcacaaggagctgcaccgttttgtgtctgtgagcaaactcaagtatttttttgctgtggacacagcctacgtggccaagaagctagggctgctggtcttcccctacacacaccagaactgggaagtgcagtacagtcgtgatgctcctctgcccccccggcaagacctcaacgcccctgacctctatatccccacgatggccttcattacttacgtgctcctggctgggatggcactgggcattcagaaaaggttctccccggaggtgctgggcctgtgtgccaacacagcgctggcgtgggttggtgatcgcaggcgcttggcctctgctcctggggccccttccttgtgccccgctggcgccgtggacctgtatcaccctttccccgtgtgggcctaccgtgtggttcccaataatccgggggagaatgatttctccggggggggtcccacgggggtcttgtctgagttcccccatattta

SEQ ID NO: 360500 - DNA, 763 bp, Homo Sapiens
  misc_feature (27)..(27): n is a, c, g, or t
  misc_feature (152)..(229): n is a, c, g, or t
  misc_feature (328)..(328): n is a, c, g, or t
agaaagtcactgatccctccagccccnaaaccccatcatcgtaaccatgggcaccccagaatgtgcccacacggttaagagaccgtgaacatgaggaacatcgaatcctaacagctgcccttgaggtcagcacgatgatcccattttcaccnnnnnnnnnnnnnnnnnnnnnnnnnnnnnnnnnnnnnnnnnnnnnnnnnnnnnnnnnnnnnnnnnnnnnnnnnnnnnnttgatggtgacacagcactgtccactaagctgtccctaaggtggagatgcctgctggactccccacagaaaggagacatcaagatctgaaacttggggncctcctgcagaggcagaaaacttgtcctaggctgctgggctgggaatgcggagccccgggagtgacaccaatggaaacagggttgctctttggggtgacagagatgttctaaagtccaccacagtgatggctgcatatatctgaaaatacactagaaaccactgaactgtatagactttcaaccagtgggcactatggcatgggaattacatctcaacagccctgctgatgaaaacgctggacccctgctcccatcttctcagcaccctcgttttgcagacgaggaagccgaggcctgggctggatgtggaagagcagggaaggttcttccggggtggagatagctgagtcctggtctcgctcctcagatcccagggctacaagagccatttgagacctgaaccccaaagaatgcaagttaacaccccatcccca

SEQ ID NO: 360501 - DNA, 1258 bp, Homo Sapiens
gagaagccgcagtctcgagagcgtcaacgaggtgtttcggtagtctctggccatcctttctgcgcacccggtgtcgctgggctgcaccccgggcggggacgtccgccgggcacgggagggggccaagatgccgatcaataaatcagagaagccagaaagctgcgataatgtgaaggttgttgttaggtgccggcccctcaatgagagagagaaatcaatgtgctacaaacaggctgtcagtgtggatgagatgaggggaactatcactgtacataagactgattcttccaatgaacctccaaagacatttacttttgatactgtttttggaccagagagtaaacaacttgatgtttataacttaactgcaagacctattattgattctgtacttgaaggctacaatgggactatttttgcatatggacaaaccggaacaggcaaaacttttaccatggaaggtgttcgagctattcctgaacttagaggaataattcccaattcatttgctcacatatttggtcatattgcaaaagcggagggtgatacaagattttttggttcgagtgtcttatttggaaatatataatgaagaagttcgtgaccttttgggcaaggatcagacacaaaggttagaggttaaagaaagacctgatgtgggagtttatatcaaagatttatcagcttatgtggtaaataatgctgatgatatggatagaattatgacgctaggccacaaaaatcgttctgttggtgcaactaatatgaacgaacatagttcccgttcccatgccatctttacaattactatagaatgcagtgaaaaaggcattgatggtaacatgcatgtcaggatggggaagctccatcttgtagatcttgctggttcagaaagacaggcaaaaactggagctactggacagcgcctaaaggaagctacaaaaatcaatctttcactttccacccttggtaatgtaatttctgccttggttgatggaaaaagcactcatgtgccttatcgtaactctaaactgactcgtcttcttcaggattccttaggaggaaattcaaaaaccatgatgtgtgcaaatattgggccagcagaatacaattatgatgaaactatcagtacattacggtatgccaatcgtgctaagaatattaaaaataaagctagaattaaatgaagatccaaggatgctttgctgcgtcagttccagaaagaaatagaagaactgaaaaagaagcttgaagaaga

SEQ ID NO: 360502 - DNA, 247 bp, Homo Sapiens
acgcgcgtgcacgtcaccaccggagcatttagggtttggtacaagatggttctaaaatggcaaaggtttttcgtgtttgtttgttttgtttctttggaaaaagaaaaggaaaggaaaatcatgcagaatcgcaagcattcagactggacgaccggctcgtattccgatcagtcgcttccattgttagcatcgtacacgattgtgatttttatgtcaaaagaagccaaaacttgcaatactattttta

SEQ ID NO: 360503 - DNA, 347 bp, Homo Sapiens
cacgcgcgtgcacgtcaccaccggagcatttagggtttggtacaagatggttctaaaatggcaaaggtttttcgtgtttgtttgttttgttttcctgagccctcactctgtttttgtgctgttactcggtagagtcaagactgttactttttagccatggctgacattgtatcaataactaaaactgaaacattcaaaagcgaacagggaaaccgagggcttcaagcgtgctcagagccgtttcagacagtggaaatccatgacaaacaaaaggatgtgatcattaattgtaaagcgctttgtaaaattcacatttacaaaataataaagtcagttcaaacctaaac

SEQ ID NO: 360504 - DNA, 772 bp, Homo Sapiens
  misc_feature (29)..(29): n is a, c, g, or t
ggttatacctaacatctgttaagggtcantggactctgaaatcaaattttaatggttgttttaaaatcaccgtgtattaggatactaatgatagtccctaatatccatccagaaatgctggcagaaagcactggccaccatacaggacagaccacaccacagctccatacccagcgtcctccctggaggctcccccacgctgaggtccgggagaatgcctggtttcagtcatttccggactaactgtgacaacgcgtgagcagggagcaccgtgcgagtctccgggagggaatcctcctggggcccagagactcctccacccctggggagggcagacaggctcgggaaggcctggccaggccactggaggctggcagggagcaggcatgtccacccgcaagcctgggaggctaactctggcattcctggccggagccgccatgctcattggtgggccagtttgggacatccccgtactcaaagaccatatggcagcctctgggaaaacaaaaccaaaacatcaccttctattaaactctgtatattattattttttacaatagaaagttaaaaatcaagacttagatttactatacattttttctctcagattacaaagtttatattatataactggggttccctaaattgatttcttttaaaacagtcttaaagagaccagaagtgaatacaaaagaactaaacaaaataaaaaattagaatgtgctgtagctgaaagctgtctatacctgtaagcctccaagtttcatcc

SEQ ID NO: 360505 - DNA, 382 bp, Homo Sapiens
  misc_feature (61)..(61): n is a, c, g, or t
  misc_feature (154)..(154): n is a, c, g, or t
acagggccccccgcgtctgttgcccctgagtccactgtaaatccccttaaaaggtgaaagnacccccggtcccttggccttttccgtgccacatgagaaaatgttggcccaaggttagcgattatgccttctgtaatctgtaacccagaagtgnctccttatgccccaaaccttgatgtgattctgctgtaatgtaacttcggagccagctggatggatgtgactgtgcaggtcctgagccccggcccccgtaaccaagcagtgggccgagacactgagccgggcagtcaaacaggagctctctaaggctgctcccgggctgggacctgggtctaggattctcagtaagacctttgaataaaactaacttgaattcttcaat

SEQ ID NO: 360506 - DNA, 1522 bp, Homo Sapiens
  misc_feature (62)..(62): n is a, c, g, or t
ggcagggacgttctcagagacctcacacacatcaataaaatcccgtgaacgacggtatgccnacagatgagataacatggacgaaacggaaaaactccaagaaacacacaagctagcaactgactcagggatggacaatccgaacgatcctataacaaatacatagattgaatcgaatcaaaatcctcccaaagaccccaagaccagataggcttactggcaaattcctaccaaaggttctagcaagaattaacaccaatctctctcttccaaaaaaaacggaggagagaacatttcctaacccaatctatgaggctaatattatcctgatatcaaaaccaaaggaagacatcataagaaaacaccagaccaatatcccttataaatacagatgtaaaaatccgcaccaaaatacaagcaaatcacattcagcagcagagtaaatggattatacaccatgaccgagttagatgtattccacaaatggaaactggctcaacatatgaaaatcaatcaatgtaacacctcatattaacagaagaacacaggatcttttcaatagaggccagaaaagcatttgacaaaatccagtaccctttaaggataaaaacacttaacaaattaggactagaagggaccgtcttcagctggatgaagagcatccttgaaaatctaacagctcacatcacatctagtggtgaaagactgcaaacgttcccttaagatcaggaacaagacaaggacgtgtgctctcaccaccacgttcgatcaggaacgagacgaggacgtgtgctctcaccaccgcgttcgatcaggaacgagacgaggacgtgtgctctcaccaccgcgttcgatcaggaacgagacgaggacgtgtgctctcaccaccgcgttcgatcaggaacgagacgaggacgtgtgctctcaccaccgcgttcgatcaggaatgagacgaggacgtgtgctctcaccaccacgttcaacaaagtgctgaggactctccggagtctcctttggggcatgccactggcctctgcgccttcgggctcctcggtgtgggtggcccggggagtcccagcgacttgcggatgtgctctcgggagcagatgtcagcctggcgcacgggctctgggatccggaacctgcagcagcagcaagtcaggcgcacagcggcctccaggctcatcctgtggcccacggagatgtagaggggcctggtgctgcggtcgtggctcctcagggccttctccttgtgcagggcgttgttctccagcccatccacctgcagaagtttcttggccaccccaacacacggcaggtctgtaaggacgccaaggtggcaggccaccccaaagcctcagactctgcctcctccacccgcgcggctgcagcggacagagcgcctctgccgggtcttctcccgcttcaagggaaagcaagggacataccgccgaggccacagtccctaggagcccaggcggcggagacccgcgcaagcgcagatcccgggaattccggacgg

SEQ ID NO: 360507 - DNA, 769 bp, Homo Sapiens
gggctggtacaggtccggaatttccgggatatcgtcgacccacgcgtcgcgtgcggaaggggtgcccgggacgaagccatggccctggaggcggcgggagggccgccggaggaaacgctgtcactgtggaaacgggagcaagctcggctgaaggcccacgtcgtagaccgggacaccgaggcgtggcagcgagaccccgccttctcgggtctgcagagggtcgggggcgttgacgtgtccttcgtgaaaggggacagtgtccgcgcttgtgcttccctggtggtgctcagcttccctgagctcgaggtccttcttgtggatggaaacggggtactccacgcaccgatggcttcggggtggcctgccaccttggcgtccttacagacctgccgtagtgcttcggggttggccatacgaaactatctagcacggtgcgatgggctgcgacgaacaagcgccctgcacaaggagaagatccgaactcctgcagactcgaggagactcattccctctgctgggagactctgggactgtcctgggaatggccctgaggagccacgtacgcagcaccaggcccctctacatctccgtgggccacaggatgagcctggaggccgctgtgcgcctgactttgctgctgctgcaggttccggatcccagagcccgtgcgccaggctgacatctggtccgagagcacatccgcaagtcgctgggactccccggggcaccagacgaggagcccgaaggcgcagaggcagtggatgcccaa

SEQ ID NO: 360508 - DNA, 804 bp, Homo Sapiens
agcgggtctggcctgcgcttgcgcgggtctccgccgcctgggctcctagggactgtggcctcggcggtatgtcccttgctttcccttgaagcgggagaagacccggcagaggcgctctgtccgctgcagccgcgcgggtggaggaggcagagtctgaggctttggggtggcctgccaccttggcgtccttacagacctgccgtgtgttggggtggccaagaaacttctgcaggtggatgggctggagaacaacgccctgcacaaggagaagatccgactcctgcagactcgaggagactcattccctctgctgggagactctgggactgtcctgggaatggccctgaggagccacgaccgcagcaccaggcccctctacatctccgtgggccacaggatgagcctggaggccgctgtgcgcctgacttgctgctgctgcaggttccggatcccagagcccgtgcgccagcactttgttgaacgtggtggtgagagcacacgtcctcgtctcattcctgatcgaacgcggtggtgagagcacacgtcctcgtctcgttcctgatcgaacgcggtggtgagagcacacgtcctcgtctcgttcctgatcgaacgcggtggtgagagcacacgtcctcgtctcgttcctgatcgaacgcggtggtgagagcacacgtcctcgtctcgttcctgattcgaacgtggtggtgagagcacacgttccttgttcttgttcctgatcttaagggaccgtttgcaggctttcaccactaagatgtgatgtgagctgttagattttaacggatg

SEQ ID NO: 360509 - DNA, 1332 bp, Homo Sapiens
  misc_feature (1035)..(1035): n is a, c, g, or t
  misc_feature (1187)..(1212): n is a, c, g, or t
ggctggaccggtccggattctccggatgtgcttttaaggaaaggcaagattgatgtttccttgaggggagccaggaggggatgtgtgtgtgcagagctgaagagctggggagaatggggctgggcccacccaagcaggaggctgggacgctctgctgtgggcacaggtcaggctaatgttggcagatgcagctcttcctggacaggccaggtggtgggcattctctctccaaggtgtgccccgtgggcattactgtttaagacacttccgtcacatcccaccccatcctccagggctcaacactgtgacatctctattccccaccctccccttcccagggcaataaaatgaccatggagggggcttgcactctcttggctgtcacccgatcgccagcaaaacttagatgtgagaaaaccccttcccattccatggcgaaaacatctccttagaaaagccattaccctcattaggcatggttttgggctcccaaaacacctgacagcccctccctcctctgagaggcggagagtgctgactgtagtgaccattgcatgccgggtgcagcatctggaagagctaggcagggtgtctgccccctcctgagttgaagtcatcctcccctgtgccagcccagaggccgagagctatggacagcattgccagtaacacaggccaccctgtgcagaagggagctggctccagcctggaaacctgtctgaggttgggagaggtgcacttggggcacagggagaggccgggacacacttagctggagatgtctctaaaagccctgtatcgtattcaccttcagtttttgtgttttgggacaattactttagaaaataagtaggtcgttttaaaaacaaaaattattgattgcttttttgtagtgttcagaaaaaaggttctttgtgtatagccaaatgactgaaagcactgatatatttaaaaacaaaaggcaatttattaaggaaatttgtaccatttcagtaaacctgtctgaatgtacctgtatacgtttcaaaaacacancccccccactgaatccctgtaacctatttattatataaagagtttgccttataaatttacataaaaatgtccgtttgtgtcttttgttgtaaaaatcaagtgattttttcataaggttcttttactattggaaaagatgggcagcacgcagnnnnnnnnnnnnnnnnnnnnnnnnnnaatacatgtgaaagcaaagaatactcagcatgcctttctaagtgacgcgttgcaccttttgttgggaagtactgtatcctgtgcttgttagcattctcgataaatctctctgtgaaagcg

SEQ ID NO: 360510 - DNA, 475 bp, Homo Sapiens
  misc_feature (17)..(17): n is a, c, g, or t
  misc_feature (53)..(53): n is a, c, g, or t
  misc_feature (62)..(62): n is a, c, g, or t
  misc_feature (407)..(416): n is a, c, g, or t
ggaacaacaatgccccntaacacgggcccacccctgtgcaaaaagggaacccnggctcccanccccggaaacccgtccgaaggttgggaagaggtgccacttggggccacagggagaggcccgggaacacacttagcctggagatgtcctcctaaaagcccctgtaccgtattccacccttccagtttttgtgttttgggacaattacctttagaaaataagtaggtcgttttaaaaacaaaaattattgattgccttttttgtagtgttcagaaaaaaggttcctttgtgtatagccaaatgactgaaagcactgatatatttaaaaacaaaaggcaatttattaaggaaatttgtaccatttcagtaaacctgtctgaatgtacctgtatacgtttcaaaaacannnnnnnnnnactgaatccctgtaacctatttattatataaagagtttgccttataaatttaaaaaaaa

SEQ ID NO: 360511 - DNA, 236 bp, Homo Sapiens
  misc_feature (111)..(111): n is a, c, g, or t
attccccctgaagtcaggaccagtgcctgtgatctccattactttattttcctggaggtattagccaacacagttagatcagagaaagcaattgaagccaggcatgaaagntggcgcccgtaatcccagctactaaggctggaggatcacttcagcccaggagtttaaggctgcagtgagctatgatgatgccactgtactgcagcttgggtaacagattgagaacctgtctcatt

SEQ ID NO: 360512 - DNA, 951 bp, Homo Sapiens
tcaggtggctatggttgaatttaagaagaaaacctcagacaattcaaaatatctcttaccagaaaagaaaccgctggcccgtaaggggcttccaccaatcagaacgcagagtctcccacccatcaccctgggcaataacttcctaacagcctcccatagggccacttcccatgcaggcctgagctctgctcctcatcatatggcccagcgatctcagaaaagtcgaagtgagcaggatttattaaataacagaactggctgccagatgttactagataacccctggaagagtgattctaatcaggtattttcctacaaagtttggactgtgtcttcttctgataagctgctggacagattgctcagtgtccggcctggtcaccaagaggtctccgtgccaccacaccttcgccatctacataatccatcatcaggacaaaattttcagcatctttccccaaacagacacaaaatcagggatcttcctttcactcggaacaacctagctcccctaccagatcaaaaatttctatctggagaacctctgcggacaaaccgagtgcttcctgcaattccaagtcaacgaagacacagcacagcagcagaagagagtgaacattctgccaaccccaccagtgatgaaaattaactgtgggccactcgctgcagaaatgtagatgaatatgtattttcaactctcaaaggacaagattactccagtttgtaagaacgaagaccaatttagtaagctgcattctataagccatcagttttataactcgaaattctttattccaaataaagatactccctaaataagcacttagaatatttgggtgtgcatattaagtctgtgaatttctgtgacttccacatgccaaaattaaaagacaaaatatgttatcagtaggaaaactgagctatgtttggtttgctttgtggcatgtgcac

SEQ ID NO: 360513 - DNA, 405 bp, Homo Sapiens
  misc_feature (74)..(74): n is a, c, g, or t
atctgggaatattgtgcttggcaccgtttctgaagtagactcacacaagccttcaagccagcccaggtaggtgnccaggcataaacttgtgcggccataagcatcctgcatgttaatattggctcccatcttcaacagcagcttcactgtgtccgcttgacgtccagaaaccgcatgcatcaagggcgtgcatccttcactgtcacagcattctaggatagaagggtcttcccgaatcactgcagtcagagcattgacatctccattagaggctgcttgataaaccatggtcaggtcaacttcctcagatgagtcacctctttgctgatcaaacacagaaggggtgctgaaatccatggtagcctgtctcatcatttaccattcagaatggcaaaaagcattcca

SEQ ID NO: 360514 - DNA, 466 bp, Homo Sapiens
  misc_feature (57)..(102): n is a, c, g, or t
ggatgcgctgggtgcctctctacaggccctgcctggcctcatcgcccaagccatacnnnnnnnnnnnnnnnnnnnnnnnnnnnnnnnnnnnnnnnnnnnnnnagaccaggcagcccggagctccccctgccggtggacgcccgtggccccctcggactgcgggtgacggccctgcccgccaccagacccctaaatcttggccatcgtgtggccgccacctccgggaagccttgtacagtggcgcctcttggagttcaagaagccaacgctgagtcaggctgagtggactgaggcctgccccgcccagactgcccaggcagagggcagggctggaccatgggtgagggcaggggagcccggagcttcctctggtcacctggtcccccgactctccccaggcccccggtgggcatggagcagcccggggaggggtccgtgctggttctgaataaagcaggacccgcct

SEQ ID NO: 360515 - DNA, 388 bp, Homo Sapiens
  misc_feature (27)..(27): n is a, c, g, or t
  misc_feature (356)..(356): n is a, c, g, or t
ttactactcttccccagagcgcagtgngtcttcggagctgttggacagtaatgatgtgatgggcagcagcatcccctcccccagccccccggacccagccagggtaacctcccacagcctctcctgccggaggaagggcatcttgaaacacagcagcaaatactcagcgggcaccatggacccagccctggtcagccctgaaatgcccacactggaatccctgtcagagcctggtgtccctgccgagggcctctcccggagctacagccgcccttccagtgtcatcagcgatgacagcgtgctgtccagcggactcttttgacttgctggatttgcaggagaatcgccctgcccgncagcgcatccgcagctgcgtctctgcagaaaa

SEQ ID NO: 360516 - DNA, 946 bp, Homo Sapiens
  misc_feature (12)..(12): n is a, c, g, or t
gagacaaatggntcacagctggcaccctgggaatagcacataatccagggtgtgtctgtggtggtggacgtgcaggggaacaccatctgtcctgtgtcatgatgggaaaacaatcatgaaccactggtctaaattaggcctggcatgctttctcagcccctccctcatttaaatttgtcttcccaaagctgagctaaaactaaaccatttctcctctgctggaatgatggattggtcattcagaggaacaataccaggggtgggaggtttgcaggctgagttccccaggcatgggggtcgcagggtgtccctgaggtttacccaaagcacagctcgctggcctgtgacctctgcccttcctcccacagtgtaagaccccccaggaagcagctggggcctgaacctctcacctaggaggtaggtttattttattttttgttagcatcaggctctgaaggagttggtatacattttgttttgaaaacaatcttctggacttacaccagagcttagtgtcgtctttactatggaaagagaggagaatggacagaaatggtttaactgtgtggagttttgtttgttttgttttaaatggaagaaagaccaaaactttcctggtggatcagctagggcctttgaccctgcattaccacggcattttatccaggtgaagtccagggaaagaactcagccaaatggactaaggaacacacgagtttggaatgcgagactctgacatttttgtgttcttggaaatccaattaccttcccatgcccagatttccttcctgcctcttggaccaggctctggcactgaggttctcactgttcccaacacagacaaagcttcctgagggctggaggggcagcaaggggagaggagaatggggaagaagcgcttgatgtagttgtgtggaataaacagtattttttcttttgtaaaaaa

SEQ ID NO: 360517 - DNA, 313 bp, Homo Sapiens
  misc_feature (37)..(37): n is a, c, g, or t
aattagcacacgcacgtccagcgcgcacagacgcggnactacacacacacatacacgctctgctgcatgttggacaaaccatgcctgccagagtgtagcagaggtgaggaagcaggtgggcagcttgcctgacccggcttttcaggagagcgtgtctccaacagagagtctccacactctagttcagggttatcgacctgcctcaatgagatgacagactcatttgggaggggtgttgcaaacaagttttcagtgagaatagttaagttccagagcttgtaaaggattcagtgactgacacttcagtaaatta

SEQ ID NO: 360518 - DNA, 389 bp, Homo Sapiens
  misc_feature (358)..(358): n is a, c, g, or t
  misc_feature (368)..(368): n is a, c, g, or t
  misc_feature (374)..(374): n is a, c, g, or t
atactgcaagcttcacaattcccttagccagcattctggatccctacagtaatgcatttgcgtggctgcagatggaaacatctaatgaacgtgtgtggatcgccctgaacagtaacttgactgataatcaatacacttggactgataagtggagggtgaggtacactaactgggctgctgatgagcccaaattgaaatcagcatgtgtttatctggatcttgatgggctactgggaaggacagcacattgcaatgaaagtttttactttctctgtaaaagatcagatgaaatccctgcttacttgaacccccacaactgccggggcagattgcccgggagttcaggttcacacaggcnggggtttccntttccntgggtcactgtttac

SEQ ID NO: 360519 - DNA, 529 bp, Homo Sapiens
  misc_feature (22)..(22): n is a, c, g, or t
  misc_feature (35)..(35): n is a, c, g, or t
  misc_feature (50)..(50): n is a, c, g, or t
  misc_feature (73)..(73): n is a, c, g, or t
  misc_feature (85)..(85): n is a, c, g, or t
  misc_feature (90)..(90): n is a, c, g, or t
  misc_feature (106)..(106): n is a, c, g, or t
cccaaattaatccatttgccanaattatggtcctnaaaaaatcacttgancctaatgtcccctccccaacttntgaaaattcaantaaantcaaaaaaagcaattnatagatcaaatttactgaaacacttacaccccagggcaaagccttgcagtccccaagtggtgtgcattcgttccccacagccccacccaggaagcaacgtgcctgcagccctgagccggatgaccctggggaccagcagggcagccatggtgaggagagtgaggatgcgggggccgctcctgccaagaaagccccggccagataagacaagcccaagacgctgcccttcttgctgctgggcagttggtcagtatccagagcaacgaggctgtggccctactcaagactcatggcctgtaacatgtccatgggctttggtgagagttggaagaagcacctcaatggaattcgggaaacgttattttatcaagataaaaggatttgtcgcagaagaaaggaaacattacactgtttatccacccc

SEQ ID NO: 360520 - DNA, 1024 bp, Homo Sapiens
gtgccacccctccctagagcccctttggaaccaggaggcttcaccagcctgcacctcctcttctgtggcccctgggtgcatggtgtgggtggagggcgcagcaggcagtgtctctagttggtgtgctggaactggcacggcagaggagtaaggctggggccggactaattgaatggaagggggttccagaggtgatgagcagaagaggagggggcgtgggctgctggggtctgtgtccctgcacacatgcgcccgataggtccttctgagcctttctgtggctgcacttggggacccttgtggaccatggggtgtggctagggaacccctaagtttcagactaaaggaaagatcctgggtgatgctggctttttgcttctttcttctgccctcccacctcagcttgtaagcggggatgtgtgtatgtctggggagaggaggtgtagggtgcgtatgtccatggggggaggggcttgtgtgtgcagtcattgttccaaggtgtttccagtagcgacttctgtccccctatccccaccctggtccccactttgcgcccccgggctccctgcctttggtgcacacaggatcctgcccgccccccttgccagagccagagaagggggttggggccattccaaggaggcaggactgaaaccctcaccagggttactccccaacatccttttgcctgagtcaccctctaagcgctttaaccacgggcagctgcctgttccccagacagtttttggtggggggggtccagggtcccccttgctggtacctccctcacccctctttttgtttttccatctgtgcctgttccttccacagcccaggcacacagaagcccaccttcttccccttaggaggagggatagtcaacacccctgctgtctctctgtcactcacacactgatttatggggtctgagctgggctgttcctgcaggatggacaggacccagcgccctcttctccccacaggctgtaaatagacttccaatcaccaggccagcccccacaca

SEQ ID NO: 360521 - DNA, 417 bp, Homo Sapiens
  misc_feature (385)..(386): n is a, c, g, or t
agtaacaggttggccaactgcccttgaatttaataattaaatttgccccacccaatttttaacaacacttcctgttttttaatgccccaaagaagttgtgaccttccagaataccctccctgaaaagtggccttggattctcccaggtgtcccatatgtccatactttggaaacggatgatatgaattacaatgtgttgccctctggatttgtgcactgtactgtgtgcacagtctgcatgaaaattgcgtagacttcagtgtgggaaaattaggtgctgaactgactgattctttgttgaggaggatggtctcaacatcattatggagaggccaggtgtggtggctcatgcctgtaatcccaacactttgggaagctaatgcannaggatcccttgaggctgggagtttgagacca

SEQ ID NO: 360522 - DNA, 527 bp, Homo Sapiens
tttgaatggagacagggctgtcttgcatagccattcaggttgaacactgcagaactcctgcggatactatttaaatatatcctttgtagtctcaaaaattactaatgtttaccatattagaaattgaaataatgatattttaaaactattgtcaaaaataaaaataataaatatatgttaacataaatcacattttttttctgaaaaataactattttccaaagcaacagaaatttagtgagaaagaatggcttgattttacacttttgcatatttctttaatgtcaagcttagtagaaaaaaattggattctcatgtttctgaatccaatctgttgtgatacattcttttggttgaaatgtatgaagaatacccagcctcacccagtacttcaataatcttttccaataattgtgattattctcctttgatactgcaccaaaagtggaagttttcttgcttgttgcactgtggaatctagctccgtatcactgactttttttgctttgttacatcaaaatctgttt

SEQ ID NO: 360523 - DNA, 929 bp, Homo Sapiens
  misc_feature (772)..(772): n is a, c, g, or t
ggagagagagaagagttggggacctagaacatcaggaggaccctgggtctttggggatgaggcttcaccatcagcttggaagaatccatggcttcacacacatgcctctgccattagtggtactgggatgtttagggcgacatccttgaggggagagccactgaaaagagggacattcacattttgctgtattcttgcagctgtccgtgtcttaataattcaagcgttcaataggtgtttgagggccaggcactgctcttgaggtgctggagataacggtgacaagcccaggtccctgacaagctccacaagcttaatggacagtgaatgtgcggctgttgcggctgttcacagggccgctggtgagggcaggtagaagaaagtgcagaccttcttaaatgcaggtgtaacggatctacatgaaagagcataattaacaccaatgtatacttaaggtagtaacagcttcttcataaagtaccaaaactaaggatcctctgggaaggttgctggtgccaatgcttctataaccttactaaacactgagccttggatttaggactttagacgagtatacgatgggaaccccaatttttgcacctaaatggaaaaacatgctgcggtacgcaggaaagccgtataagggatgccccccgctgcaaggtttctcttacaactgccctggaggtattttcccccccagcgaggatggtgcttctggatgcgggggcacctggggcattcggcctggccagaattcctccacgtcggnggtccccgcggcgcgattatccctctcgacggcctcgccccgtcccacaatgagtaccttgcgtgcgttatagagacgtgtggcgcatctcatctctctgggcgacgctcctatatttccagctgtcggcgcgactctggggggcactccacccgct

SEQ ID NO: 360524 - DNA, 425 bp, Homo Sapiens
  misc_feature (15)..(15): n is a, c, g, or t
  misc_feature (26)..(26): n is a, c, g, or t
  misc_feature (31)..(31): n is a, c, g, or t
  misc_feature (43)..(43): n is a, c, g, or t
cccaagaacgtcccnactgagtcagnagggnaaatcaaggccnagagaaggggaggggcttccttcaagcttatagctgggggtgtgtgcagagaggtgctgacctcagtactcaggagttccggcttctaggtcagagtccagctgcttgaaaagataatattcctccctggtgctgcccagcgcagtgcctctacctgtctctggaaatccctttggccttctctgatgggttcttaccatgcgttaagtcgcatcaagactgtcggagatgccagatgatgccggttcggaagcatccagggtaaagaccgggctgtgcgcgggaaacacggaggctagacccaagcaggaaattcccaacccgctttgcagagtttttgtagctgctgtttttaaataatcattggttgatttgatgcatt

SEQ ID NO: 360525 - DNA, 350 bp, Homo Sapiens
  misc_feature (19)..(19): n is a, c, g, or t
  misc_feature (68)..(68): n is a, c, g, or t
  misc_feature (151)..(151): n is a, c, g, or t
ccaagtacatctgcctggntaacaaggactgccctgtggacaagaggcggcgaaaccgctgccagttnctgccgcttccagaagtgcctggcggtgggcatggtgaaggaagttgtccgaacagacagcctgaaggggcggcggggccggntaccttcaaaacccaagcagcccccagatgcctcccctgccaatctcctcacttccctggtccgtgcacacctggactcagggcccagcactgccaaactggactactccaagttccaggagctggtgctgccccactttgggaaggaagatgctggggatgtacagcagttctacgacctgctctccggttctctgga

SEQ ID NO: 360526 - DNA, 1595 bp, Homo Sapiens
gctggaccggtccggattcctgcatagagcactgcagtgcctttgtgtgtgttaggagagctaccccctctggaaggactgaatgagaaaggaggtttaaaaaagaaagaaagaaaagcgactccctccagttcgacagatcaaagagaggatccccctctcggctgaccagatgggaaaatgcaccccctcaggcaggtggccaattagaaaaatatgtccttttggcagctgcagccctgggttaatatgtgagacttggcaagtgagagcctgggcaagatctcagatccactcccactcccgggatctggcatccaagtgtctgacacagccatacctggcagtgggtgtaagagcctgcctggggtgctgaccccactggaccgtcttcctagttccaggagctggtgctgccccactttgggaaggaagatgctggggatgtacagcagttctacgacctgctctccggttctctggaggtcatccgcaagtgggcggagaagatccctggctttgctgagctgtcaccggctgaccaggacctgttgctggagtcggccttcctggagctcttcatcctccgcctggcgtacaggtctaagccaggcgagggcaagctcatcttctgctcaggcctggtgctacaccggctgcagtgtgcccgtggcttcggggactggattgacagtatcctggccttctcaaggtccctgcacagcttgcttgtcgatgtccctgccttcgcctgcctctctgcccttgtcctcatcaccgaccggcatgggctgcaggagccgcggcgggtggaggagctgcagaaccgcatcgccagctgcctgaaggagcacgtggcagctgtggcgggcgagccccagccagccagctgcctgtcacgtctgttgggcaaactgcccgagctgcggaccctgtgcacccagggcctgcagcgcatcttctacctcaagctggaggacttggtgccccctccacccatcattgacaagatcttcatggacacgctgcccttctgacccctgcctgggaacacgtgtgcacatgcgcactctcatatgccaccccatgtgcctttagtccacggacccccagagcacccccaagcctgggcttgagctgcagaatgactccaccttctcacctgctccaggaggtttgcagggagctcaagcccttggggagggggatgccttcatgggggtgaccccacgatttgtcttatcccccccagcctggccccggcctttatgttttttgtaagataaaccgtttttaacacatagcgccgtgctgtaaataagcccagtgctgctgtaaatacaggaagaaagagcttgaggtgggagcggggctgggaggaagggatgggccccgccttcctgggcagcctttccagcctcctgctggctctctcttcctaccctccttccacatgtacataaactgtcactctaggaagaagacaaatgacagattctgacatttatatttgtgtattttcctggatttatagtatgtgacttttctgattaatatatttaatatattgaataaaaaatagacatgtagctgga

SEQ ID NO: 360527 - DNA, 734 bp, Homo Sapiens; identical to SEQ ID NO: 89179
  misc_feature (424)..(479): n is a, c, g, or t

SEQ ID NO: 360528 - DNA, 1087 bp, Homo Sapiens
  misc_feature (678)..(715): n is a, c, g, or t
tgtccagcagggcaggtcctgggagccaggcagatgtacttggcgtggtgcgggcagctgtgcgccgtgaagggagccctggcagcccgtcagcagtgggcggacagccatgaggcgtggcagtgaagcgttgtcgcccagcacagcagcagcagcggccggcagcgtccagcctggggccccgctccgggcccttggttgaggtgcacgggtgtatccagtagcccgcgagccctcaagggtgtgagaaagtgggtgccaaacctggaaagcgcgtaggcatggaatagctctctccctccccccagctggtgggtggcctgtgaggggaacaacttcagggggctctgggccaggctggggctggggccggtgggaggactgaaggaaaagaaggctggaggctgtgggggcccagaggctttgggcagctgctctgtccatgcccgcaggccttcgtaagtctggctgggcgagaagtggccgaaggagccatcccagggagagagctggggcggctggaagctgggcgtggagggcgacggggccgagcaggggctgccatagtagtcagagccactggaggacagggcctcatccactgggccgctcagggggccggggtagcagccgtacacctggaagtcctcgaacttgaaggaggcagaggcaggggannnnnnnnnnnnnnnnnnnnnnnnnnnnnnnnnnnnnnaggctgaggagcatggctggactgttcctggcagctggtagaggaaggtgtcaaactctcctgtgtagccgtccatgaaggtgctgaagctgggcagggcagtgggggcagcgggggctgcctcggggctggccaggtccatggtgggcttgatgaactcaggggtcagggggtcgcttgccaggtggtcacggggtcccggactcggtgctggtgtcccatattgggcttggatacagggcatctccggccggctcccgctgcccctgcccggactggcgccccgagtctcagcctggtccctggtcccgcgtgcgctcccgaagttcttctgtgcactccccccaagtttcgtaatcccgggaattccgg

SEQ ID NO: 360529 - DNA, 1427 bp, Homo Sapiens
  misc_feature (1275)..(1306): n is a, c, g, or t
gccaaccccggccggggggggtttcctgtgccaagcccccatgccccggtttcggttaaatgaggaaccaaggggccggagaggccaggcgaaagggcaggggacattggacaagcaaagctgtgcaggggactttgagaagggccagggatactgtcaatccagtccccgaagccacgggcacactgcagccggtgtagcaccaggcctgagcagaagatgagcttgccctcgcctggcttagacctggcaggcagatgggcacgaagagcgatcagggtggttcacaggcaggtgtatcagggaaaggggctgggcagacagtcagtggctctcacctgtacgccaggcggaggatgaagagctccaggaaggccgactccagcaacaggtcctggtcagccggtgacagctcagcaaagccagggatcttctccgcccacttgcggatgacctccagagaaccggagagcaggtcgtagaactgctgtacatccccagcatcttccttcccaaagtggggcagcaccagctcctggaactaggaagacggtccagtggggtcagcaccccaggcaggctcctacacccactgccacgtatggctgtgtcagacacttggatgccagatcccgggagtgggagtggatctgagatcctgcccagggctctcacttgccaagtctcacatattaacccagggctgcagctgccaaaagaacatatttttctaatggcccacctgcctgagggggtgcattttcccatctggtcagccgagagggggatcctctctttgatctgtcgaactggagggagtcgcttttctttctttcttttttaaacctcctttctcattcagtccttccagagggggtagctctcctaacacgcacaaaggcactgcatgtgctcatagacctccccaaggcagacacggggtgggacctcaccttggagtagtccagtttggcagtgctgggccctgagtccaggtgtgcacggaccagggaagtgaggagattggcaggggaggcatctgggggctgcttgggttttgaaggtagccggccccgccgccccttcaggctgtctgctcggacaacttccttcaccatgcccaccgccaggcacttctggaagcggcagaactggcagcggtttcgccgcctcttgtccacagggcagtccttgttagccaggcagatgtacttggcgtttttctgcactgtgcgctgggtgggggggcaacacggaacaagctgtcagagtgtnnnnnnnnnnnnnnnnnnnnnnnnnnnnnnnnccgtccagatcctgctgccattgcagacaaaagcgctctctgttcacagctatttttctaacatttgggtggcaagggagggagagacggggtgatcccgagaatccggaccggtccagcc

SEQ ID NO: 360530 - DNA, 496 bp, Homo Sapiens
aagtggaggtgatggggagcgctggggctccgacagagggtcccgaggcagcctcaatgagcagatcgccctcgtgctgatgagactgcaggaggacatgcagaatgtccttcagagactgcagaaactggaaacgctgactgctttgcaggcaaaatcatcaacatcaacattgcagactgctcctcagcccacctcacagagaccatcttggtggcccttcgagatgtctcctggtgtgctaacgtttgccatcatatggccttttattgcacagtggttggtgtatttatactatcaaagaaggagaagaaaactgaactgaggaaaatggtgttttcctcaagaagactactggaactggatgacctcagaatgaactggattgtggtgtacacaagaaaatcttagttagtgatgattacatggcttttggttgtccagtagcttagttggtgtacatatatacacatatatatttggcactacacaaacg

SEQ ID NO: 360531 - DNA, 1026 bp, Homo Sapiens
cccagcaagtcctgggggcacgagagggcaaagtccccctccacttgggggtaggggctcgccctgttggccgccaagtttggagatgaattctccgcccctgtagctccggacgtcctccagttccagcgtggccgtcagactttccacgtcatccagagaaaactgggatcctgagcaaagacgcttccgttcatggcatcatgggcacagccgtcgtagtacaggccggtccccgtcacaacctttctggttggccagcaagtaaatcccaccgttcttgctggtgaccatagtcacgagatccaccctggtgttggctttgcgcagcacgtggtggctgcccgaggcgttggtgatgatctccacgccatccaggcccatgtcgatgtgcgggctgtggggtgtccagagctcctcacagatctcacttccaatgcaggtgtcccatgtcaccagcaccgcatctccgaagggtacggtttcctgctttgtcaggtcctgtatcatccgaggcagaaagtactcctctgtgtgccgactcctcgaccacggggtgaaccagcgcagctcgcggtagttgccttcattggccaaggccatcttgggtctgatgagcaggatcttcctgttgaggaatatcactctgcagttgtagcggacgtttcggtgcattacaggcatccccacgtcgcagatgatgtcctgagtgacgggagactccacaagggccgctaggacttgaaacgagtgcaagagggtgtccgactcgtaataatgatcccaacatccgtagccgcatatttccagctctggtccaagcctgtatcttgctcctctgtttttggcaatttcaatactctttaaaattctttgcaaattgccctcgaagtccagggcccactggttgagtgcgcaggtggccacggtcaccttccggcccatcctggccgcagtcgcttgggcaggaggccagcgggggacagcaagaccagggtcccagcgaggtaggcggctgggacgccg

SEQ ID NO: 360532 - DNA, 924 bp, Homo Sapiens
  misc_feature (427)..(427): n is a, c, g, or t
gatctcacaggttaacaaaatacaaaagcaataccctgtgttgtggactctttaaaatctggtatcctatccacccaagggagacactaacagataggccaaagtagcaagctaatgatcagtcactcactattcccagaagagcctgtgttttctaaaacactttcttgggaagcagatcagcctagaaaagttttgattagcactgtggttttccttttgcacttgaaggacaaaggtgccagcctttatgcttctctcaacccttcaagaaagtacatgtcaggaacctatggctggctttccttagcagcaagaacttgagagaaaaacacatctgtctctgcaatgcaaagtgaagagtccacccgcctgagtgggatgacttcagctagagtctcctttctggctccagttctggtttaantctgtttgaaaactatccagtaaaaagctgatggagcccaattacatggcgggtgtattgacaactctggtatttgtttcaggaagctcttcctaagctgagggcacttgagcaactgacttaattttcaagcacttgattaacacaacactgcaaacagaagggagaaagtgtcagtgacacagtttcctctgatgcagctgcttctccaatggctttggggaagaacttcaccagctcttcaggttcaaagcagacccagcatacaaacaagagctgagccacctttgctgtcttgtctcctgggacgagaaggactcatccagcaaagttgcctgggattcaaaataaaggcattgcagaaccgcacaggtgtgctgcagggactgatccacagagaggatgagaatgcagcatcaatcgcagacctgccctgcctcagttggaaaaccttttcaggccctcagtctaaaaaataaaaaatatgagcaccattg

SEQ ID NO: 360533 - DNA, 207 bp, Homo Sapiens
  misc_feature (38)..(38): n is a, c, g, or t
  misc_feature (101)..(101): n is a, c, g, or t
gcttctgcccattttactgtcactaattaatgtttagntccttatatttgttaactgatttcggtgtcttgaatatatttttttaaattatgtgtatgaanaattctagtttcatttgttcaatcagaagagcaaataaccattcctttcatgttttgatcactgagtgtgtctgtaatcatacctacattaaaatcattttctatg

SEQ ID NO: 360534 - DNA, 798 bp, Homo Sapiens; identical to SEQ ID NO: 47592
  misc_feature (601)..(603): n is a, c, g, or t
  misc_feature (605)..(605): n is a, c, g, or t
  misc_feature (607)..(607): n is a, c, g, or t
  misc_feature (624)..(624): n is a, c, g, or t
  misc_feature (713)..(713): n is a, c, g, or t
  misc_feature (724)..(724): n is a, c, g, or t

SEQ ID NO: 360535 - DNA, 1102 bp, Homo Sapiens
cggtccggaattcccgggatgcaggtaccttcttctgtttcgaaggaggtaggaggtacctgcacttccttcgaaacagaagaaacgccccgtcgggtacccccagactcactcccaacacagggagaaacccagcccacgtgtttagatgttattgtcccggaggactgtctccaccaggacatcagtccagacgctgtgactgtcccggttgaaattctctcaactgatgccagaacccacagcctggataacaggtcccaggactctcctggcgagagtgaggagaccctgcgactcaccgaaagtgactctgttcttgctgatgacatccttgccagcagggtgagtgtagggagtagtctcccggaactgggacaggaattgcacaataaaccattttcggaagaccatcacagtcatcgccggctagagaaaaacttagaggctgtggagactttaaatcagctcaattctaaagacgcagcaaaagaagcaggcttggtgtctgccctctcctcggactcaaccagtcaggacagcctcctggaggacagcttgtcagcacccttcccagcctctgagccgtccctggaaaccccggactctctggagtcagtggatgtccacgaagcgctactggactctttaagatctcacactccccagaaactaatgccccccgataagccggcagacagtgcctaccaaaaagagaacttggagtctcccgagcggacctttgcatcccgcttcccgaggggcaccgcagactcaaaacctgcccaccctggggcgatgggggggcctctgcgggccctgcttctccaaccccggtccttcgtcatcctcccaacgcccgcgcgcaggcccccacatggtactctacacgtcccccccttttcccacgcttccccgtcccgggccttctcacgcggttctcttaccccgcaacacctctggcggtacactaccccccgccacaatgaatctttttcagtccccccaacaaaacttttttcgacctatgcgccccctttgaaacctcccctttcgccccattcttttgccgtccttgccctatcccatcctccacctcttt

SEQ ID NO: 360536 - DNA, 334 bp, Homo Sapiens
  misc_feature (61)..(61): n is a, c, g, or t
ttttccaggagtatagataaaatccaaattggtagtacatccagagttacttttcagtgcnccatgacatcactaaaatgagtgctgtaatgttacagggctttcaggtttgtaaaaacataaccataaattatattgacgtcagatatgagttgagtatcctataaaatatcacgtgtatctcaaaatattggactgctgtttgactggatattgctgcataattttcttctattgtcccatatccttttggagagagatttaatgggatttgaaatgtgcaagctgtctaaataagatgcagtcaaataaagtatggttaagttgtgtttgc

SEQ ID NO: 360537 - DNA, 850 bp, Homo Sapiens
  misc_feature (33)..(33): n is a, c, g, or t
  misc_feature (41)..(41): n is a, c, g, or t
  misc_feature (507)..(521): n is a, c, g, or t
  misc_feature (838)..(838): n is a, c, g, or t
gggccaaaaacacctaaaagggtggaaccccanggacccancctactttaacaacccacccccattagtgatttaagcaaatatatgttccatcaacccattatgtatcaacccagcaagtcaaatataaagaagtgaaataaaatttgatgacataaatgttttagttcccatttccttcatattaaataacaaaagcatcactgtgattggtattcttctaaatgctagtgcctaaatgaagtttgaccaaaaacatattgaaaggctgagtactgtgtggttaccatatttttattataaccagtattgtattctgctcattaaactttcaagagcaatataaaaaggaaaacattttctttaaaaataaagaactataaataatcccaccagcagaaagtttttattttcaaatataaattgtgtatctttatttttaaagtatttgttacctatgttccactttcaaaacactatactgagcaaagagcagctttccctttnnnnnnnnnnnnnnngcaacaaactttccctgaaaaggggcctttaccaactgttaatggaggtagggtttttaaaaatacagtaattagagccacaaaatatattccaaaccaaatactagagcagaagtagagcatattcaaatgaaaacaacaacagattcctacagttttcacagagaatgaatcttttttcttatgggtacctaggttttccagttaaataaattatctatcacaggtttactgactcaattgaaagcaattaactgtaaaatttgttacattgcactgatggccaaaacacaatgtaactaataaacatggggctnttaagaaaaccc

SEQ ID NO: 360538 - DNA, 1137 bp, Homo Sapiens
  misc_feature (599)..(599): n is a, c, g, or t
gcagttctggtatgccatccaggaagaaccagctaggaggtgcaaatagctatgggcaacttggcctcggccataaggaagatgtgctgttgccccagcaactgaatgacttctgtaaacccaggagtgtcaggaggaccacaggaggagggggccactctgcagttgtcacagatggaggagacctctttgtaagtggcctgaacaaagatgggcaactggggcttggtcacacagaggatatcccatattttaccccctgcaaatccctctttggctgtcccatccaacaggtggcctgtggctgggattttacgattatgctcacagctccataaagagaaggttgtatgtattgctgctggactgaggcattgcagtagctgctacaagcgagtggccatcgtgtaccagtgggggactggttttggcatcatgtggaccgacggttgtgccctgggcaagactcttccattgtatctcacagcaaatgcaaccaagcagagtgacaggtctagagaattctaaagcaatgtgtgtacttgctggctcagaccactcagcttcattaacagatgcaggagaggtgtatgtttggngaagcaacaagcatgggcaactggctaatgaggctgctttccttcctgtgccccagaaaatagaagcacattgtttccagaatgaaaaggtcactgccatctggagtggatggacacacctggttgctcagacaggtctcttgtggctcagagcataatttggcaataattggtggagtgtgttactcttggggctggaatgagcatggcatgtgcggagatggcactgaagccaacgtctgggccccaaagccggtgcaggctctgctgtcatcgtcaggactccttgtgggctgtggggctggccactccttggccctctgccagctgccagctcaccctgcattggtccaggaccccaaggtcacctacctttccccagatgccatcgaggacactgaatctcagaaagccatggacaaagagagaaactggaaggaaagacaatcagaaacttcaacccaaagccaatctgactggtccagaaatgggggactgtgatagagaatctttaataaagtggcttttcccaccaaaa

SEQ ID NO: 360539 - DNA, 1128 bp, Homo Sapiens
agcgggcgggccctgaggggcgccgagatgtgggagctgctggccgcggcgtgggcagttcaggggctgggcggctgaggtgtcttcaaaaacaaacatatttaaaagattttacttctcatctccaggaagaaccagctaggagtagggtgcaaatagctatgggcaacttggcctcggccataaggaagatgtgctgttgccccagcaactgaatgacttctgtaaacccaggagtgtcaggaggatcacaggaggagggggccactctgcagttgtcacagatggaggagacctctttgtttgtggcctgaacaaagatgggcaactggggcttggtcacacagaggatatcccatattttaccccctgcaaatccctctttggctgtcccatccaacaggtggcctgtggctgggattttacgattatgctcacagaaaatggtcaagttctatcatgtggatccaactcctttggccagttaggagttcctcatggacctcgaagatgtgtggttccccaggccattgagctccataaagagaaggttgtttgtattgctgctggactgaggcatgcagtagctgctacagcgagtggcatcgtgttccagtgggggactggtttggcatcatgtggacgacggttgtgccctgggcagactcttccattgtttttcacagcaaaggaaccaagcagagtgacaggtctagcagaattctaaagcaatgtgtgttcttgctggctcagaccactcagcttcattaacagattgcaggagaggtggtatgtcgggggaagcaacaaagcatgggcaactggcttaatgacgcctgctttccttcctgtgcccccagaaaatagacagcacattggtttccaaaatgaaaaaggcactggccatctgggaatgggatggacacacactgggttgctcagacagaaaactgggcaagattgttaccctggggcccgagccaaactatgggtccgccttagggaagaaattgggaaaactttattaaaagcttggaaacctaaaaaaagccaaaattccttttctccccctgtgttcaagaaccccccgacaagcatggccttccgtcttcccccattggctttaac

SEQ ID NO: 360540 - DNA, 1065 bp, Homo Sapiens
  misc_feature (1026)..(1026): n is a, c, g, or t
  misc_feature (1042)..(1042): n is a, c, g, or t
agcgggccggtgcaggccctgaggggcgccgagatgtgggagctgctggccgcggcgtgggcagttcaggggctgggcggctgagggtgcaaatagctatgggcaacttggcctcggccataaggaagatgtgctgttgccccagcaactgaatgacttctgtaaacccaggagtgtcaggaggatcacaggaggagggggccactctgcagttgtcacagatggaggagacctctttgtttgtggcctgaacaaagatgggcaactggggcttggtcacacagaggatatcccatattttaccccctgcaaatccctctttggctgtcccatccaacaggtggcctgtggctgggattttacgattatgctcacagaaaatggtcaagttctatcatgtggatccaactcctttggccagttaggagttcctcatggacctcgaagatgtgtggttccccaggccattgagctccataaagagaaggttgtttgtattgctgctggactgaggcatgcagtagctgctacagcgagtggcatcgtgttccagtgggggactggtttggcatcatgtggacgacggttgtgccctgggcagactcttccattgtttttcacagcaaaggaaccaagcagagtgacaggtctagagaattctaaagcaatgtgtgttcttgctggctcagaccactcagcttcattaacagatgcaggagaggtgtatgttgggggaagcaacaagcatgggcaactggctaatgaagctgctttccttcctgtgccccagaaaatagaagcacattgtgtcccagaatgaaaaggtcactgccatctggaggtggatggacaccacctggttgctcagacagaaacctggcaagatggttacctggggcccagcagactatggtcagctagggaggaagttggagacttatgaaggctggaaactagaaaagcaagattcatttctcccctgttcaagaccaccgaacagcatgccttgcgtgtccgcattggttnaactgggagcaactgnaggtgtcttgtggctcagagcat

SEQ ID NO: 360541 - DNA, 681 bp, Homo Sapiens
  misc_feature (432)..(481): n is a, c, g, or t
ttctttcctacagagaggtgtcatggtaagatttcattccgaattcattgtttcatagagctatgatcaggccatttctgcaagcaatgtatgaccccacctgagcaacccacaaataggctctctgtgaaacctacaaaggaagttatgtgtggcatccatgttggtttcgtctgtctgtaatgtgaattccagtatttgtttagtatttccagttgtctcctgctagcaatatgtacagtaacgcgtcaggcttgtgacatttgaataaggaaaaacagagttcctgttaagtgaataactttagcttttacaggggattatgatcaaaagtgattttagtacatcttaaatgatatcttatttctacatggaaagaagttatagaatcttcatagagttctatgagaaaaaatatacttgctatctatnnnnnnnnnnnnnnnnnnnnnnnnnnnnnnnnnnnnnnnnnnnnnnnnnntcctgtcctaggcttttactcttgatcttcaaaggcacgcagggtttaatggttccttgggttattattttgcagttttgttttttattttgccttaagtaatgatagaagatatatatggccggacacatatgtataaacttttcagcagcatttttaataataaaatatcacagtattttctaatgctttgtgcaaat

SEQ ID NO: 360542 - DNA, 1073 bp, Homo Sapiens
gttacgcatatgattactgggcgcgaggacgtcggcctacgttaccgacacggtgtgcgctctggcacgctgcatgttacgcggagagccgctatgtgcggttttgggacgtctgcggccttgagcacgtgaaggaggcgggagcagtgaacttggtaatctccccatgtgccagcagtgtgatagtacgtttcactctagtcttgcttaacatcgtagttgcttctgcaagtcaccaattaatcactgagtgagaggtacaaaggacagactttagctctgttcatagtcaaatgccattctcgtatacgatggcgtgtaggacttagactgtcatgtctcagtgtctatctgtatatattatgtgatattcagagtatctagaaccattctgtctactgttcttaatgagatctaacagctttgaacagtgagctttcgtttgtaaacatgcttgaagtctgtggcacttcaggcacacgtcaggctggccggctgggtctcctcccgtggctcagtggcctgcggcctctcgtgacgtggtgcctgctggagggaggctcgtcgtcaccagctgactgctggtccggcttctgaccggcctttgtcctggctccgtagcagaacactgtaaaagtgcccgcgtctttgcagtagttgcagatttcagtcgtcgtgttacttgtgcacaaacagaagctgggtcttacccgcagcacgagtgtctcgggctgcccggagtcgcccgggagcaggtgctgcagccagagttacgcgggggccacgcgggccggcgggggtggggggaacgtgggggaacctgtgtttcacgtgactcagcagtgcccgccgccgtcaccagctatgcattcactccgtttccagtgagcagatgtcttgcttggaaagtggacctgtgtctgtgtctgtcctgagaacttaccagcagaaatcctcatttctgtgctacggatttaccaaaaattgtcaagtctttttcagtttaacagttcctttacatgtgtagtatttgaggaaaaaaatcaataaacagttggtttcgggcctatggg

SEQ ID NO: 360543 - DNA, 478 bp, Homo Sapiens
  misc_feature (377)..(377): n is a, c, g, or t
  misc_feature (382)..(382): n is a, c, g, or t
  misc_feature (391)..(391): n is a, c, g, or t
  misc_feature (408)..(408): n is a, c, g, or t
  misc_feature (447)..(447): n is a, c, g, or t
  misc_feature (466)..(466): n is a, c, g, or t
agagtatcctggctccatttacaaagctgcacaggtattaaagatcgtgctgcctttgttaggccagatttggaggggaggcccaacagcaaagatggagaggaaaaagggagtggagcttgtggaacaggaaagcccccccagggtctgtgcagggctgctcagctcttgaggatgttgtggatggtgaagtggtgatggtgtcctggagcagcccagcacctccactgggcccagaaggtcttgacttcggacacttacccctgtttcacaagtgtttataaagctgtttttgcttttgtttttctcctaaataatccttacttggtagttattaatccttctttgggggagggacagggctttaaaactgaagnaaatnattttcatnaaaatatcaaaaatggnaaaaagttactttgtaaaaaatttgctatacaaaccaanggcactgttgagaactcanaaatgttaatgc

SEQ ID NO: 360544 - DNA, 1092 bp, Homo Sapiens
tgtttagaatgtggtaaagcgtttactagttccacaacccttactaaacataggagaattcatactggagagaaaccctacacatgtgaagaatgtggcaaagcctttagacagtcagcaatcctttatgtacataggagaattcatactggagagaaaccctacacatgtggagaatgtggcaaaacctttagacagtctgcaaatctttatgcgcataagaaaattcatactggagagaaaccctacacgtgtggagactgtggcaaaacctttagacagtctgcaaatctttatgcacataagaaaattcatactggagataaaaccatacaagtgtaaagaatgtggcaaagcctttaagtcatactacagcattcttaaacataagagaactcataccaggggaatgtcttacgaaggtgacgaatgtcgcggtctttaaatgctcctcaatcctttctaatcataagataattcataatgaagagaaactctaaaatgtgaaaaatgtgagaaggcttttaatcacacctcaatctgttgtagacataagagtaattatattgatgagaagccaaattaaaattaaaaatgtggcaaagacttccaattctagtcagttcttaatgtaattcctactgaagaaaacacctggaaatacaaaaaatgtggcaaaacttgtaaccaatgcttagcatttttgcacatgatagtatttatatgtgagactacttgtacaaacataaaaatatacaaaagctattgtctacttgaaatttatagttaataaaagcattataaatgtaatttctgttgaaagaccttttagaaaatataggccattaaagtgaagaatagtcttaagacagagaatacaaagataaagagggctctagtacctgtacttgtatcccagaacttactatatgcattttgtactagaggaaaactctgaagcagttgcttaaactttgttcaacatcagagaatttatattggagagaaatcctacaaatgtaataaatgtggaaaaacctctgttcagaaactgcaggttaagaaaccagaggccaggcgcggtggctcacg

SEQ ID NO: 360545 - DNA, 1047 bp, Homo Sapiens
  misc_feature (311)..(312): n is a, c, g, or t
tggaaagagctgagtgggctgtttggctagcgtacgcgaatttgtttaaaaggaaagggtgtgtttcttggcaaagactcttcggaggaaacgctgaactggggatgggtctctacctgttctggggcctcactgcccttcctgccggggacaggcagtcactggtgggtttccccccagtggaaacacaatattttggaaatatttgtatctaggataaaacttcatctggaccaacatgtctttgttggtgttgtggcccaggtgattttaagaatgtagaatacatttggcaatttccaaacggagtnntgacctgctcctccgccccccatgccctccctgaggctggaggcttcagaagcccctgccttgggaggaggctgttctacctgagaagtctttgtccccaccgttggtgacaatcagcattgacctgtgaggcacctgccaggtttgggacgcagctttagacatctagaaaaccgggggttggaggggtggggtgggggcttaagaccccagagcttgattccttttaactgtctcatccccaaagaatggtacatggggtaccaggtaggttacttgaatcaccctgagcctcgattttcccacccgttagaaacagggtaattcatgacagtgtccgcttgggagacggctgtgacccctgagaattctcgctgcatgccgtgggctggctcgtgagactcaaggtctgggttcgaggcccccgcaaccccttctgactgtgtggcctgggcgagtttgttgtttgtaacctggaaagcgtcacacctgcctggcacggttattgtgggcttcaatgagattgtttgtgtgaaataaacgctttgtgactggcacacaggcgctctcatcccggctctcctggtgggcccggaccgctgggtgctggctgcggaggccctgtgctccctggaactgtctgcgctggtcccagggactcttgggcagagtggagggcaagggggaaagcaccagcctgctctggggagacagtggcagagggaagtgtttgct

SEQ ID NO: 360546 - DNA, 1018 bp, Homo Sapiens
ctggcctcggacccagagaggacatccagcgcttcatcctccgatccctgggggagaagaggcagctctactatgccatggagcacctggggaccagcttcaaggatccttttgatccactgcccagggctcctgacattgagtcccgggcttttcctacctccgtcttcctctctggaaacagaagaaccttaatgagatatttcagctctaatgtcagggattccaggggctgaccttggtgggtgatgatgcttttctggactgtcgcaggacccctggacccctgcagctctcatccctgaggcacttagagaaaagctcagagaggatcaagagaagaggccttgggaccatgagcccgtgaagccaaagcccttgacctactggaaggatgtccttctcctggagggtgtgaccttgacccaggattccaggcagctgaatgggtcggagcgggcggtgttggatgggctgctcaccccagccgagtgtggggtgctgctgcagctggctaaggatgcagctggggctggagccaggtctggctatcgtggtcgccgctcccctcacaccccccatgaacgcttcgaggggctcacggtgcttaaggctgcgcagctggccccggctgggacagttgggcagtcagggtgctaagctgcttctggaagtgagcgagcgggtgcggaccttgacccaggcccacttctccccggaacggcccctgcatctggtccttcgaccacctggtggtgccgcagcgccatagaaggagagcaagagcagcgcatggacctgagtcaacccagtgcacgcaagacaactggcgtcctggaaccctgacaccgggagagtgcttgccgggaagccccagcctaaactaatcgggactacagcggattcttctactcaaggatgacttcagggtgggaactggtcttacaagagacccaagccccctggcacaggccggagcggccccgtggccctgtggactaaacccggggtaaaatcg

SEQ ID NO: 360547 - DNA, 1059 bp, Homo Sapiens
  misc_feature (635)..(635): n is a, c, g, or t
  misc_feature (663)..(663): n is a, c, g, or t
  misc_feature (746)..(746): n is a, c, g, or t
  misc_feature (752)..(752): n is a, c, g, or t
  misc_feature (754)..(754): n is a, c, g, or t
  misc_feature (761)..(761): n is a, c, g, or t
  misc_feature (834)..(834): n is a, c, g, or t
  misc_feature (1003)..(1013): n is a, c, g, or t
gcctgggtggcgaattcggcacgaggctgcagctctcatccctgaggcacttagagaaaagctcagaggatcaagagaagaggccttgggaccatgagcccgtgaagccaaagcccttgacctactggaaggatgtccttctcctggagggtgtgaccttgacccaggattccaggcagctgaatgggtcggagcgggcggtgttggatgggctgctcaccccagccgagtgtggggtgctgctgcagctggctaaggatgcagctggggctggagccaggtctggctatcgtggtcgccgctcccctcacaccccccatgaacgcttcgaggggctcacggtgcttaaggctgcgcaggtgagcacaggaggcacccgggcccgtctgatgcccagacctggaggagaggctgtgcaggaagccgggccccagggcctgggcttttgtgaaggagctttcttgggaccgagactacctgataggacccagcgtggagaaaagggatgttctgagagctggggccggggttgttgtcatggagagagaaggagcagtttgggctgatggacagagctggatgctgacagactccaaacccatgggtggagagcggcagagttgggcaggggctanggccgagaccaccctcccccttgccttncctcttttctgccctgcctttcactgcctgcagctggcccggggctggacagtgggcagtcagggtgctaagctgcttctggnagtgancnaacgggntgcgaccttgaccagggctacttctccccggaacgcccctgcatctgtcctcaccccactgggtgtgcgcaancgccctaaaggaaagccagagccccccttgaacctgaatccccagtgcacccagacaactgccgtctgaccctttaaaccggagaaaaattcttgcggggaccccccaggcctaaacttatcggggattacaggggggactctcttacctcaacgagaaaatcttcccnnnnnnnnnnnaccctgtttttttccgggaagccccaaccccccctactggtggggg

SEQ ID NO: 360548 - DNA, 1346 bp, Homo Sapiens
  misc_feature (1106)..(1106): n is a, c, g, or t
  misc_feature (1131)..(1131): n is a, c, g, or t
  misc_feature (1164)..(1164): n is a, c, g, or t
gtggagatagacaagggaagagcagcatgaaataagtggagaacatagcagagtgtggggggaagcaagccaagctgtgtcgggcagtcgaaggcactcgcttaaggagcgacgacagagggtgagagagggaggatcgatcgccgccaggaagcaggagagaggccggaagtatcagacggagagcaagtaggcagatgaagcgggcaaagacgtgcagaacaagagtgcgatagagcgcgagaaaagtacaataggataaagaatcagatgaatatagggagagtgagcgacgaagaatgtatgtgagagggggatcatggttctggaggtgaagtgcaaaaggcgatagaaaggtcgataagaatatgaattgttaataactatatgataagcgtgaagcgtcaagatgcctgaagggaggaattcaattatccccttaaggcagagcaagtgatataacatgggggaaaataaaaaagaagcgcacagcacattagcagagatagaggggacgtggagaaccggaggctgacaggcgaactggcgcagctgcgctgaggtgggaaagagcacagccatagaggatgtaagcagcggagaggatggtggagacaggagaaagtctgttcgtcagctctaagtgttacgatgtcagtcctctaggagagcttgcagaagtggcttatttcagcacctctcgaagtttacaaggtttttgtgcgataggaatagaaagtatattctctcctttaggtgaacatacataacccgttatgtgcaggttgtacagggagtgcactactaggagttctgtccctggccagtcgtggaacgggcctctgtgacagctgcccaggtgcctagggacagacaggcatgggcccctacgatcgattttccaggctcctgatgcctgaaataccaccagtaacacttcattcctgttcatatccactcttattggcagaggaaagatgaactggctgatgactctttagtgtctcactgtatcaccagatactctacagcaaatggacaaccctggccatggttccttcctggtcctcacgtttgtgatgggttgaccttgaggctggtctccnagaaacattctgtaaagcatccttnaaagaagtcctggggagctttacggaccatccnagagcccctggccccaccgggtgccactctctgcagcagcagaagtccctttccccccagggcacctgggcagccagcggcctcccttcctcagggctcctttgtaacacagtgaaactgagagtgccactgctcgttcctgtcaagcactgagcttccctgattctaagcagaaaactcag

SEQ ID NO: 360549 - DNA, 460 bp, Homo Sapiens
  misc_feature (34)..(34): n is a, c, g, or t
cttcctgttatacatggttatacatggttggggnttaaaagcacaaagagaaacctccccctcctggctttcgcggccctctttgtccatcttaggtggggacttgatcttatttaaggtctccaaatagcccccaccacacttagaacgtgtgttttcttagtgttagaagccaggccctgagtccccagcactcacctgaactgtggctgatttggtcccagtccagctggggaggtgtttggctgacaaggaggcaagagatcccctcccaggggaacaggaaggactgggcttagcacagagccatcatcatgttcccaatttgtgaagagactcctaacactgcactaacccatttgtgtacatacatggggctcagcctggggccaaatgttgcctgatggggacagacttgcagggccatgcaagccagacttcgtgcttaactgaagagtgt

SEQ ID NO: 360550 - DNA, 674 bp, Homo Sapiens
tctctgttacgagatcagctgtcgtggaatcagtgctagtgttcaggtaactcttatttaataattgcctcaaagtgcattgtgctgtgcctaatttataaaataaacggtatcataggtatgtatgtatacgaaaaacatagtatatgcagggttgggtactatccacagtttcaggcatctactggggggtcttggaatatatccccagaggttaaggggtgactactgtatacagccatgccaacatgctggttctcagagagttataagagagattaaaaatacatgcagctgtttgggcactttcttcccaaataaaatacccagtaaaatgtaacatactacctatagcttgataatctatctgagggatgtttatggatgtctgtctatatactttaatttgggccttagcttctttgtagggtatcaagttatcacttggcaaatttattttcaaaaaggcatagtttcttgtacattttagaaggattaggtttttcttattttgggacaccgacaccaatgttttaaatgtggataaattttaatgtggaatttcttttaaaaataatcctcttcatagagcaatacaacaaaaatgtgttgtatcttggagatttacattataaatgtagtaaccatttatgagcttaaatttaatggaaccc

SEQ ID NO: 360551 - DNA, 780 bp, Homo Sapiens
ggagatgtgacccttgcgattatttcctctgaggtttgaggatgaagataagttggagggaaagagagtaactaataggggatgaaatatagcagaagctagaagaaagcggtgaggtgagagagatgcatctgcacgttttcttcaacagcaccaggtgattcagcatattcctaattacctttcactattcgtgtatataagatcgtttacttgcataatatatcatcaatttgacatattcttaaaactagagggtgtgagaagcacagcaataggaagtctctccacaaactaggggaacacaaatggggtcattcacgtgcctggactgtcactatgtggctgtcacgtgaagtgctggtgttgatttccatttcagccagtgggtagctgataagccagtgccagcatccagcatgagcagatgtcggggagactgggaagtctccagcgttactgctctccttcccttcatgataagccagtgccagcatccagcgtgagaagacgtcggggagactggggaagtctccgatgttacttgcctgccttcctttcatgtgaggggctgcacttgcttttcttgtgatctggtagtggacgaggtcttccaagggagtgctttgcacacttttcttgctccttttttacgggctttgtctttggcgccaagcaatgaaaattaagcccctttggggaatatgaacctttcagaaatattctacctttgccctcattttggaactcacctggtgggcctttataaaaaatgggaca

SEQ ID NO: 360552 - DNA, 524 bp, Homo Sapiens
  misc_feature (415)..(415): n is a, c, g, or t
tttcagtctattttctaaacatagtagcctctagcttctggcaattcattgttactgttttttaaatcctttgctgcctttggaagttttcttgaacagcagttgaccaacaggtaaatatattgctagagatttaatcctggatattaactacacagatgttttgcttgcatacacatcatgatatttgttacatttatgatgcaaatcatggtgtctccctttcctgtgatgctactttttagaagctactaaattcaaatgaactatcctttttcatgtttaagtcagatgaaaccttatgagattaaacatttagccatagttatataaacagactaagctggttgggtggattcacctttcacttatgaagaaagcagtttcaaaaaaagtcactttaggctggtccaanggtagtcagttatctcaattgattgctcacagtcagttacaggtcaaactccttgttcttctcttttcccccctcactactgtacttggctagtctacaaaaaataata

SEQ ID NO: 360553 - DNA, 888 bp, Homo Sapiens
gttcacccatccgtgtgactctgtgagctcacccgtacccggccctggtcctcactgcctgtggtctgcccacggctctggtcttcctcccccattgtgctcagcaacccctgcttgacctgctgggagctcatctgggtcttgtcccagagttcctgcaggtcctcttcatacagcatcttcgtgtgtcatgtaataggtcctgcaggagctcccggttgccaggggccaatgaccagtagccctggtgggaagttgcctcgcttatagtcttcgtaccattttgagttggccgttcttcagtgcgtacctgctatctccaaaccagcgcaccacctctggccgtggcagacccgtctgggccatgatggagtcatagtcctggttgcttggccactgtgtctggacaaagagctgccgcagcaagtgccgctgctgggcagtctttttgcagctcactttgcctgggagctgctctgccagtttgtttgactcatcatcctcagggtcacaggcacccagccctggaatctcgttcctgccattggcttcagtgaccctcaggttcttcaggttgattttaatggggctgactttgcgctctgccaagatatggctgctgggcatttccagagagccattttcaccagagacccttagctcactggccaaatcctcttctccaccctcatcctcagcagcctcctcttcctcctgagaggcattctcctcagccttcttggtctcctcagcattcacttttttccgtctctctgaaaaccagctatcaatttctcgtcgggtcattttggtttcacttctcaggcggtccagttcctcatcaagaggaagagggttttgtgcaaaactgctctccagggctctgac

SEQ ID NO: 360554 - DNA, 488 bp, Homo Sapiens
atggaaacagctggttggggttccacgatccagctctatcaaggggctctgagtgtgcacagttgggacctggatgtatcaggtctccctcaggctggagtccactggcactcattcagccattgaacaaacatacagatgcttacctgctctgtggtcagccttgtgctgctgctgggcgggccaggagcctgcttcagtgtgagcgaggtggatgatattatagctgaagggtccctcctggtcaccctcatatcagcctaggtcaccaggatgtctgagaggggtgggtgcatgggacgggcgtggccagtctcaggtgaggtttgggcccagacctcgttggagtcccagacgttgccaggctgttggaaaattgccttgttcctgtgatgcctgggagttaggtgggtcctggggaggtttcatcctcttgcttgtccacctcagctcggtgtggaggggcagccaataaatcattgtgaatg

SEQ ID NO: 360555 - DNA, 744 bp, Homo Sapiens
ggtggctcagatcttgaccaagaaaccccagcgatttccatcaaagaccacgcaggtaacagaggtgattcctgaagacccagcccacagagggtggcagccaagcatctctgagcagtgtccctgctagcatcgccagcggccatcactctgcctccctcccacctcttgtccctcgtcgttaaaaaacagcaccctatcctgcttccccacatttctgttcctccaatgaagggctaagactatttagtaatctctttcttaagcagaagagtggcaaggatggcaatcttgaattttattttctgtagagatagcatttcttctggtgcggaactgaaaggaatccacccagaagttctgtagcatccctgcgtgcagcctcctggagccccagactccatctgggggagggacttgtttacaagcagttctgaccaccttagtggtgtactgttttctaggcaaaaaatatctgtctgttgtactgtatagcctttaaaatgcagtccaggaatgagactcttttaagaaacacatcctgcttctgcaattccagagagtgctgggggaaaaaaagggataaaaattcctacctactcatcagtgtttgaaagatggagctgaatagcttttcttgttcctggactaggcaatgaataagcaacaatgtatcttttctgtgttcaaaataaatacataatatcaataaaatgtagcaagaagtaacactttcaaaaaaaa

SEQ ID NO: 360556 - DNA, 659 bp, Homo Sapiens
  misc_feature (154)..(154): n is a, c, g, or t
  misc_feature (159)..(159): n is a, c, g, or t
cacacatagaccaaacttgtatacacacagacatctacactgacataccccatgtacacacacagatctagacgtgctccacatatgtgtgaatatgcgcacatacaggcctaccacaaacacaaaacccacctgcaaaggtttcacggaacgnggagnctctcctggcctcccgtccctcctcccagcctgtttgttgtgcctctgtagagagcgcttcggagagagaggcgaagtaggaagtgggattttctcttccctctcctgggcccgtttgcccctaccctcgcccagcaagctgcgcccaaattctattctgcctctggaaactgctggaccatccaaggtcagctgcctgccctgacccctaccccagggccagcttgtcctcctgggaggcgggacaggccccagtgaggttccgttgtgcgctgtgcctatctctcgattccagggcagatgagccacaacatcaccaccctgccacttacaaggtgggggacctgggtctggggtctcaggcgcaaactggaggccctcacagcccactaggccccctcccaaccccagttaccctcagtccctcagtcaggtggtgctagttagagctatctcttgaacggttgcaggccccaggtagatgggcagggcttccgtgg

SEQ ID NO: 360557 - DNA, 345 bp, Homo Sapiens
cgtggtggtcctgaggaactacgagcagaggctccaggaccagtcactgtggtggatttttgtggccatgtacaccgtcttcgtgctgttcgctgtcttctggaacatctttgcctacaccctgctggacttaaagctgccgcctcccccctgagggctggaggcccaaggtcggggaggggagggaaaagcagcacccacagggagcgcctgcgaggtttcttctcatcatcagctcagctaggccgggcagacaaggacagaagactctgggccactgtaatgtttgtgtttagatttggacacacagtggagacccttttctgaaaggcatctggcggaggg

SEQ ID NO: 360558 - DNA, 514 bp, Homo Sapiens
  misc_feature (13)..(13): n is a, c, g, or t
  misc_feature (25)..(25): n is a, c, g, or t
  misc_feature (72)..(72): n is a, c, g, or t
  misc_feature (77)..(77): n is a, c, g, or t
  misc_feature (94)..(94): n is a, c, g, or t
  misc_feature (103)..(103): n is a, c, g, or t
  misc_feature (120)..(120): n is a, c, g, or t
  misc_feature (479)..(479): n is a, c, g, or t
cctaaaacaggcncccaacactttnaaaaaggaaaatgccctgtgtgtgaaaacacccaaattaatcacccnggggnactcctcagttccacangaaattggntcctcccctgtaagcantccctgccccaaaacagttccaaaaaaaagtccatccagaatcccttttccatcccttgtaaaaagccagcggattgaaaggtccccaggaggatctggatcagcgtcaaatcccaaaaaggtaacaaagatggatacatggtgactttcttcttcagggctcagcttacaggggcaaaaaatgacctccagcttcaacttgaaccaccgtagtgcttgtcttgtttacctcttgctgcggagaagctgtgccgcacccacacacgtgcacgcggcatgcacctcttttgctaatgcatgttgcaccaatatggctgtaaagtgactgtcactgaggcaaaataaaattgcacacagtnggatgaggagtggaacaactatccactttcaaaat

SEQ ID NO: 360559 - DNA, 670 bp, Homo Sapiens
cagaaactcttttttaagcgatgagatctgtgtggcatttctagcgctctctaaattatgtctctggcatattttaatcactggaaactcaaagagtggaagagtggaagtgcgaaggaatctcaggtagctcttaactaattcgccagcagtgaagaaacttcaaccaatcatgttttccttgaattttgcaaagaaagaaaatccaaagcattgcttggatgttcttttaaggcattttatatcagttgaaccttaaactgaaatatgaagacaagctttataaactagttttttgatatgaagtatatcaattatgtttgccttttgtgaagaagtaaatgagttgaatttgtatttcacttactagattatactaatgagctaatggggtcattgccatcctccctactcatgactttgatgagttattgctgtaacatcacttcttgatttaatttgatatggaatcagaattggggagaaggtatttttaaataaacaacttttttaatggaaagtttttgtgtcttaacaaattctttttttagaatcccaaataaaaggggttatttagtagaaaaatgaggatgaataccttttccttgggatattttggttttgctaaaggcaataatggctttgggaaattatatgtggaggaccattt

SEQ ID NO: 360560 - DNA, 1018 bp, Homo Sapiens
  misc_feature (42)..(78): n is a, c, g, or t
tgttcgactatatggggactggcgttcacgcggtggcggcgnnnnnnnnnnnnnnnnnnnnnnnnnnnnnnnnnnnnnatcaggccaaatcggccgagctcgaattcgtcgagagcaaactcagacgaatgtaccgccagtattatcagcagtcaacaagcaccttcctctccacagaagcagctggaagagaactcgaggggctgtgctgcaggcctcccctcgaaagacactgggaggtcagcatgttccacaggtgttcagagggagtctgctacaaactatcagggcaaaatctcactggatttctccactgaaaacctacttgaggtttctggtctgaaggcttaagagtcacatcttagcacttccgctctcaggcctcctcctccatcacagatgtctggatgcttttggaaatggccttggctaaagtaaaagggaaaagtagatccgataacttaaaaacgtagctcatcccttaccatccaaggggcactcccttggttggattttctatgacagcacaggggacaggtggcacaccatgagaggtctgcccagggtgggagcagtgtcactgtgctagcaatagttggcttctcccctgtcagtggaaaccccacttctgcccggcccttgagcttcttgcccactgtctccccatccttccacctacttgtggcgatctgagtactctactcttgctcaagaagtaatacgacaatcagaatacaaaccagtaaggcaacacgaataaactaagaacacaaggtaagaactgtctcgaaaacgaaagcacacacccaagacacagtacccagtcatggtttcccatccaactattagtttcatactttgaaaacttactttcagaattattctgcaagaacacagtaggcactaaatctgtttccaattggggttaacaattggcttggatctcttaaggttttgtgcagtaactcagcctgagtacttcaatctggctgggagtaatatgccctgtgtgtcaggc

SEQ ID NO: 360561 - DNA, 712 bp, Homo Sapiens
catcgggctcaaatgctgggacatctcttctcttcaagctcatcggggacacacccattgacaccttccttatggagatgctgcaggcgccgcaccaaatgacttaggcatgctggcccatcctttgtgcccacccgttctggccacactgcctggacgccagctgttcttctcagcatgagccctgtccctgccgttctctgcctggcctgtttggactttggggcacagcctgtcactgctctgcctaattttatccctcatgtatacttggatatggcggggggagggctgggactgtttcgtttctgcttctagagattgaggtgaaagcttcgtccgagaaacgccaggacagacgatggcagaggagagggctcctgtgacggcggcgaggcttgggaggaaaccgccgcaatgggggtgtcttccctcggggcaggagggtgggcctgaggctttcaagggttttcttccctttcgagtaatttttaaagccttgctctgttgtgtcctgttgccggctctggccttcctgtgactgactgtgaagtggcttctccgtacgattgtctctgaaacatcgtggccgcaggtgccagggtttgatggacagtagcattagaattgtggaaaaggaacacgcaaagggagaagtgtgagaggagaaacaaaatatgagcgtttaaaatacatcgccattcagttcgtt

SEQ ID NO: 360562 - DNA, 1653 bp, Homo Sapiens
  misc_feature (1469)..(1477): n is a, c, g, or t
  misc_feature (1527)..(1535): n is a, c, g, or t
gcaaacatggggctgaaccccagctcggcgaacgaccctgtcaccaacatttgccaagcagccgacaaacagcttttcaccctggtggagtgggccaagcggatcccacacttataagagctgcccctggacgaccaggtcatcctgctgcgggcaggctggaatgagctgctcatcgcctccttctcccaccgctccatcgccgtgaaggacgggatcctcctggccaccggactgcacgtccaccggaacagcgcccacagcgcaggggtgggcgccatctttgacagggtgctgacggagcttgtgtccaagatgcgggacatgcagatggacaagacggagctgggctgcctgcgcgccatcgtcctctttaaccctgactccaaggggctctcgaacccggccgaggtggaggcgctgagggagaaggtctatgcgtccttggaggcctactgcaagcacaagtacccagagcagccgggaaggttcgctaagctcttgctccgcctgccggctctgcgctccatcgggctcaaatgcctggaacatctcttcttcttcaagctcatcggggacacacccattgacaccttccttatggagatgctggaggcgccgcaccaaatgacttaggcctgcgggcccatcctttgtgcccacccgttctggccaccctgcctggacgccagctgttcttctcagcctgagccctgtccctgcccttctctgcctggcctgtttggactttggggcacagcctgtcactgctctgcctaagagatgtgttgtcaccctccttatttctgttactacttgtctgtggcccagggcagtggctttcctgaggcagcagccttcgtggcaagaactagcgtgagcccagccaggcgcctccccaccgggctctcaggacaccctgccacaccccacggggcttgggcgactacagggtcttcgggccccagccctggagctgcaggagttgggaacggggcttttgtttccgttgctgtttatcgatgctggttttcagaattcctgtgtggccctcctgtctggagtgacatcttcatctgctctgaatactggtgcccagccagcccgtgacagcttccccctaatcaggaggggacagctgggggcgcaagctggtgtgtcatcagcaaagacctcagccgcctcggggatgagaggggactcgtggggcaagcaagctgccctgtgctctgagtgagggggaaggtagcccctttttccaaagataactcacagttttgccctcgagccaatgagaacatgagctgccctctgtgcaaggtttcggggccacctccaggctgcaggggcgggtcacttacccccctgttttctctctgccttggggttctggtttcagactcccgactccccgttcagaccagagtgccccgggccctccccagcctgagtcttctccttgctctgcnnnnnnnnnctgaggcctgtccttggtttccctgcaaggctgggccctggctcgggaannnnnnnnncatcacccacctccctgggccttttttggagggcacaggggctttggcgggacctggcagccattctgggaaggccccccgggaaatggaaggggaaaagaaggggggcccctgcttt

SEQ ID NO: 360563 - DNA, 3237 bp, Homo Sapiens
  misc_feature (1069)..(1069): n is a, c, g, or t
  misc_feature (1959)..(1959): n is a, c, g, or t
gtagcgaggcctgggtggcgaatccagaacgaggaccccacggggcttgggcgactacagggtcttcgggccccagccctggagctgcaggagttgggaacggggcttttgtttccgttgctgtttatcgatgctggttttcagaattcctgtgtggccctcctgtctggagtgacatcttcatctgctctgaatactggtgcccagccagcccgtgacagcttccccctaatcaggaggggacagctgggggcgcaagctggtgtgtcatcagcaaagacctcagccgcctcggggatgagaggggactcgtggggcaagcaagctgccctgtgctctgagtgagggggaaggtagcccctttttccaaagataactcacagttttgccctcgagccaatgagaacatgagctgccctctgtgcaaggtttcggggccacctccaggctgcaggggcgggtcactcacccccctgttttctctctgccttggtgttctggtttcagactcccgactccccgttcagaccagagtgccccggcccctccccagcctgagtcttctccttgctctgcggggtgggctgaggcttgtccttgtttcctgcagggctggccctggctcgggcagggtggggcatcaccacctcactggccttgctggaggcacagggctctgcggacctgcagccatctgtgaggcccgcggggatgggaggggaaagagggtggccctgttggtttccctcagagggggcaggtggcctggagagagaggggctcaggaactgggagcctcgtgggtggggcagatgctccgcggcctggagtggctctgccggggcattggtgggacccctgctcaggccttctctctggctgccagttgtgtctaaaagactcttggaatctgagaacccggagtcgcagcgccctcgggcctgggccacacgcagggccctggtgggaccacccagcctggtattgtccacgggacagcgttgttcacccagagcccttacttgggagcctcactgaacgcctgctctgggtaaaggtggggtggggngcggggcttggggcctccctggctcagcccagtgcggcctggcgctcctcccgcaggctctgcccccgggctccggtggtgcggggccctctcaggttgaactcgcctcttttgcactggaaggccctccctttggcctgagtacttttcccgttcacgcctcagtcccgtggacccagcctttgtcagtggcaggtgcctgaacagagggtggatgggggggataccggagggggtcttgtcttcccagccgcagtctaggaatgatgcgggggggtggacgccttctccatagtctttccccacctggagcaggggcttcctcagtggtgaggggagctgcctacaggttggaccgggaggcagtggcttggagaggcagctttccagccttggtggggaagaaagtgtccattctttgccttcctggagctcccagccagagctgagcttaggcacccgagtggagcctgcagctgagtctgtgcccgagacaggctgtcagagattccagaagcctctcctccccgccgccctccacccctgcctttcagcgttgtggatccctagaggtggccccctgcccgatccaccgtcctgaggcagagtgttgagcctcatacctgtaccaggtccccggccagctgggcccctcccaggcactgccaggaagccccagctgcccctggcgggtgtggtggaaatggcaggagggtgcaggtactcttggggccccagcggtgggagtgcaaaagacccaacgccaacacctggtgccttctgcagccagcgcccacccatccgtgcccggacccttgggaatgcccgcggctccagaggaaaaagcccagggacggggcctccgttgcgcggggggtccggctgcttcnttgggaactttgtcgtttccggcgctgggctggctggctggctggctgtaaagcactgaagccccccggccgccaacccctgaaagcagaacctggcctccctggccacagcagccttacccaccgctctacgtgtcccgggcacttcccgcagccttcccgtccctttctcattcggccttgtagttgtacagtgctgttggtttgaaaaggtgatgtgtggggagtgcggctcatcactgagtagagaggtagaatttctatttaaccagacctgtagtagtattaccaatccagttcaattaaggtgattttttgtaattattattattttggtgggacaatctttaattttctaaagatagcactaacatcagctcattagccacctgtgcctgtccccgccttggcccggctggatgaagcggcttccccgcagggccccacttcccagtggctgcttcctggggacccagggcaccccggcaccttcaggcacgctcctcagctggtcacctcccggctttgccgttcagatggggctcctgaggctcaggagtgaagatgccacagagccgggctcccctaggctgcgtcggggcatgcttggaagctggcctgccaggaccttccaccctggggcctgtgtcagccgccggccctccgcaccctggaagcacacggcctctgggaaggacagccctgaccttcggttttacgagcacggtgtttcccaagaattacaagggctggcggcctagtgacagtgctggagatgaccccgagcccctccccgtggggcacccaggagggccctgccggaatgtgcagcctgtgggtagtcggctggtgtccctgtcgtggagctggggtgcgtgatctggtgctcgtccacgcaggtgtgtggtgtaaacatgtatgtgctgtacagagagacgcgtgtggagagagccgcacaccagcgccacccaggaaaggcggagcggttaccagtgttttgtgtttatttttaatcaagacgtttcccctgttttcctataaatttgcttcgtgtaagcaagtacataaggaccctcctttggtgaaatccgggttcgaatgaatatctcaaggcaggagatgcatctattttaagatgctttggagcagacagctttagccgttcccaatccttagcaatgccttagctgggacgcatagctaatactttagagaggatgacagatccataaagagagtaaagataagagaaaatgtctaaagcatctggaaagttaa

SEQ ID NO: 360564 - DNA, 393 bp, Homo Sapiens
  misc_feature (28)..(28): n is a, c, g, or t
ctgtctcagcaacttccgtagcttacanactttggagagcccaagctaactaggggcagaagtggtacacccacacagcacagctgctttataaaagtgtggctagactgcttctttaagcagatccctgatcccactcttcctgactgggtgagacctcccaaccagtgtctccagccaccacctaccacctggttgtttgggccagcaaccaggtctgtacccctctgggacagagctcccagaggaaggggcaggctgccatctttgcagttttgcagccttcactggtgataccctcaggtactggaaaacctaaggcgactagggactagagcagatgcccagcaaaccacagcagccctgtgaaaagtggccagactgtaaaaaaaa

SEQ ID NO: 360565 - DNA, 705 bp, Homo Sapiens
  misc_feature (92)..(92): n is a, c, g, or t
  misc_feature (94)..(94): n is a, c, g, or t
  misc_feature (114)..(114): n is a, c, g, or t
  misc_feature (528)..(528): n is a, c, g, or t
  misc_feature (612)..(612): n is a, c, g, or t
  misc_feature (664)..(664): n is a, c, g, or t
  misc_feature (671)..(671): n is a, c, g, or t
actagtggcttgtgttcagggagaggagctggcagtttttaaccacttctgtgggagccgtgttctaacctgtggaaagtattgcaattctntnagagtgactctgcagagtcntgcaccatcaggcttggccctgctgtgccttcagtacccagccaggttctctgggtccagggtgactctccaaagaaattggccttcagctggagaaaacattgggtggagactctcacttatgttaatgcaatcttgaaatgactgaaaggtagattgccagcacagtgagtttcccagcctgctcccccatccacacttggaaattgagggagcatgaccgctctctgacttcacatgttaatagaggatcagagcagagttgggagtatattggtcaggatcatagaaaagaagacaaagcttgctcagccatgagatggccaggtatccagttttgttaactctctttgggaatttctttttcagcctgttttttagcttagtgccattatgtcattttgatttgtattncaagtactcttacaagtatctttgtaatgaaggtttgggctacttgtataggtctgcctgcaggggtggaaaatgcccagtgtngaatattctaggctaccaaacattgttttttgtttggaaaaactgactttcngttgtcnaccccggggcctgtggcatttggggttatcccca

SEQ ID NO: 360566 - DNA, 804 bp, Homo Sapiens
  misc_feature (11)..(11): n is a, c, g, or t
  misc_feature (36)..(36): n is a, c, g, or t
  misc_feature (41)..(41): n is a, c, g, or t
  misc_feature (49)..(49): n is a, c, g, or t
aaaaggggcancagccaaactttccagaaaattttnagtgnagttttgnccctgtcctagttttagttgccctgttgggaacccctgagtaataaaaataacaagtgtgtgccctgctccccagccattgacgaagcttcatgaaccttgaaaatggaacactttaatttctctgtaggatgtgagcatttgataaagaactcaagttcctgaaaaaatttctggagacaaagttgaggatcaagtatcatctgtgcttcatttcttttgggaagatgtgcgttctctaggtgtggatattggagttggcacactgacatgcaccctaatgaccctcagcttggggacccaattctgacacctgctgggctttgctttctttgcttaactagttcttgaaaattctgtgtgatggtgagaataagaagttccaggtacatagaaacatgaatgtccacaaacatgcaacccccaaactagatgcagtcttatcttcaatcgcatagattcaaaattaaagagactattgaaaccttggcactgctagagacttttgaactaatagctttctggaataattttctatcctaagaaatagctcacagaacaaccctatattttactgggccatagtaaacattttgggccttaatataatgccattttattaggaaagacaaatacaatgaattatcttatgattaataatgaaaagtggccactattttccattattgatatataacctaaaataaaagcagtagtgctacggttaaaataaatcagcttaaaccataatatttt

SEQ ID NO: 360567 - DNA, 691 bp, Homo Sapiens
agaacggctaccaatcgagttctgaacgtcctccgtcactgggtctcaaagcacgcacaggatttcgaactcaacaatgaactaaagatgaatgtcctaaatttgctagaagaagttttgcgagacccagaccttcttccccaagaaaggaaagccgccgcgaatatcctcagggccctttcacaagatgaccaagatgacatccacctaaaattagaggatataattcaaatgactgactgcatgaaggccgaatgctttgagtccttgtcggccatggagctggcagaacagatcaccctcctggaccatgtcattttcagaagcattccctacgaggagtttcttgggcaggggttggatgaagctggataaaaacgaaagaactccttacattattgaaaaccagccaacacttcaatgacatgagtaacctggtggcctcccagataatgaactatgctgatgtcagctcccgtgccaacgccatcgagaaatgggtggcagtggcggacatctgccgatgcctgcacaactacaacggcgtgctggagatcacctcggccttaaacagaagtgccatctacaggctgaagaaaacctgggccaaggtctctaagcagacaaaagctctaatggacaaacttcaaaagactgtttcctctgaaggaagatttaaaaatcttagaga

SEQ ID NO: 360568 - DNA, 1063 bp, Homo Sapiens
  misc_feature (26)..(26): n is a, c, g, or t
  misc_feature (507)..(597): n is a, c, g, or t
  misc_feature (784)..(792): n is a, c, g, or t
  misc_feature (929)..(948): n is a, c, g, or t
ggtccggaatttccgggatgtggacntgcaacatgagggctcttctgggcggaaaccctgggctgtctgctggctggctgcagggagatccgcttgggccttatatccccagggaatctgaagggccaagaactaaggccagcagagaagccatgggcctatcatgggaggagtccggtcaatggaatgaatttccttaggactcgctcctggccagggaggaccatcatgccagggcaccgcgtgtgccaggagccaagcagcagatagaggaagttcagactcaaagcctggccggcaggcaagtccacctggaacacgtgtccgcccgcccgccgtagagaagttcaacgaaagagccctacatctttcgtcataccatttgcacattcaaacgtcagtaagcctttcgggaagactgtgtttacagccacactaaaatcccgatcacattttccctgaacaatacctctccccacggcaggaactattcagattcaagagttnnnnnnnnnnnnnnnnnnnnnnnnnnnnnnnnnnnnnnnnnnnnnnnnnnnnnnnnnnnnnnnnnnnnnnnnnnnnnnnnnnnnnnnnnnnggggggcgcgctctaaagtaccccccgggggggcccaagtttacgcgaacccattttttttgaaaaaagggggccctaaaggggagccgatttaaaacttaggcactggcccgtccttttatacaccgtcggggactgggaaaaactgctaacctggggatcttttgggaaaggaacctaccttctnnnnnnnnnaaataatttggaacacctacctaccagaattttaacgcccttaagggaaatattaaattttttaaagggaaaaatgggggtaaaacaaaccggcataagctggcggccttggaaaattttgcttcccggagaatggnnnnnnnnnnnnnnnnnnnnccccggggagcaggggtccccaattggtgggggcggatttttaaaatccccagcccggggggtttattttgaggcccccctcgtcccccaaaggcgggttccgggacccataact

SEQ ID NO: 360569 - DNA, 533 bp, Homo Sapiens
gccggtacctactttccacaggggagaaaccctatgaatgtaaagaatgtgggaaggcttttagtcgtggctatcaccttactcaacatcagaaaattcataccggtgagaaacctttcaaatgtaaggaatgtgggaaggccttcagttggggttcaagcctagttaagcatgagagagtccatactaatgagaagtcttatgaatgtaaagactgtgggaaggcctttggtagtggctatcaacttagtgttcatcagagatttcatactggtgagaagctttatcaacgtaaggaattcgggaagacctttactcgtggctcaaaacttgttcatgagagaactcatagtaatgataaaccctacaaatataacgaatgtggggaagcctttctgtggacaacttactcaaatgagaaaattgatactgatgaaaccttatgattgaaagttgtaaaagaatattttgtgtgtgtgtatagacaacttatcataataagaactcttactcttgagaaaccctgtggaaaa

SEQ ID NO: 360570 - DNA, 477 bp, Homo Sapiens
  misc_feature (37)..(37): n is a, c, g, or t
  misc_feature (43)..(43): n is a, c, g, or t
  misc_feature (49)..(49): n is a, c, g, or t
  misc_feature (78)..(78): n is a, c, g, or t
  misc_feature (96)..(96): n is a, c, g, or t
  misc_feature (116)..(116): n is a, c, g, or t
  misc_feature (118)..(323): n is a, c, g, or t
tcccccttgggatttccaattttccaaaaccctggtntcatcnccctanttggaaaaaagtggttaggcccacgaacnccaaatgccaggaggganaggtgcccaagaagcagctnannnnnnnnnnnnnnnnnnnnnnnnnnnnnnnnnnnnnnnnnnnnnnnnnnnnnnnnnnnnnnnnnnnnnnnnnnnnnnnnnnnnnnnnnnnnnnnnnnnnnnnnnnnnnnnnnnnnnnnnnnnnnnnnnnnnnnnnnnnnnnnnnnnnnnnnnnnnnnnnnnnnnnnnnnnnnnnnnnnnnnnnnnnnnnnnnnnnnnnnnnnnnngcaccaaatctccctcatcttctagtgccattctcctctctgttcaggtaaatgtcacactgtgcccagaatggatgaccaggaaccttaaagagtggctgaaaagattgcagagttatcataataaattgctaacttgcgtatttcctaaaaa

SEQ ID NO: 360571 - DNA, 744 bp, Homo Sapiens
  misc_feature (50)..(50): n is a, c, g, or t
  misc_feature (116)..(116): n is a, c, g, or t
  misc_feature (642)..(642): n is a, c, g, or t
  misc_feature (679)..(679): n is a, c, g, or t
gatcgacagacattgtttgaaaatgtccaaagtggctgaaagtttaattncctacacggaacaatatgtggaatatgaccctttgataacaccagctgagccatccaacccttggntcagcgatgacgttgctttgtgggacatagagatgagcaaagagcccagccaacagcgagtaaaaagatggggcttctctttcgatgagatattgaaggaccaggtggggcgggaccagtttctacgattcctggagtccgaattcagttcagaaaacctcaggttctggctggctgtccaagatcttaagaaacaacccctacaggatgtggccaagagggtagaagaaatctggcaagagtttctggctccaggggctccaagtgcaatcaacctggattctcacagctatgagataaccagtcaaaatgtcaaagatggagggagatatacatttgaagacgcccaggagcacatctacaagctgatgaagagtgacagctatgcccgcttcctccggtcaaatgcttaccaggatttgctgctggccaagaagaagggaaagtcgctggcgggcaagcgcttcacgggcctgatgcagtcctcctgaccgttcctaccgcagtccaggggcctggggccgcngggaccccacagggcaggcggcggcgttccacatttncgggacagagttttcctttacggagggagattttggtcattgttgaagggagaaaagagttgagg

SEQ ID NO: 360572 - DNA, 478 bp, Homo Sapiens
  misc_feature (32)..(32): n is a, c, g, or t
  misc_feature (79)..(79): n is a, c, g, or t
  misc_feature (94)..(94): n is a, c, g, or t
  misc_feature (107)..(107): n is a, c, g, or t
  misc_feature (125)..(125): n is a, c, g, or t
  misc_feature (165)..(201): n is a, c, g, or t
cctgcccttggggaccggatctgcccgtgtgncccaggggaagaaaggtccccgaaagcctgtcccacccaatcctgcncctgtgttggtgaancccagtctgcttncccattagaaaacccgcntcgggcaccttatggtcactttaataaatcctagtatgtnnnnnnnnnnnnnnnnnnnnnnnnnnnnnnnnnnnnncgtgcaggcaaatgtaaaatacaatgctctctgtaagataaatatttgcctttttttctaaaaggtgtacgtattctgtatgtgaaattgtctgtagaaagtttctatgttcttaaatggcaatacattccaaaaattgtactgtagatatgtacagcaaccgcactgggatggggtagttttgcctgtaattttatttaaactccagtttccacacttgcatcttgcaatgttggtatggtatatatcagtgcaaaaggaaaaacaaaacagaaac

SEQ ID NO: 360573 - DNA, 1559 bp, Homo Sapiens
  misc_feature (1154)..(1154): n is a, c, g, or t
  misc_feature (1300)..(1300): n is a, c, g, or t
  misc_feature (1474)..(1474): n is a, c, g, or t
gctgggagctgcccaggtactccccttgaagggagaatctcacccaggatcttcctcaatactgctcctctcttctcagctcagggagaggaggggatccattctctaaggaccaaactgcaccctttcttgggtgagtgagcatttctacctccgtgctttcaacttttgttgcatcatgcactgatgctgcttgcaaaaaatgaagacaaaatactcagaagttgcatttgccatggccactggctccagctggggtttggtgccagtgttattacagggtctgcggagtatcagccattggcttggcctctctctgttcctccctctgcacctagaactcttatccttcctgtggtttggtgccgactgggtcggatctgggcttagagtaatagctttggtgggtttcctggatggatgtgaagttgggcctcccatgggcccaagggagtaggaagccccattccccaactgtccttcctctaggaagtgtagatcagaaagtgaggtggtgacctcccacctctggtctggttaagagtctcactagggccaaggcaggctgcagaactttccctcttcctctcattgagggtgatgacaagagacatccggggactgtgcacttacagtcggtgtggaatgtcactcttgcagtctttgaggcaggataagtatttttacatattttaagggtgcaggaggacagcagctaacaaggccaggaaatactcacttccctccaccctcaacaggatgtggtgggggtgaaacttgaagaatttttgtttccccttctcccttcttacgtttgggaagttttatgtagtgtaacaaactctagacgagttaccagaagatgtggattctagttctgattctgtcactcattggctttgagtgacatatttttatttcccggggcctgttttctcacattaaaaaagtagaagttagatgagtgatctctaaggttgaaggtaatttcagctctcacattcttttgagtttgtggctcttgaaagccctggtcctgatgctccctgtaaacgtggctgggagagaagccagccaggctgcacttgcagaacattccctgctctgtactgggtgtgtgaagccccagcagagaaggccggagggagggcttnggtgcctgggctgggtgtggggcagggcctggcacagctgcagagtgcacagggagggtcagaagtgccaagtcactggcccgttaactcagcacccaggccaagcccccgcctcccacttgaagccccctcttacaaatgttttngggggctttgagcagaagacacccttgtagacagacataagaggggcagaaggcttgaccagagttctcttgagcctcctcatgctctcagagcagggaacagcgggggaaaatgtttacactccatgcacaatctgtctgtccagtccctcaccctatgtggcccaatagctngctggatttcacacttaattggtattttttttctgccttcttcccctgcccccactgactcctctcctgtgcctttgattgtact

SEQ ID NO: 360574 - DNA, 1754 bp, Homo Sapiens
ccgcgctcctcgcgctcccggtccctcgcttcactgccacgccctcacggccggtaccggtccggaattttcgggatgtgtattctaagaagttctatctctccatcaagaagcccaagattcctggagtctttttttcctctgccctgatcaactggggcccaggaaaagcaatgtctcttcacgggcctcagggccccagcagatggggctgggtcaggaaccatctctgtcccaggtgctcagccctcatatgcattttcttctggagcctcttagaatctcctccagaggactcatagagctgcctcccccaggatggtgaagttgggagcaaaatggggcttctgtaagcacaggtggaaaaccagagagatgcttccacagcagccatttccctaccctgcttcctaacttatgctgacaagttcttcctcttcctaccgtggggttcgagccccacttctggttgcatgttcccaccaccacgctctgctggttttagtcggctgactttctcaactgccccagcctctcctgctctctcagaacctccctctgcccccaacccccatctgtctcttcctcctaattaacggccactgcaaagagagaccggctggctaacccatgggatttaccttataagaacaaagcacaattattcaggactgaactgctttgaggtgccttggaactggctttggaaatagctatctgccccctagctatggactcttcacagttatttccagtttataaaaaggaaaagctgatcggatccatgtttctctctgcgagtctccttggggaggttgggctggtaaatatttgcaaggtcaggttaagcagacagacaattgaaaatactgggcaggtccaaaaggatagttccaggccataggaatggcttggtgcagttaacgggtgatgaagcaagaaatcttccttcctacttatgtcttaaagatggacagcctgtgtctcttgctgtgcctcttgctggcgtcttcctttattgaagcttgctgatgcactgtacatagtctctctctctaggtatagatatattatatatacaaatatcaaacatctcaccacacccaccccaaaagttacactgtgtgtgtgtggggaggtgtaataacttctcagtgttttgagttgattcaccaaaggcaaattttggaatgttcttgcgctttgtgcacttggaggggaaaacccaactacatatgcactttcttggttgtgtgtgctatagagaggttggaaggggtggttggaaggggagagaaactgagatggccctctgtgactcgactgctgggatgtatctgcttttgggagcagactgagtttcttttgcaatttgtcttattgtttgggtctactggcgacaataaactatctccccctgcaacaaaatctgcccccctatccacacaataccctttttaattccaccctacacggcggggccccgccacaaagaatccctccaccgagggcccacctttacccggtgcctcctcatttcttttatcaaatccgcgccccatcttatgtaagctcacagcttcaaacccctgcccccttcgccaaaaggcctataaactttccccgaacttatgtcaatacctcccataacaccgcagaattaccgctgactacacaccgcatagatcttcgggattcggggcgccacgctcctactttcatcgtctcccctccgcaaatactttacctacccg

SEQ ID NO: 360575 - DNA, 823 bp, Homo Sapiens
  misc_feature (35)..(35): n is a, c, g, or t
  misc_feature (44)..(44): n is a, c, g, or t
  misc_feature (51)..(51): n is a, c, g, or t
  misc_feature (62)..(62): n is a, c, g, or t
  misc_feature (123)..(123): n is a, c, g, or t
tggggcctcgaaaccccacggtaggaaaaggaaanaattgtcancaataanttaggaaaaanggtagggaaaatggctgctgtggaaaacatctctctggttttcccacctcctacttaacanaaagcccccattttgctccccaacttcacccatccctgggggaggcagctctatgaagtcctctggaggagattctaagaggctccagaagaaaatgcatatgagggctgagcacctgggacagagatggttcctgacccagccccatctgctggggccctgaggcccgtgaagagacattgcttttcctgggccccagttgatcagggcagaggaaaaaaagactccaggaatcttgggcttcttgatggagagttagaacttcttagaatacactaggaaagcccgcaaataattcccctaaatgttatggaccctggaaaaagataagttcccaacatcagcacagctcctcactcatcctgggagagaaggacacttaaagggtgaccaaaaaaatgaaatctgcaagctgcagaaatgtatacaaccactcttggtctcagctggcatgaggtgcccgccacccacctctctgcccccagctggctggctcaaggatgggcagcgtccatctgctgcaggcatcctggcggcttagcccacccgcattggcagtgtgttgattggcagttaggtactgagctgatgagtttagcatttccagatgggcttgactcgctcacctcacccaggtgttaccaggctggttgcccatcccccactctgcacccactctgcctggcctctgcacccttga

SEQ ID NO: 360576 - DNA, 392 bp, Homo Sapiens
gcttgtgcaggtgatttattgcaactatttgccttcgcattctaatgcacctagaggtcactttattaagcagcaaaagaattcacatcaaattcagctcaaaccaaggcataagaaaactgctctagatgagagggagatggtggcaatgctaccgcttcagatggccctgctctcctgcagctgtaccagactcctcctcctatgactcaagccagtcactgaaaacaagctcgatcttaggggtagcaggtctcagggcttcgtgagttacagctttccttaccaactcaagccatgctcaagaagaggcaaaaccctcctttcacacatgcaagtgccaaggacagcctactccattaagctggcaccacagcctggccatgtgtcag

SEQ ID NO: 360577 - DNA, 1146 bp, Homo Sapiens
  misc_feature (123)..(123): n is a, c, g, or t
  misc_feature (138)..(138): n is a, c, g, or t
  misc_feature (180)..(180): n is a, c, g, or t
  misc_feature (184)..(184): n is a, c, g, or t
  misc_feature (193)..(193): n is a, c, g, or t
  misc_feature (196)..(196): n is a, c, g, or t
  misc_feature (1011)..(1019): n is a, c, g, or t
cctgaggaggcccctggtcttctccttgggccccttcctctgaccctcgttggaccccaacccagacccccttttctccatgtacctgctgggccagcccatttcacaggtgaggaacccgangctcagggccccganacttggcctcagttcttccttccacagggattttcaggaaangcanaagctcgtngangatgggcatctgaggtggccctgcagccccccaccttctggccctcccaccagaggcccagctaccaaggccacattgtccaccaccccagcctagagcctagaactgtagtccagctgaggaaggaggcagagctggggcctgaaggctctgagcagcctccagccagggggctcctccagggctgaactttgggagggcccctgtactacctcctgggccaagaaactggcacagccccacactgtcagtgccaagaggctgcgccaggccactctctcagcccagggcctgccctcctgtcctcccacttctctacgccctcaaggttggagaccccgctcccatgccccagctgtgccatcccaaacacttgggcagcagctcagcatgggcagacatgggggctgtggattcttccagggcggggatggcagatggagcccttgggctccttgggcctagagccacttcttaccaggcaacgggcacagccaccctggcacaccctctgcctggccgtgctgaacctctgctgggccccaggggagaaaggagtgagcgtgggtcaccctgggggaaatctcatctgattccctccctggcccgacctctgctaggggctggagaacagagctcagagcaccagttgtaaggaaacacagccagaccactgtggggacagacctttctttataaaccatttggaaagttttccccccccatctctttaaaaaccaggggggccaggtggaagaaaaattaaggggaaaaccttcccccggggcaaaacccggaacaaaggcctgcccttnnnnnnnnncccgggtccctggacccccagggagggttgggccaaaatgggccttcgaaacctcccatggggggggtaaaccggaaaaccgggtctttggcttttctaatttgggctggggggaaaaaaagggccc

SEQ ID NO: 360578 - DNA, 1552 bp, Homo Sapiens
  misc_feature (645)..(645): n is a, c, g, or t
  misc_feature (653)..(653): n is a, c, g, or t
gggatggggaaggcggggaaggaaacacagatgcagcgaaaagaagtagctagtgtaagggagggagagcagatgaaaggattgtataggggaggtaaacacgtggaagtgtatgagtcatttaaagtggagagtaaaaaagatgagggagtacggtcaggggaacgtgtggggacatggaggacgattattgtcggaggggtgggcaattttagggggccggcgttaatgagggggaaaagaccagtttaggccaggaaagaagctcgaggaattacttgtaggctggccttttgcttttggaattgcgggggtctacctggggttggggatatcgtcgtgaagggcaaagtcagcccaacacatgttggatattatgggccagtttgcccaggcttaaaggcatgggggaagcagagaggctggcctgcaggaaaagggatgagggggaagcagcatggccgttccaggtccctaggaaagacccagcagagactgaacagtctgccacgctgtgccgcacggccattccgcacccttccccaccttctctccgcagctttggttgtggctccctcgggactgacaggacaggacccttcgagggtagggtcacacacaggacagaggcagccagcactgccncccccacnccccaacataaacacagagggcaccttcaggtcccatgtgcagccagttcctccacactgagacgggactcacaagcagggtagacttcttccccccaggggtccccagagactagaggacacagctggggtggggcctgaggctggccaccctacgggtgctgccctccaatttccctgaatgccagggctggccttggtcggcagtgttaaggagctggcaggggaacagcatgggaaggcagtgttgcgggaggagaggcccctcatccaccccttgatgttgtcccagtcattataccggctccagctgtggggccccaaaagtgagcctcaagcatcaccttcgtcagctgcgttccatctgggcttctgggttgcaggtgtggtgggcagagggcacctctggtccaaactcccccacctgggaagggtgtttcttgctgcagcctcagcttatcactagctacttgggacacaggcaccaacaatgacaatggtgccaggtgtgatgtcccataggatatgcctgccagctttcttggccactctgcccaattcccaaattcctagagccccagatcctggcctttctgccatgagacccagccctgcttacctcggtcccaggaactgcactgtttgtaagcatgcgccccagtgacaaaggcccctgtgcagcctcaggggcccattcagagctgctgcctcctggccaagaagagaagaggctgaacctcagcagtgccctctgatccgggacttctgattctggtttaaaacccaggtagccacacaatgccaggatgtacacgtgcaggagctttgcttttaagagcaggccaagctggaaggaaagaacactttggctagcaacaagcaggctgggctcttgtctc

SEQ ID NO: 360579 - DNA, 559 bp, Homo Sapiens
  misc_feature (23)..(23): n is a, c, g, or t
cctttccagcatgtgggggagtnacacagacaccacacagatgccaggacagcctgtggcagactcccagagccctgggacagccaacacaataatggcagccagttcccaggctctcgttgggtctcagggagctcaccccaccctcctctccagcagtccctgtctgctcaaggtagtgagcttggcatctaacccatagctccctggaaacttagattaaatcacagccacacagtcaccaattaaacaaatgtaacatctgataagggctgttacctctacacatagacaaaagaatgaatttgggagctgggggtgctgttggcaattaataggaagatatgtccattatagccactcatccaatgaatcaagaaagatttcttggaaaaaaatgggattccagatccatttgagtaatgtgtccctatgcctatcactcctggaaattaaatgatttaatttaactctggtgcacttatctccaaaaacccagaaagactcacggaatttcagatagactggcagcaataaacggtggtgccattaaaaaaaa

SEQ ID NO: 360580 - DNA, 500 bp, Homo Sapiens
  misc_feature (401)..(401): n is a, c, g, or t
  misc_feature (444)..(444): n is a, c, g, or t
  misc_feature (467)..(467): n is a, c, g, or t
  misc_feature (474)..(474): n is a, c, g, or t
  misc_feature (488)..(488): n is a, c, g, or t
gcatcctcttgcccacggaggcctcactgcttagctcccagcctcaaggtcagatattcacggagccatgttttcctagtaagaggggcactgcactgagagctgatgcagtttgtgagcccatttctccactagggcctggacgggtaaatcaggctgatgctggtctgccccagacccacagagagagaactggaaataggaagttatgcttgcctggcctaggtgccggttctaactcagcttgaccagaaaggccctgtgttgggagtagcaagcactgtatcagccatcaatcaagtgggtcctggtttcctggggaggccatggtccttgtgtgcctaatccctgttcaagaaccccagagaggaggaaggaagcacccaaagctgatcaacttncaacatttaccagggtattggcagtgggggtccgggttgagancgttgttatttggtaatttcccnaatttgnttgatgttccttcntttggagggctt

SEQ ID NO: 360581 - DNA, 742 bp, Homo Sapiens
tggtaagggccagcccaggtaacatcctacccaggtgtctcaaaactcaaggccaaactagtggatatagtcaggagacttaagagccacagggccttttctcattccctaaactgggtaggaattatgaagaaaacggccctcccagtcctcaggagctccatcacgatgccccagaaggcctgcttcatttaacgctcactttaaagatcttcagagccctagatggtgccaagcggggagactgcagcatggagatgagattttcccagatttcctgatgagtctgaggagggagtcctagttcctatagctccagtaacaaaattctcaggagtctctggaataaatcaagacaacttttctctcctgaggacagttaacaggaagagcagctcacagctacttagccccttgccagtttccttctgagtccttcaatgacctagttctatcttaattgctcatatattgctcatatatatagtcttcacgggaggttcctgagaagcccaaagaaccaggtagctccttaccacctcttctcccaaggccttaaacccatggtcctcctaactccaacccgggcagaaaagtgattcagtgcccatgaagatgtgggtgaagcttcagggagttcagaaatgaaaatacaggagtgtgtatttgaagagcctggcatggtcactgtctctccctaaagaggaatacaattgtgtgcatgaagttgtgcacattggtg

SEQ ID NO: 360582 - DNA, 497 bp, Homo Sapiens
aatatagtccttccacgggaaggtttcctggaggagtcccaaagaaacccaggtaagctcccttaacccacctccttcctccccaaggccttccaacccatggttcttctaactccagcctgggcagaaaagtgattcagtgccatggagatgtgggtgaagcttcagggagttcagaaatgaaaatacaggagtgtgtatttgaagagcctggcatggtcactgtctctcctaaagaggaatacaattgtgtgcatgaagttgtgcacattggtggagaccattctgagagtatcattaatggggactacagattcactgtcctggtggaagtcaaggtgctggtgtgcatgcatacctataagcatgcatacctatgagcatgcaggtacttgagggaaatgctgcacctctctctcaacaaaactaggttactaataaaggatggacagcagtcttgagttcccaggaccagacaaggggaagatgttgagtcc

SEQ ID NO: 360583 - DNA, 501 bp, Homo Sapiens
  misc_feature (433)..(433): n is a, c, g, or t
  misc_feature (468)..(468): n is a, c, g, or t
  misc_feature (475)..(475): n is a, c, g, or t
  misc_feature (484)..(484): n is a, c, g, or t
ggatgttcaacatagaaagggattgtgactgtacccctcatccaagcttgaacctaggggacatgcattctctgtggatgcagttaccctgaagtattccagaaaggctgtctacaggtgcatccatgctgagctcccatgggggaagcctcagctatgtcgatagtggatgaagaggagaagaaatcaccttctccaagacccttcatgggcaccagggctgactggctgttggggtagagccacagacgttttctgctgagccaagcattgcaactgtgcctctgctaaaagaaacttcccagaaatgggaagttctgggacttaaggcctgccatcttgtgttttttgtttcatgggagtgctcccttgatgtcatgtacttcttcttccctttaggagtagaaatccctgaaagtcccagacttactgntgaaattgcaactctttatctggggtcttagctgncctagtngggggctgnccacaattccaaggggt

SEQ ID NO: 360584 - DNA, 1140 bp, Homo Sapiens
  misc_feature (13)..(13): n is a, c, g, or t
  misc_feature (28)..(28): n is a, c, g, or t
  misc_feature (42)..(42): n is a, c, g, or t
  misc_feature (64)..(64): n is a, c, g, or t
aaaaaaatgaaanaccttcccattctcngaaaagactgcggnttctctgtccccaatgaggttnaacgatcgcaaacaaagattgtttcagaagtgaatgtggtatgatcacacctgtgaagatagccattgaatacagacagtctgtgcaacacggcgagaccccatctctagggggaaaaaaagggaacgtgaagtgtaagttccagccaggcctgtggcatgacctctggcttgctgactcagaacccagaggctctccagaaggcggaggcgggcagggccaggctgccttccctaggtgttctctccacacccagtgcaggccagctggctgcatccccaagctccaggacgctcagagcagagctgaattcttgagaaactggggtctccaatggcctcggatagaggagctctgtgaggggtccattgctgagctctcgaacatcacgaaggaaattccaaaatggttataattcatgtgtgcctagagtggcagagtcctggggttttccataccatgagtgaaacagttccccgcaaagagatttgtaaaatcctgatgatgacggcattggcgggcccagcacgtgcagcaacaattcagctctcacgtcgtcttccacgcaaacgcctcatccgcgaggacctgcgccagcctagcgttgaagggcctgtagaaatcccgcagaatcttctgtgtgagaggccacatgggccccaggttccggtcctcgggacgccgtgcattggatgcggggctcttggtcatcaaagcctcctgcttctcacttaagggccctaggttcagaaactggaagaccttgtgcatggtgtacttgacgttggatgcatgatcttccaggcgaagaatgagaaactgttgcttgtcaaaaacgctgagccagtccagaaggtacacagcatagagcccaacctggagcctcacaggcatggcgttgttgagggtgttgttgtagacgcaggcgcgcagtgaataatcaagcatgcaattttcaaacagctgcagtgcttctgtcactttctcatggaagtcgtccgcggatttattcgaacttgcaaagtagagatagtctgagtacaacctctccacagggtccctgagcattacaatca

SEQ ID NO: 360585 - DNA, 510 bp, Homo Sapiens
  misc_feature (111)..(130): n is a, c, g, or t
ccatgagaaagtgacagaagcactgcagctgtttgaaaattgcatgcttgattattcactgcgcgcctgcgtctacaacaacaccctcaacaacgccatgcctgtgtgtannnnnnnnnnnnnnnnnnnngagctggcccctggcagaaggagctggtttgttgttattatgcaagcggcattgtgggtttgcgtttcagcataggaacagagagaagcgttttaatgtgcaaatgctgttccccattattcatggatgtaaaagctgaaaactgatgggctcttggtctggctcctgccttcctccctgctggtcacctgccacctccccctcctccctcagcaggaggatgagggtgcctttaggaagattaccatttagcaagacacccggcaattagaatcggcagacacgaggacacccaactctcaaattgtcttaagagcattctcttgagcggtggattgttttgttggtttaaaaaactacccatcaatgattttcaaaaa

SEQ ID NO: 360586 - DNA, 411 bp, Homo Sapiens
  misc_feature (80)..(80): n is a, c, g, or t
  misc_feature (122)..(122): n is a, c, g, or t
gaatctcttatcaaatccaatgtgattacacacctaccgccgtaaaggatgccgcattatgtagtttttaaagtaaaaanctatagtgagaatcctataatcacattcacactcccctctcntattgtatgaaaaatcttgttgttgttgattagataaggtggatattcactcatagttaatgtcaaatctctgcagttaaggattgaattaagccctctggtgcagtacctaatgatcaaaacattttttccaataagtttatataaccaaggataataatgatataaaaggtttttaatgttgtttttaagagcaggtactataacaaagaaggttaacactggtacagaaatatttcataaaagttatgaaaaccagataaatacagtattaaattttggagctttt

SEQ ID NO: 360587 - DNA, 434 bp, Homo Sapiens
  misc_feature (44)..(45): n is a, c, g, or t
  misc_feature (48)..(48): n is a, c, g, or t
cagcccaagaatggtctcagggtgaggcagggaagggggcatcnnccncgccttctcaggagctggcgctgtgccttgtggcaccgaagtgtggcaagggcggcggcgagcccgtagacgcttgcagcagcaaaccaaggagggagctggaggtggcgctggcacaagagcagggtggctggcgactgaggctcaggtcacccaggagctgaaaggactgagtggtggcgaagagaggccagaaactgagcccctgctgagctttgtggcgtctgtctccccggctgaccgaatgctcactgtgaccccgctccaggatccccaaggcctgttccctgatctccatcatttcttacaggttttcctccctcaagcaattcgacatctcaagtgaagacatggcccctgaagggcaataaagctgctagtttatt

SEQ ID NO: 360588 - DNA, 389 bp, Homo Sapiens
  misc_feature (15)..(15): n is a, c, g, or t
  misc_feature (49)..(49): n is a, c, g, or t
  misc_feature (92)..(92): n is a, c, g, or t
  misc_feature (121)..(149): n is a, c, g, or t
gggcagcagctgtgnccgtgcagccagcacccagcagggcagtctcacnggagcccgttgtgagcactttggacttgaagcagctatgaacnaccccccgcccccaccgtctctccctctnnnnnnnnnnnnnnnnnnnnnnnnnnnnnccgttttaccattttcctcagtgctttttctgctttcattcctttgattttagttagaagcacaagccatgatggatgtgggactcttctcaattgctctttaaattgtcactttttaaatcctattaaatgaagtgtcgattcctgacaaatacattaaaagtgttttattcctagaagagttgggaaaagaaattattttcagcaagagtaggatgtttgttaaactgattccttggc

SEQ ID NO: 360589 - DNA, 792 bp, Homo Sapiens
  misc_feature (336)..(336): n is a, c, g, or t
  misc_feature (610)..(642): n is a, c, g, or t
attttttggatttgatgaggagtctgtggactcagaaacgttgtccgaaacatcctacaacacagacaggacagacaggaccccagccacgcccgaagaagacttggacgatgccacagcccgagaggaggctgacctgcgcttctgccagctgacccgggagtaccaggccctgcaacgcgcctacgccctgctccaggagcaggtgggaggcacgctggacgctgagagggaggcccggactcgggagcagctacaagctgatctgctgaggtgtcaggccaaaatcgaagatttggagaagttactggttgagaagggacaggattccaagtngggtttgaagagaagcagctgctcatcagaacaaaccaagacttgctggaaaagatttacagactggaaatggaagagaaccagctgaagaatgaaatgcaagacgccaaggatcagaacgagctgttagaattcagagtgctagaactcgaagtaagagactctatctgttgtaaactctcaaacggagcagacattctctttgaacccaaactgaaattcatgtaaagctctcagatgttttcaagcatgtgtaaaggggacatgttatagnnnnnnnnnnnnnnnnnnnnnnnnnnnnnnnnnaaatctgtatgttcagaataatttcactgccttaatgtgttctggagagcgtgctcacccaagtctatggacatgtaccagagctaatatatttattgcctatggcttgttttgcacttaataaaataatttgtttttgcaataaaaaaa

SEQ ID NO: 360590 - DNA, 1086 bp, Homo Sapiens
tgggccccctagaagcgcaaagtgcaaggcggccccagggagagccgcgggtcaaccaacccgtctggacggcgacccgcgcgaaaccggaagcagagatggagccacgccgcggggccggaagccacagcgggcgcgcaacgaggattctgaagctccgccaggaaaccgccttgcgggccgaggccgaccttcgacggggagcagaagaaggctcaggctccagctgtgagcacccgaccggtgcggcgtatgaaggaagtcccggcccccccaacgtgccatggccagagcctggctgggggccaagcggtggaggcttcctctatctggtggacccaaggagccacagcgaaaggaggcttggaggcggtgctggccaagaccgagggccttgggaattacagcatccacctggttgaagtggacactcagggcctgagcctgaagctgctggggaccgaggcctcaacctgttgccctttcccatgaagctggcttctctctgcaacaggagaaaacctggagctacagtgtcccccaccttccttgccccatgggaacctccacctcatactccccacccacctctacgaatctgctcccaaaggaagctgaccagagcaagatctgggcaagcagagagtgcctgggacaggactgtgactggtggacaggggcctagatgtagcctctgttcctcctggacataggaaggtcccaagcttagtatcccacgtggcctttacaaatcctatggctggccttctcattccacaagggccctggaaagggttgacagccagccttggcatatggctgggagtcccttagcaaggccaaccctgaagaggccctttgaggcattccctatggcttagagttgtagacttacactcaaccctcatgtgagcgtgggagtgagggtggcggtcccttgccaagttggtagcagtgacccagtgattcactgccatcccaggccttaactagcaaaactacggagcgtgccaagtgacctggtgcctgtgggaagtgggttctcaggactggcattcttggaataaattcactctgtccttgaaa

SEQ ID NO: 360591 - DNA, 373 bp, Homo Sapiens
  misc_feature (42)..(42): n is a, c, g, or t
  misc_feature (44)..(97): n is a, c, g, or t
  misc_feature (105)..(105): n is a, c, g, or t
  misc_feature (144)..(144): n is a, c, g, or t
tttgaagttaaagatacttaaaggccgggagcagtggcttanannnnnnnnnnnnnnnnnnnnnnnnnnnnnnnnnnnnnnnnnnnnnnnnnnnnnngaagccantcttatcatcagagggagggagtccgggccaaggggaanctgtgtgaacaaaccttgttaaactaacgctcatctgccttgtcacttctccacgatgaactgccttagcccaaacctctttgtcttgtcacggtctcacaaatcactactctctgtccaactaaggataaaagctttcggccctaacggcttcttgagccttcaatttgcttgtgaaagctcccatggacatgtacaaaatactcaaaaaaaattgtaagcttttctc

SEQ ID NO: 360592 - DNA, 964 bp, Homo Sapiens
ggacagggagacactgtgttctctgtgggcaggttccgggtgacacacattgagaagcgctatggactgcacgaacaccgtgatggctcccccacagacaggagctggggctctggtgggggacaggacccaggggtggtcaggggtctgggggagggcagcccaagtgcagggatgcctgccatggagaggctgccccctgagaggccacagccccaggtcctagccagccccccagtacagaatggaggactcagggacagcagcctaacccctcgtgcacttgaagggaaccccagagcttctgcagagccaacactgagggccggagggaggggcccaagcccagagctgcccactcaagaggcaaatgggcagccaagcaaaccagacacttctgatcaccaggtgtctctaccacagggagcagggagtatgtgagtctccttcattgtgctgatggactaccagctggcagggccagggggtgggtgggcgtgaaagccctcccctccactggacagcactgccccccagctgagggaccagctctacttccacctggagttgcacagtctcaggctgggggcctcaggagaggtcacagcccctcagtctcttctccttcccctgcctgcaacaggctgcctgccccgccttccccaacacctcgctccatatgatagagcgtggcagctgggagcaggcccctgcccgtggtgggcccctaaagcaaatagcaccgtaggccccctgccctcttagcacaagaggcccaggccctggcctggccttcgtgccctttattcattgtcaataaatccgttaaaccattacagctggttcgcatcctggctccagctcctgattcccaaggcctgttcctctccccagcccaaccccagtgaccctggcatccagagtggggtgggtcatggagccagggtggggaaagaggtgggcc

SEQ ID NO: 360593 - DNA, 781 bp, Homo Sapiens
ggtgtcatcctttagaataatgggaattaaagttgagcagttttccatctctaccaaatccttcaccacaagcagcattctattacagtatgaagaattgtctcatatgttaaaactgtacttttctctaacctttctctcactcctacaaggcccttttctcaaatcatatttctgagagaaatgtatggttctttctcacaggcctgctgatttgtaactgtgccatcgaatagagcaattagatccatcagacctttttcccctcattaggttcagtggaaccattctggttaaaacagcatgaactgaactcagtttacattcatattctatgggcaataccatttggtttttggaactgtttatctgctgttccctatcaagtattaatgtagggatgtcactcaggctgcgttgcactgggctgagttcaactgcgacgctctaactgacgcgtgcttacatgtgcttctcacttccggagcacaggcaggtggctgcggggccccagctctgaatggatgcccatgatgcaactggggcagcccttgctttttgcttgctctccccacagaaacctttggccttgcaactttatcctttgtcccgattgggtcccagatacacaaaatgtacaaatgtaaacttgctcattttattaaaattcttttagttctttggtctttctggaattttttaaaataaaaaatgcccttgatggagggatggttttcactcgcaccatacctagtctaaataagaagtctaggatctacaa

SEQ ID NO: 360594 - DNA, 587 bp, Homo Sapiens
  misc_feature (59)..(59): n is a, c, g, or t
  misc_feature (75)..(75): n is a, c, g, or t
gtgagtaccctcgtatgcaggtgactgtgtttgacctcccagacattatcgagctggcngcccacttccaacccnccggaccgcaggcagtgcagatccacttcgcagcaggtgactttttcagggaccccctccccagcgctgagctgtacgtcctgtgccggatcctgcatgactggccagacgacaaagtccacaagttactcagcaaggtcgccgagagctgcaagccaggggccggcctgctgctggtggagacgctcctggatgaggagaagagggtggcgcagcgcgccctgatgcagtcactgaacatgctggtgcagactgaaggcaaggagcggagcctgggcgagtatcagtgcttgctggagctgcacggcttccaccaggtgcaggtggtgcacttggggggtgtcctggatgccatcttggccaccaaagtggccccctgaagcccaggcagcatgttcattatagggatgtcctcccccaggctgcaggtggaccgcccggtccccaagtaccataggacagtcacataggagcgtgtagtcgtgactgaataaagaaagcaaaagcctgtc

SEQ ID NO: 360595 - DNA, 480 bp, Homo Sapiens
  misc_feature (125)..(181): n is a, c, g, or t
  misc_feature (205)..(213): n is a, c, g, or t
agagcccagccattaccatggagacaagaagggttttccaccctggaatcaagatgtcagactggctggctgcagtgacgtgcacctgtactcaggaggctgaggggaggatcactggagcccannnnnnnnnnnnnnnnnnnnnnnnnnnnnnnnnnnnnnnnnnnnnnnnnnnnnnnnngagtgagaccctgtctcttaaagnnnnnnnnngtcagactgctgggactggccaggtttctgcccacattggacccacatgaggacatgatggagcgcacctgccccctggtggacagtcctgggagaacctcaggcttccttggcatcacagggcagagccgggaagcgatgaatttggagactctgtggggccttggttcccttgtgtgtgtgtgttgatcccaagacaatgaaagtttgcactgtatgctggacggcattcctgcttatcaataaacctgtttgttttaaaaaaaa

SEQ ID NO: 360596 - DNA, 496 bp, Homo Sapiens
  misc_feature (17)..(17): n is a, c, g, or t
  misc_feature (43)..(43): n is a, c, g, or t
tggctcgctcccactgncctgtgaccttttgcagggattttgnccctctaaaaccttaaaagttgcagttggccttaggtcggagagcaaatcagggaatcaggaagcctactaaacctattattacaaattgcatctataaagaaagattaagaaagattgttgtctctggctcacactatcgattaaacacacatatacgctctgtccagtagcagatactgtgctcccaaggtcggcattgcctgggtgggaaatggctcaaacacaatccagggaagctctctatgatatgtgtttgacatccccctctagtttctttgtgtgtgtgtgttttatacatatcacaagcttactggtaatggtaacatttgccttgcccagcgagcaagacccactggtttttgagaaagtgggtccaaagatttctgtaggccttgtaggcctgattaaggttcatttttcatctattaattctcattatttggaaaaaaaa

SEQ ID NO: 360597 - DNA, 550 bp, Homo Sapiens
ttttttaaggaactgctccaagggttcattatagaacaggagtgtgtacggaggacttaggtccccacatagagtggccgttctgtggcggctccaaccaattccatccctcctttcctgcggacacacacccggccccggcccctgccctgtgtgtctggaggaggggcactggggaggctgtggagcagagagaagaggccggatacattgaggatggcacctggcaagccaggcttccttctcaaaggccagactgctttctcagtgttacttactaaagctctctttttatactgttaaaaagatatataaagttcgtataaacaggcttgagaccactttgatgtaaaagctgtcatagtagtttttctcacagtggcacaattcatttgattgatggaatattcagtgacgccatgtatgccctatcgcttttttctcatccatctttatgctataactcatactgatttaagaaatgatttctccttttggcaaagcgaccccattcaatatggttataataaaagactaatgtcaaactgag

SEQ ID NO: 360598 - DNA, 1012 bp, Homo Sapiens
  misc_feature (102)..(102): n is a, c, g, or t
  misc_feature (125)..(125): n is a, c, g, or t
  misc_feature (157)..(157): n is a, c, g, or t
  misc_feature (203)..(204): n is a, c, g, or t
  misc_feature (221)..(221): n is a, c, g, or t
  misc_feature (258)..(258): n is a, c, g, or t
  misc_feature (685)..(699): n is a, c, g, or t
  misc_feature (812)..(909): n is a, c, g, or t
  misc_feature (953)..(953): n is a, c, g, or t
tcgagtttggatctctcacagcccaatctgaatgtgccctgactttggacctgaaggtcaggcagtctcttctccaggggatccgcacaggaggaccctttntcgtggttgagctggccagggcntaagagtagcaggactctaggacacagaagtntttttataaatgtataaatgtatcaagccaaatgtgcagatgctannctgacattctggggganctggcacccagaagtgccttcatacctgtacccagcntctcttctaaaagagaagtgggtgggcacatgactgttttggtggccccaacacaggaagctgcaattctctggcttagggtgatacttttgccctccttgtgcccctctcagctttccatccccagctaggaagaaagaatggcactcttgggcttggcccagaattagagttattagagcaagagagagcttaggaagcatgagggcaactatagtgaggccttattgccaggagggagggttttggttgctggcgcttgtgtataaaggggcaagagcagctcctttggactattcctgggaggactctgatgcagggcgtctgttgctcccctgggtcacctcctccctgctcgctgacatctggggctttgaccctttcttttttaatctacttttgctaagatgcatttaataaaaaaaannnnnnnnnnnnnnnggtgtgagggacaaaatgcaaacctatttcccttgcctcataggcttctgggatgtcatcacctccagtttgttggttttgtttccaactgttaataaagcattgaaacagtnnnnnnnnnnnnnnnnnnnnnnnnnnnnnnnnnnnnnnnnnnnnnnnnnnnnnnnnnnnnnnnnnnnnnnnnnnnnnnnnnnnnnnnnnnnnnnnnnnttcttaaacacccttttttaaggaacacagcaaaaaaacggttngggccctcgccccgcgcgggatattaaaaaaaatttctatccctcttgcgggggccgcg

SEQ ID NO: 360599 - DNA, 433 bp, Homo Sapiens
cttataccacaggtgccaaccttcagtaacctgtggtttaagttaagacaggctactggggaggattattactactactcagtaagagaactctgtctcaaaatctcccccactcaccccagctgccttcccctggctgagtctcaaagaagagcattctttgagccctatctggatatacgtgaggaaacagtttggtagctgctgctttcaggagcagcaatgatttcaggctttgccagcaggtggcattataacttactttatttccacagcaacgttttggtctagggacccttttacactcttaaaaaaatcattgaggactccaaagaacttttgcttatgtaggctgtatttatcaatatttactgtatttgaaattaaaactaatagatttcttaaatgtaataaacccgctacatgttaacat

SEQ ID NO: 360600 - DNA, 458 bp, Homo Sapiens
  misc_feature (22)..(22): n is a, c, g, or t
  misc_feature (26)..(26): n is a, c, g, or t
  misc_feature (37)..(37): n is a, c, g, or t
  misc_feature (42)..(42): n is a, c, g, or t
  misc_feature (50)..(50): n is a, c, g, or t
  misc_feature (53)..(53): n is a, c, g, or t
  misc_feature (84)..(84): n is a, c, g, or t
tgacagactttgcagccttgcnaaantttaaaagcanttttnaaaaaacntcnacaaaactctagtatgggcctctgacttttnccagggtgtagaatttgacctcaaaagtaaaaataattttgttttagtatattcctactttccattaatgtttttttgttcctgaaagtgatattatattgtacatgtaaaattaatttaaatattttttcaaataaaaatgtaatgtcctgtattcctagatgttcctaggtccttagaatccatggcaagcatattcatacaaatgcgtacctataaacttgtagctcctgactcttagggatggattttgaggaaaaaacaagactaaacaaaaacatgtagctccctatttcttctctctaggttgttggactgaaatatgcattttagctttgtgtgtttctaaaataaacatttctaaaatttacagt

SEQ ID NO: 360601 - DNA, 903 bp, Homo Sapiens
  misc_feature (584)..(584): n is a, c, g, or t
atgagggccgagggcctcggcggcctggagcgcttctgcagcccgggcaaaggccgggggctgcgggctctgcagcccttccaggtgggggacttgctgttctcctgcccggcctatgcctacgtgctcacggtcaacgagcggggcaaccactgcgagtactgcttcaccaggaaagaaggattgtccaaatgtggaagatgcaagcaggcattttactgcaatgtggagtgtcagaaagaagattggcccatgcacaagctggaatgttctcccatggttgtttttggggaaaactggaatccctcggagactgtaagactaacagcaaggattctggccaaacagaaaatccacccagagagaacaccttcggaaaaatcgttagctgtgaaggagtttgacatcacatctggataagttagacaatgagaagaaggatttgattcagagtgacatagctgctctccatcacttttactccaagcatctcgacattccctgacaatgatagcctcgtagtacctctttgcaccaggttaactgtaatggcttcacaattgaagatgaagaactttctcatntgggatcagcgatatttcctgatgttgcattgatgaatcatagctgttgccccaatgtcattgtgacctacaaagggaccctggcagaagtcagagctgtacaggaaatcaagccgggagaggaggtttttaccagctatatcgaatctcctgttacccaaagggaagatagaaattgaccgcgttaaggaagattcttattcccttttagctgtgaggtgccaggagtgttaccacaaaggacaagggctagggccaagtggaacttccggaagctcaaggatccccaaggcgaaagcattcggaactggccgaattg

SEQ ID NO: 360602 - DNA, 1770 bp, Homo Sapiens
agcgggggcacagccggcggccgcgccccgccgccaccatgatgggccgatgggcctcggctggcctggagcgcttctgcagcccgggcaaaggccgggggctgcgggctctgcagcccttccaggtgggggacttgctgttctcctgcccggcctatgcctacgtgctcacggtcaacgagcggggcaaccactgcgagtactgcttcaccagaaagaagattggcccatgcacaagctggaatgttctcccatggttgtttttggggaaaactggaatccctcggagactgtaagactaacagcaaggattctggccaaacagaaaatccacccagagagaacaccttcggaaaaattgttagctgtgaaggagtttgaatcacatctggataagttagacaatgagaagaaggatttgattcagagtgacatagctgctctccatcacttttactccaagcatctcgaattccctgacaatgatagcctcgtagtactctttgcacaggttaactgtaatggcttcacaattgaagatgaagaactttctcatttgggatcagcgatatttcctgatgttgcattgatgaatcatagctgttgccccaatgtcattgtgacctacaaagggaccctggcagaagtcagagctgtacaggaaatcaagccgggagaggaggtttttaccagctatattgatctcctgtacccaacggaagatagaaatgaccggttaagagattcttatttctttacctgtgagtgccaggagtgtaccaccaaggacaaggataaggccaaggtggaaatccggaagctcagcgatcccccaaaggcagaagccatccgagacatggtcagatatgcacgcaacgtcattgaagagttccggagggccaagcactataaatcccctagtgagctgctggagatctgcgagctcagccaggagaagatgagctctgtgtttgaggacagtaacgtgtacatgttgcacatgatgtaccaggccatgggtgtctgcttgtacatgcaggactgggaaggagccctgcaatatggacagaaaatcattaagccctacagtaagcactatcctttgtactccctcaacgtggcctccatgtggttgaagctagggagactctacatgggcctggaacacaaagccgcaggggagaaagccctgaagaaggccattgcaatcatggaagtagctcacggcaaagatcatccatatatttctgagatcaaacaggaaattgaaagccactgaaactatgcagcatttcagttttcatttaaacacttagttcagaaaccttaaaggatttgaatatttcaaattgcacacgtcactccagcatctctgtaaaataattggaatgaaaatacttcttgcacttaaacactgcacatgccgtactttgaggttagtctgaatcttgaactttaataccaaattaattttgaatgcttttgtttcctaagagataatggcatggtttcatatgttatactttggacagagttttaaaaatggaattattttttctttcatgcctcttgtaatgttctgaacaaacttgaatgatgaaagtattaaagagatatcagtatttgaggtttgtattttcttctgtctctggggaggatttctcagtggtggtggggagcccagtcttgggagtgaaagtgacacctgctgtcccattaattcagcaagctcaagtcttctcccatggggactgggggtcggggcagcct

SEQ ID NO: 360603 - DNA, 483 bp, Homo Sapiens
aggtttaattccagaaaaattacaaggtccttaaaaagctctcacatcgagggctcaggctagcgtaaacaggctttctccagctcagtggagcagtgagcagccgactctgagattagctggcttctccacggccatcctatagacaggatttctaaagctcaaagaattctgtgtttaaacgatcacaataggccgctgctatcagattttagaaataaatgcagctttaccatgaacctgctccactgagaaaagccaggcagatcgatttttagatcaatttttacagtgctggcaacttggtggtgtgggatgctcctgggatggagagggtttgctgctggggaggacatgggtgtgtgtgtgactgcaggggtcgatgtcccaaggaatcaagagtcaccccagcttgctgggcttcctctgcctcttctggcagcagaatgttccgtcctctgtttgatttgatttgggagagga

SEQ ID NO: 360604 - DNA, 605 bp, Homo Sapiens
cagcactgaaggatttgaactgactttgggagcttccttcttttttcattccaactgaaaatgctttaggtaaaaacctttccagtatgttcacctctagaatagccacccaaagaccttcctgaggctgcctcagaagcaccacttgctgttttgaatgactctactagtatgagaaggatgtgaaggtggttggctggttgggctttaacttcctgggattcataatttttaagcttggaagatagctgctgttcccatgatgggcacatttcctgagaagcttgaatgactgatgagcatagagcacccctgccttcctcaggaaacctgaccggcagaggctctctggcttcctgaaagcttcacctcttccctcgtttatatctcaactgtaagggcattttcaagcttctgttcatggaatgagcaactcagactgtctggagcttgctgagtacaaacacaccaccactaagtttcagaactttccttagaacttgggcaaaatgtggtggtaactcttaagtgcttttggtatctcttgagattctaacttttaaagagcaaccattaatgtgtaaaatgattcctattattcaagg

SEQ ID NO: 360605 - DNA, 475 bp, Homo Sapiens
  misc_feature (15)..(15): n is a, c, g, or t
  misc_feature (102)..(102): n is a, c, g, or t
  misc_feature (422)..(430): n is a, c, g, or t
ctttaaactcccccngggaattcaaaaatttttaaaccttgggaagaaaacctgcctgttccccaggaagggccacatttccctgaagaaagcttgaaatgnactggatgaagcatagagcacccctgcccttcctcaggaaacctgaccggcagaggctctctggcttccctgaaagcttcacctcttccctcgtttatatcctcaactgtaagggcattttcaagcttctgttcatggaatgagcaactcagactgtctggagcttgctgagtacaaacacaccaccactaagtttcagaactttccttagaacttgggcaaaatgtggtggtaactcttaagtgcttttggtatctcttgagattctaacttttaaagagcaaccattaatgtgtaaaatgattcctattattcaaggnnnnnnnnnaatgaaaataaaatatttgattttctagaaaatggtttcactatg

SEQ ID NO: 360606 - DNA, 697 bp, Homo Sapiens
ggcacgaggcccatggcacttttctgagcccagcagaaatcagcggagcttgggcttcgcttagcaggtttgcaattgacttcaacatgcaggcttttcacatgtgcaataatgctggaaacagaagcaccaaactgattgtgcaattactccttttgtagaagaggccaaaatcctcctcctccttcctttctcctatattcactcctccaggatcataaagcctccctcttgtttatctgtgtctgtctgtctgattggttagatttggctccccttccaagctaatggtgtcaggtggagaacagagcaaccttccctcggaaggagacaattcgaggtgctggtacatttcccttgttttctatgttcttctttctagtgggtctcatgtagagatagagatatttttttgttttagagattccaaagtatatatttttagtgtaagaaatgtaccctctccacactccatgatgtaaatagaaccaggaataaatgtgtcattgtgataatcccatagcaatttatggtaagaacaagacccctttccctcaccaccgagtctcgtggtctgtgtctgtgaaccagggcaggtaattgtgacactgcatctcatagaactctgcctgcccagatttttgtgtgctcacctcaatgggtgaaaaataaagtctgtgtaaactgttaaaaaaaa

SEQ ID NO: 360607 - DNA, 923 bp, Homo Sapiens
  misc_feature (451)..(476): n is a, c, g, or t
  misc_feature (650)..(743): n is a, c, g, or t
gagggattattttattgagggtagaagagattccagaatcatcatctgtgatgatggtgtcctttagggctcttggagcagccagaccatgtttccaagagaaacctggtgatattgccagcagaccccctgccatcccccccagttgtcctggggctgaatgggcaaatctgtccaaacagctagtaaccggctgtgagggagagggtcagaagcacttagcgttggcctctgattgctgtcctctcttgtcctcttcccactccaatgatgaaaatgattttctctaaatgcctgggtaaggatgctttcaaggagctcacttggcctgcttgccctgccctctcacctctgacacccagccccaggagccagaccactcctgcctccacctctgactcttcagcagctgaagattaatgcagagaaagagcaaagcccaaaagggagnnnnnnnnnnnnnnnnnnnnnnnnnncgaagcccagagaaggcaggctgtgcctgagcctggtagcagagctcgttgctgggtgaggatggcactccccgagttttcccaaccgacgggatgaccttccattgtgttttcccaaccctgctcatcctgtagcataaatgaagtgcactattaaacagaatagttttgtcnnnnnnnnnnnnnnnnnnnnnnnnnnnnnnnnnnnnnnnnnnnnnnnnnnnnnnnnnnnnnnnnnnnnnnnnnnnnnnnnnnnnnnnnnnnnnnccaacaacaaacgggcagggcgacgcacagacagaaacacacgcaggaggggcgcgccacacaccgagaaaccacgcgtattagagggagaacaaggggggcaccaaagagagagcagcaaaaacaaaccaggagaggaggagcaggagaacaaacaaacgacgacacggcacagaccag

SEQ ID NO: 360608 - DNA, 1345 bp, Homo Sapiens
  misc_feature (71)..(85): n is a, c, g, or t
  misc_feature (94)..(365): n is a, c, g, or t
  misc_feature (412)..(412): n is a, c, g, or t
  misc_feature (414)..(414): n is a, c, g, or t
  misc_feature (646)..(646): n is a, c, g, or t
  misc_feature (691)..(691): n is a, c, g, or t
aaagtactggcataatagacatgagccactgcacctggctcctaagttcttttcttgaataatatctttcnnnnnnnnnnnnnnngaggtggannnnnnnnnnnnnnnnnnnnnnnnnnnnnnnnnnnnnnnnnnnnnnnnnnnnnnnnnnnnnnnnnnnnnnnnnnnnnnnnnnnnnnnnnnnnnnnnnnnnnnnnnnnnnnnnnnnnnnnnnnnnnnnnnnnnnnnnnnnnnnnnnnnnnnnnnnnnnnnnnnnnnnnnnnnnnnnnnnnnnnnnnnnnnnnnnnnnnnnnnnnnnnnnnnnnnnnnnnnnnnnnnnnnnnnnnnnnnnnnnnnnnnnnnnnnnnnnnnnnnnnnnnnnnnnncaagtaatatcttaatatcatgccattgacatttatcctctaattantntcagaggtggccttcagaagaaggcctctttggtaaaattgctattgaggatatttcactgaaaaacaaatttatctttaaatttaaatccaggaaaaatttaaactttcaggcttctatttttatcagacagggtaaaaaatttataactcagaatattaccctttcccctctttgtgtgatggattgcttggttttagttactgattatttaaaataataagttattcanatctaggattttgatacaatagttcttctctagaatatagtgtgntgtgtgagagtatatttaaaatttttattaaggcccatggggcagcctttgaggaaaccagaccttggggatcgccaggcagggattagtggcaggaatttgagagaacagaagccccacagagctccttcggggaacgtcccccagtcacaagaagtatctcaaggaagtagtcttctcccacatcccccaaagataactaccagagggtcagttctctgagcccttctcagtgtagaaaagacaagtgtcaaagcttccccactcaccctgagtttgccttctatgacaatacgtcgtttggcctcactgaggctgagcagaggatgctggacctcccaggatattttgggtcaaatgaagaggatgaaaccacaagtacacttagcgtggagaagctggtgatctagactgagaatcagcctgagcttaacacagctggggtctgccactcgcgttttgtagactttttgtgtaactatttgtaccgtaggacagaatgtgaggaggaagtaacacacacagaggaggatgtgtgtgtatgcatgtgtttgaattcacaaggaagaaattatttatcttgagctttttcctttgttattcaatttctattgatttattagtaattacaatgataattaaatgtaaatgagc

SEQ ID NO: 360609 - DNA, 506 bp, Homo Sapiens
  misc_feature (456)..(456): n is a, c, g, or t
caagtcactcaggtttaatgattccatcatttggacacataaacttctgttccatttaagtctgctcactgtagataatccaggtcacccagcctcccattaagatttaatcaaagttttctgcaccccaaaccctcacaaaacagacctctatgatgaaatcacagaaagatacatattagtccagttagtggccaaacattggtctttagagtccaaagacctctataaccattaacagtagttgggagaaaagaaggaataaagaaactgagttttctgagaaccccctttccagactgcctgaataagttgccttttcttaaaagagcaggattaatctacttatgccaagacccactgggcagaaagcaccccaacccaggtttagctgatctttaccacttccctgtgagagctacagcaatcttttggaattttctgcaacaaattttnccccttttgctgtccctacaaaggcagaaaagctaggggccaatctctgg

SEQ ID NO: 360610 - DNA, 315 bp, Homo Sapiens
  misc_feature (28)..(28): n is a, c, g, or t
  misc_feature (47)..(47): n is a, c, g, or t
  misc_feature (123)..(123): n is a, c, g, or t
tgaacttggggtctccccctacctgaanacttgaagtccctcggcanactcttggatacctccagcaatggggagctcacccacctgttttgaaacccaggcaggtttgggctcttcttgtanctgtgtgactctggatttttcccataggtgggagtggatccaccaccttgagcttcagtttcctccagtgccatgggattagcagcagccctgcctcacagattgcgtgaggatgaaatgagatgatgctcctgagttggctggtgcagtgcacggtacacagagagtgctcaataaatgttccctgctgtg

SEQ ID NO: 360611 - DNA, 490 bp, Homo Sapiens
  misc_feature (22)..(22): n is a, c, g, or t
  misc_feature (34)..(34): n is a, c, g, or t
ggaaaccccagggaaacccgangttgaggcccanagtggtacccgcctttaggaactgttacagggcttgttggtaatgttttgaacctttgtaaaaattgataatctgtataaccagagtgcctctctgttacttttggcctatgttgttagaaataagatgctatcttgcatagttagaattaagcgtttgtccatctctagataacattgaaaagtttgagtgttacaggctctaaagtgcaatggagaacaattgcttaggaggaggaaggggaaagtatacttatgttggtgtgtaagcatgcatggaggcctcgaggcaccacaacaaggccaggttcttagcacatcctctgttctctacctgtcatgcttcaagagttccagctggcctgctgtgaagccagtagctattttaaaagtgctggctgcaggattaagccaaccctttacaactggcccagacctgtaatggccatttcttctt

SEQ ID NO: 360612 - DNA, 478 bp, Homo Sapiens
  misc_feature (12)..(12): n is a, c, g, or t
  misc_feature (35)..(35): n is a, c, g, or t
  misc_feature (58)..(58): n is a, c, g, or t
  misc_feature (70)..(70): n is a, c, g, or t
  misc_feature (83)..(83): n is a, c, g, or t
  misc_feature (91)..(91): n is a, c, g, or t
  misc_feature (97)..(105): n is a, c, g, or t
cgcctaaaaaancctgttaaagggccctggtgggnaaaaagttttgaaaacccttggnaaaaaaaatggnaaaatccctgtanaaaaccanaagtgnnnnnnnnntgttactttgggcccctaggtggttaagaaaataagatgcctatcttgccatagttagaattaagccgtttgtcccatctcctagataacattgaaaagtttgagtgttacaggctcctaaagtgcaatggagaacaattgcttaggaggaggaaggggaaagtatacttatgttggtgtgtaagcatgccatggaggcctcgaggcaccacaacaaggcccaggttcttagcacatcctctgttctctacctgtcatgcttcaagagttccagctggcctgctgtgaagccagtagctattttaaaagtgctggctgcaggattaagccaaccctttacaactggcccagaccgtaatggccatttcttctt

SEQ ID NO: 360613 - DNA, 444 bp, Homo Sapiens
ggtaaagttttgaaaacctttgtaaaaaatggaaaatccctgtaataaaaagagtgccccccctgttaccttttggcccctatgttggttaagaaaataaagatgcctatccttgccatagttagaattaagcgtttgtcccatctcctagataacattgaaaagtttgagtgttacaggctctaaagtgcaatggagaacaattgcttaggaggaggaaggggaaagtatacttatgttggtgtgtaagcatgcatggaggcctcgaggcaccacaacaaggccaggttcttagcacatcctctgttctctacctgtcatgcttcaagagttccagctggcctgctgtgaagccagtagctattttaaaagtgctggctgcaggattaagccaaccctttacaactggcccagaccgtaatggccatttcttcttaaaaaaaa

SEQ ID NO: 360614 - DNA, 347 bp, Homo Sapiens
  misc_feature (128)..(128): n is a, c, g, or t
ctttgcagtaaacgatacctcatctaagaggctctaatacctaaagagtttatccttaaaagtaaaagtgactttgtacccataaaataacgcccaaagcccactctcctagggtttttattttcctnctttcctttggctttatcttttctaacttagttttggaattacgttagctactttggttccatagaacaagttttcaacttggggtctacagttcctacagtgtgctcattgtctcagtgaagttcttttgttttcaaagattcatggtaacaaaatgtattttactgctacaactaaaatgtatttataataaaatgcctttttaataataaacacag

SEQ ID NO: 360615 - DNA, 330 bp, Homo Sapiens
  misc_feature (111)..(157): n is a, c, g, or t
ctttgcagtaaatgatacctcatctaagaggctctaatacctaaagagtttatccttaaaagtaaaagtgactttgtaccataaaataaccccaaagccactctctagggnnnnnnnnnnnnnnnnnnnnnnnnnnnnnnnnnnnnnnnnnnnnnnnggaattacgttagctactttggttccatagaacaagttttcaacttggggtctacagttcctacagtgtgctcattgtctcagtgaagttcttttgttttcaaagattcatggtaacaaaatgtattttactgctacaactaaaatgtatttataataaaatgcctttttaat

SEQ ID NO: 360616 - DNA, 230 bp, Homo Sapiens
  misc_feature (92)..(92): n is a, c, g, or t
ctacttttatgtgccccagaatatttttgaggcgaaggcgtctgtctcttggctattttaacctaaaataacagtctagttatattccctcntcttgcaaagcacaagctgggaccgcgagcacattgcagccccaacggtggcccatcttcagcggagagcgagaaccattttggaaactgtaatgtaacttatttttccctttaaccccgtcatcattttctgtaggg

SEQ ID NO: 360617 - DNA, 1501 bp, Homo Sapiens
agcaaacaatgctctaatcacaatattaactgtttaattaaaatgttgtaacaagtataaaacagggaatgtaagtttattaccaaagtgatatgtattccaaaaaagtcatagaagatgaagcactataatattgttcccatatatttaaaatacccaagtacattctaattaccagtatatcagaggaaaattttcgtagtctttgtaaaataatatactcatcatagaaaacttgaaaaatacagaaatgtataaaaaagcaaaaatgattactgataatatcacaacccagaagtaaccacctttaaaaagcaacccccatgtatgcctatatgtgtattgtatactttttttacataattggagtcatactgtaaacagttttataagtagatctttttcattgcaaaattgccacattttcttatggcattaaaaattttacaaaaacataattttaatggctatattatattccatttaatggatgcaactcagtttatttaaccattcccatgttgttaactatttaggttgtttctaattttcattattataaagttgcagaaatttggtgtacataaaactgtctccatataattgattattaggatatattcccatgaaggattctttttttaaaaaaatgtgaaatgtcatcttgtacttacacctttcatgaaaagggatttcctgcttttgtactgcatgggtggcagttgtgaggaaaagccagtcaaatgacctttttacaaaagaaatgcagtggtcacttcagttgagagtgactttttaatacaacaagatcaactagaagaattcaactgtctcaagaatcaaggtaccccaatatatctcgcaattccaaacttggtttgagggactcgttatccagctcttggtagccacacctgcaatgtaaaatggaagaaaatgcaaagaaaccaaatgtgccgagtgaataaaggattgtcatatcaattagtgtgggtccatctgtagcaaatgggttgagtgtgtcagtatgtggttggttactgtgtattcgccaggaatcaccccgataggctgccaccctattaggtgatacctgtttaatatgttgtccaggtagactagtagttgcatcagtttgctgtaacaagtaaccagtgaggtaacacagtggtgaagcaggtcaggggaggtcaggaggatgtctgagagaaagaagtccgggagatgaatggctgtctaggaaggaggatgtcagtgcacggttagtgtttgagcagagggcagacttgtaaagtacctgtagtgaaaagaatgtggggacccgattagcagaaaggtgtttgcacatactttatacaaaatacagaatactttatattggaagtgaaagaaatgaacgtggacttttacacatgtgcatatttttctggaggctatatggattatttgaaatgaaaagcatactaattggactttaataaatcattttcaatcagcgttt

SEQ ID NO: 360618 - DNA, 435 bp, Homo Sapiens
  misc_feature (64)..(64): n is a, c, g, or t
  misc_feature (108)..(199): n is a, c, g, or t
tccttataatttggcacaaacagcagagactgaagctcctacacatgttgaactgctgacaggnaaagaacccagtagataaatctaggctttccactccatatattnnnnnnnnnnnnnnnnnnnnnnnnnnnnnnnnnnnnnnnnnnnnnnnnnnnnnnnnnnnnnnnnnnnnnnnnnnnnnnnnnnnnnnnnnnnnagactccgtctcaaataaataaataaataaactaataactaaatgttgtaacacaaaagaggatgaatgcttaaggtgatggatatcctgtttaccctgatgtgattattacaaattgcatgtctgtaccaaaatatctcatgtacccgataaatatatatacctactatataccgacaaagttaaaaatagaaactggaagacaaaaaataaattaaaatcaaataaagcttctc

SEQ ID NO: 360619 - DNA, 522 bp, Homo Sapiens
  misc_feature (229)..(339): n is a, c, g, or t
  misc_feature (397)..(397): n is a, c, g, or t
  misc_feature (408)..(408): n is a, c, g, or t
  misc_feature (415)..(415): n is a, c, g, or t
  misc_feature (444)..(444): n is a, c, g, or t
  misc_feature (474)..(474): n is a, c, g, or t
  misc_feature (508)..(508): n is a, c, g, or t
ttgcggcacgaggtcttaaacttaaggtattctcaaaaataacttttacagaaggaaaacttaaacagaagagcccaactgtgtatgatccaattacaaaaaagttatctgattttatttcttatatatttggcacaaacagcagagactgaaagctactacacatgttgaactgctgacaggaaaagaacccagtagataaatctaggctttccactccatatattannnnnnnnnnnnnnnnnnnnnnnnnnnnnnnnnnnnnnnnnnnnnnnnnnnnnnnnnnnnnnnnnnnnnnnnnnnnnnnnnnnnnnnnnnnnnnnnnnnnnnnnnnnnnnntaaattaaataaacttaataacttaaatgttgttaacacaaaagggggatggaatggnttaagggtggntggggtnttcccgttttacccccggatgtgggtttntttaccaatttggcctgttctgttaccccnaattttctccatggtacccccggttaattttttnttcccccccctttt

SEQ ID NO: 360620 - DNA, 269 bp, Homo Sapiens
  misc_feature (103)..(103): n is a, c, g, or t
  misc_feature (105)..(107): n is a, c, g, or t
  misc_feature (109)..(111): n is a, c, g, or t
gtgtgtgttcactgggtacaagttgaccaagcatcttcacatacatacactctttccagcatgataaaatctgggtgaggcgttctccctcatatatatatanannngnnnggggatgtatctgggcaagctgaggcccaggaggaggccccgagggctcatagtagctgcatggcagaagtgggacctgacgcttctcaggctctgctcttgcctctgtaccacatgcttcaccagggagggggaaagaatcttgccttccctccttt

SEQ ID NO: 360621 - DNA, 418 bp, Homo Sapiens
  misc_feature (159)..(159): n is a, c, g, or t
  misc_feature (168)..(168): n is a, c, g, or t
  misc_feature (226)..(226): n is a, c, g, or t
  misc_feature (369)..(369): n is a, c, g, or t
ctcactgtttaaggattccagaaactgtccctcccaagttttaattggactggtcccggttcctaccctctttccttacttgcagttttccaagaataagtgtagaatgtgcctgggaatggaatatccctgatatcagaagagaatggtagaacagcnccagacttnaacagtcttcacaagaaatacaatctctcaacacttttggtcagtgagtcaggtgatncctgggctaaaaaacctgggctgggctattttcgggagtctcttaactgtgttgcaagtggggcacatgcaatcaaaattccatccttccaggcaacttctctgaacctcagggggaccacatcacactgaattttagacttnctcatcttcgatccctttataagtaataaatcaacttatgtaaaaaaaa

SEQ ID NO: 360622 - DNA, 253 bp, Homo Sapiens
gaggctgcactgttgatatgtcatgcagtggccaccaagaaagtatatactcgtgttagatactgattacatcatttacatcacgctcagtatttggaattaaaaatgtgaatgttctgtgaccagagtagggatgacacaaatggaatcagctcctggtggactaagaatcttgaaaaaatctggccacctcatccactacatctggattgagtgtactgcaacaaagaaaaacattaaacaattttatatt

SEQ ID NO: 360623 - DNA, 752 bp, Homo Sapiens
  misc_feature (520)..(685): n is a, c, g, or t
  misc_feature (692)..(709): n is a, c, g, or t
actagtcacggttggctactaagtccacggtggctactagtccacggttggctactagtccacggttggcttgtgcagtgatactgagaaaatacatgaacagaaactgcccaggtggaacagcacgtaacctagtgagtgactgtactcctttctaggaatgctgattcagagtgcacctctttgactaggtcccaggatccccttgtccctggagtagggactaactatagcacaaagtaatatgtgccaatgctatttgtgaaatgtttggtctttctaaacgactaaaggatttgttgggtttttgcttaagttttgaaccaaatcctagagccagctgataatatttaataatctagaggagagaataatgatgtaccaataagtggagattcctccttatgatgtatgctaggttatggaagatgtaaaatattcaactttttcctcctttttttggactttgtattttactgcatgttttcttcatttttaatcaataaagagtaaattgtcnnnnnnnnnnnnnnnnnnnnnnnnnnnnnnnnnnnnnnnnnnnnnnnnnnnnnnnnnnnnnnnnnnnnnnnnnnnnnnnnnnnnnnnnnnnnnnnnnnnnnnnnnnnnnnnnnnnnnnnnnnnnnnnnnnnnnnnnnnnnnnnnnnnnnnnnnnnnnnnnnnnnnntttgtgnnnnnnnnnnnnnnnnnnaaaaaattttttaaaaccttttttgggggggggggcccccccg

SEQ ID NO: 360624 - DNA, 457 bp, Homo Sapiens
  misc_feature (20)..(20): n is a, c, g, or t
  misc_feature (33)..(33): n is a, c, g, or t
  misc_feature (45)..(45): n is a, c, g, or t
caaaatggattgaaaccganccagaaccatggnatgggaaggaanaagagaaaaaaacctccctctgaaggggtgatgaattagggtaaacccctaagagatgagaaggatgagagggtgaaaaagcatccccaggcacagggagctgcatgtcccaactgttcctcaggggagaaagtttggccttctctaggaacagacggagagaaggcaagggatcctaagggagatggtgcaagggcttttggggagtttggggtttatccaaaatgtagtagagaagagggttcttgaagagttttcagcagggatgggacatgtgggatttgtgtaaagcagggagcaaactatggctcaagggcctgctttggctcactgcctgtttttggaaacaaagttttattggatcacagacacaccattagttttcttaggagctacaaaggcagaatttatg

SEQ ID NO: 360625 - DNA, 795 bp, Homo Sapiens
  misc_feature (647)..(647): n is a, c, g, or t
agctgatggatcgctggacgactgttattatgccacaatagctgtgatgtggttagatagtactaccccaaacattaaccctgagctttcttcatggaacctcttgaatgatggatggaagagctataagaggtggtaggcataggggcaagccatgtaagctgaggattggggatggtttcatcaacataagaggccaggaacttgacccctttgaattgtgcatctcaggcacttcaaaactaaaaccaaatttagcataggaaaaagttgtttaatgctcagggcagaaatttggggaagttgaaatcctctgttggctttgggttgtataaggaggatcaaaacaacagaggaaatgctgactttctagctttgcatgacacctggagcaatgcactgtacctgcctcactcctgtccagtggtcaggtttcccctgaccttccctcacccccagaaacacttgcttacagaccgaaactggcatcttactcatggcaccttgacttgcaccctctgaggttccaactcagtcattctttgtccagcagaggagaatcagaaatgagcccttcaggattaatcctcttgcaccagctctcagagaaatgcggggtatccctgtccttgcccctatctgtccancctggggcctggtaatggccacagttattgtttcaaatgccaacactgtcttctcatgttcttccgtggggcattgattaatgagtcatttgttggctcctaaaaattagacaatccattctcttgaaagcaccgtgtcttgaaagaa

SEQ ID NO: 360626 - DNA, 1254 bp, Homo Sapiens
tataaaatattcacgaggaaaagtcaaagttatcctgcaattaccatgttagaaccagattttgcaggttaaaaaagatgttgcttaaatatattcataagccctgttgtaagattttcacttatgcagtttcagaaaatttagctgcttaacatatgacagaactgtattttaaaaaatgacattaaaagtcaggagagctactcagtataattgataaagtagaggcaacgtgggggagccctccccacgtttattgaagatttgtggctcccccagccccgtttgcctgcatcaggctaacaacctcattcctcccatagagcctggccaaatcacaggcggtgtcccccttatggttccgatgccccacattgctggccgtgtgcttcaccaggaactccaccacccggaggtggccttctttggcagccaagtgcaagggcaggttcccttcattatcctcgatgttaacatcagcttgaaactccagcaaagtctgtaaagtgtccaggaaacctgctctggccgcatcatgaatgacagcgaaaccagttcggtctttcaaatcgggattagcacctctaagtagcagtctcctggcaatctcgggatttccaagtttcataacctgcagcgcagtccttccaaatccattttgtgcattgacgtttacattattttgcaacaaactagtaagttgctctaggtcccccctggcagctgcggacgccaactcgttcccccaaggctcggccattctttagggtcccttgttcacggtggtgacttgagccgtgtgaggcagaactgcaggggcaggtcctccagggggctcggtttccatccgtctcgccgaagggatagtcctgggtcctccgctgctgggagagcgccgcggtggctggatgctgacgtgctccggagggttaaaagatgatcgccaaaggcgaacgggagtagcagttcggtggccctcaagttacaggtcgtaacgattgcccagtgctctgggcttctccagaagagcctttggtcgcgtccgggccaagccgtgggctaatgccgctcaggaaagctccggagcccgcccgccaggcagccgcagccccgccgagcctcagaggccgtgggagccgggctcggcgcgcgtctccggaggctgccgggcgtgcggcgggcccccgagaagcccgtcatgccggccccgccaggtcccgggactcccgcctcgtgccgaattcgccacccagc

SEQ ID NO: 360627 - DNA, 1001 bp, Homo Sapiens
gggagattaaccatcccagtccttctgtcagtctccgatgccatcatgcagcctggttaggagcaaaggaaaggggaaaaagaaaaacgactaattcatcttttcctgatcgtcaggaccctaaagaatggccgagccttgggggaacgagttggcgtccgcagctgccaggggggacctagagcaacttactagtttgttgcaaaataatgtaaacgtcaatgcacaaaatggatttggaaggactgcgctgcaggttatgaaacttggaaatcccgagattgccaggagactgctacttagaggtgctaatcccgatttgaaagaccgaactggtttcgctgtcattcatgatgcggccagagcaggtttcctggacactttacagactttgctggagtttcaagctgatgttaacatcgaggataatgaagggaacctgcccttgcacttggctgccaaagaaggccacctccgggtggtggagttcctggtgaagcacacggccagcaatgtggggcatcggaaccataagggggacaccgcctgtgatttggccaggctctatgggaggaatgaggttgttagcctgatgcaggcaaacggggctgggggagccacaaatcttcaataaacgtggggagggctcccccacgttgcctctactttatcaattaactgagtagctctcctgacttttaatgtcatttgttaaaatacagttctgtcatatgttaagcagctaaattttctgaaactgcataagtgaaaatcttacaacaggcttatgaatatatttaagcaacatctttttaacctgcaaaatctgttctaacatgtaattgcagataactttgactttcttctgaatattttatctttccttggcttttcccttgcttccccttttgccaatctcaacacccaagttgaagactttgtttttaaaatggtttgtcctgatgcttttgtctaattaaaacactttcaaaacaggaaaa

SEQ ID NO: 360628 - DNA, 715 bp, Homo Sapiens
  misc_feature (412)..(428): n is a, c, g, or t
  misc_feature (543)..(563): n is a, c, g, or t
tgaagatttggagagagtgtccaagaataaaaatctaccaccctttttttcagtgaaactagaagaaggagctgtcagtggaaggaaacacagacattaaatactgatttgaaagactgagataaaagtatttgtttcgttcaacagtgccactggtatttactaacaaaatgaaaagtccaccttgtcttctctcagaaaacctttgttgttcattgtttggccaatgaatcttcaaaaacttgcacaaacagaaaagttggaaaaggataatacagactgcactaaatgttttcctctgttttacaaactgcttggcagccccaggtgaagcatcaaggattgtttggtattaaaatttgtgttcacgggatgcaccaaagtgtgtaccccgtaagcatgaaaccagtgnnnnnnnnnnnnnnnnnagttcttattccggagcctcaaacaagcattataccttctgtgattatgatttcctctcctataattatttctgtagcactccacactgatctttggaaacttgccccttatttnnnnnnnnnnnnnnnnnnnnngagtttgttactctattgtatgttacaaaagaactatagactgtggaatgcagtttaaagatgacatatgccaacaaatgccttgtattatatggcactgccgtaattcaaatttgtttttattttggaaataaaagttcactgtacttttt

SEQ ID NO: 360629 - DNA, 356 bp, Homo Sapiens
gatcctctccctgggataagcactcccagccccgtttatcagaaacacaggcaaggaaattggaactgccacccagcccagcatggtggctcaattggttggttgcgttgtcagttgtctcttcgttttgttaaggtttttaataagtacgtttggcataatgtcttttaatgggtttgtaatatttgtaacggttttagcagcctataacttttcagctggtgcttttacttagggaaaaaaacaatttgtaaatacagaacattgtttaaaagacataaccatagaacatagcttcctgtttgtggattttgtttcctatatattcaaagtaaaatgacttacaggagccaaaa

SEQ ID NO: 360630 - DNA, 882 bp, Homo Sapiens
aggagccagggacccagccctagcaacatcagagaagactccattgatggaccaaaagcttagcccgtgctcaagggcataatggggccacgcagtgggcatccacagttagcaagggtagttccggaacggttctagtcacctgtgattggatgctggaggccgcctgatagacatgctggcgctggatgagaaacccactgagcaggtaacccagggaagagaacggaagccaggcgctggaggtccagcggcattgggagtggggctcactggcttcttgtgcggatgacctggaaaatggacctcgctcgctgttccctggcattgaccgctctttggaagaagtggatttggagagagccttctagaatgacagactgtgcgaggaagcaggggcaggggtttccagcccgggctgtgcgaggcatcctggggctggcagcaccttcccggctcaccagtgccacctgcgggggagggacggggcaggcaggagtctgggaggcgggtccgctcctcttgtctgcggcatctgtgctctccgagagaaaaccaaggtgtgtcaaatgacgtcaagtctctatttaaaaataattttgtgttttctaaatggaaaaagtgatagctttggtgattttgtaaaagtcataaatgcttattgtaaaaaatacaggaaaccacccctcaccctgtccacttgggtgatcattccagacccctccccaaacatgcatatgtacctgtccgtcagtgtgtggatgtatgtttacagttctacataaatgggatcattttatacatggtgctctggaacccacatttttcatgcagtcatttgcagtgaattatttattgtgataataaatagcattagaatac

SEQ ID NO: 360631 - DNA, 399 bp, Homo Sapiens
  misc_feature (32)..(32): n is a, c, g, or t
  misc_feature (192)..(255): n is a, c, g, or t
gtccgcggagagcgctgaaatgcctgtccttnaggccgggcgagcgggagtctgacgcgatttgctgagctctgtcctccgacggctgcctcgcggccttgagggcctccgccgcctgttcgctgctgctccctcgagcggagcctgcgtcaggttccctctgcatccccctgcggggggacccctgctccnnnnnnnnnnnnnnnnnnnnnnnnnnnnnnnnnnnnnnnnnnnnnnnnnnnnnnnnnnnnnnnngccgggcccgaggagcggcggaggccggggcggcgccgccgccacggtcgcggacgagtgcggcgccggtgagcggtgcccagaggcagcggcggcagatctatccatactaatggaaatgtaactggaactgactctgatgat

SEQ ID NO: 360632 - DNA, 723 bp, Homo Sapiens
  misc_feature (560)..(560): n is a, c, g, or t
ggcttggacatggaagataagactttagcttttgaacgtggatatgagttcctgggggttgcttttagaggacttccaaaggtctgcttatacccagcagtttctgctgtatatggcaacacagaagtgactttggtttaccttggaaaacctttggacggatgacagtggctttcttgtgatgacagacagaatggaggagagatctgcttatgggaagtagaaccatgaagtgactgtcacacatgcatgtccaagaaacatcctgaaaacacatgaagtcgtaaactggagaagcagctctacagcagagattatcttcgtgtttcctctttctactgggccagaaaaatcctcagggttgcagttggttgagtgggcagttgacatatgcatgttgcacccgatgttgtctctaagttagcaatgtgttatttccagctttaaaggtgagattgtagagatgctgtcaaagggataaggaaatagcaagatttttaagtagtgtgtttgtgaagactgatccccattttacaactgcctgttcgttctccagtccntttttttccagccagcttgactattagaaaagtatgaaactggttgggttttatttaatatttttaatatattgagaagcatggtctgcctggactgcacttctctaaaagtgagatataaaattgtgcagctattttaaaagttgtatataactatgtgtgt

SEQ ID NO: 360633 - DNA, 1224 bp, Homo Sapiens
  misc_feature (662)..(672): n is a, c, g, or t
  misc_feature (688)..(924): n is a, c, g, or t
acccctgccccttttccttccaggttctgttactcacagaagtgtttctggtgggctctgcgggagaagacactaagggccccacaggcttgtttcatggtgttgcaagccaagctggcccctgcctgttcctgtagctatgggccccaggtcaagccgtggccccacctaccagaactgtgctctgctggcagctgtgcttttgccaaacccagggcctcagcgaccatgacttctgctaaaaagcaatcatgagtgcgtggctggggacagacctctctgaagtgtctcctgttgtgaggggctcactttggagccactgaagagccgactgtgccacccacttgcgagcctcagtcccttccaagctgcactggtcattgggaattgtgtaaacacctctggggataagctgaggtgactaaatgatatatttatattgtaagattaaactgactttcttggccttaacaaggtccttatataaaatttccaccccgcccctccatagttcaggatagaggctcccacagcagccggtaaggaagtgggtggcaggtgtgaggggatgctgtgttggggggttgtttccaagtccctgcaaagaagcaccactctagactggcaagggcctccacagtgtggaggtcccattttattannnnnnnnnnncgagacactctgtcannnnnnnnnnnnnnnnnnnnnnnnnnnnnnnnnnnnnnnnnnnnnnnnnnnnnnnnnnnnnnnnnnnnnnnnnnnnnnnnnnnnnnnnnnnnnnnnnnnnnnnnnnnnnnnnnnnnnnnnnnnnnnnnnnnnnnnnnnnnnnnnnnnnnnnnnnnnnnnnnnnnnnnnnnnnnnnnnnnnnnnnnnnnnnnnnnnnnnnnnnnnnnnnnnnnnnnnnnnnnnnnnnnnnnnnnnnnnatgagcccacttgtgcccggccccattttatttagttttatttgagaccagagtctcgttctgtcactttggctgaggtgggtggcgcatctcggtccatgagtctgctccgggtcacccatttctgctcagctcttgagttagtggactacggggcgcatagctggtattttgggtttaaggaaggggtcctgttccggggtcttctggcggattgccgtcgcccattgtggtacgttggccggcgaccttttgtttatcccaggcccccgaaggggacctggggtgctggcgtctgaa

SEQ ID NO: 360634 - DNA, 341 bp, Homo Sapiens
  misc_feature (154)..(166): n is a, c, g, or t
  misc_feature (266)..(279): n is a, c, g, or t
ggatgaaatttcaacttttcctttcatacgtctttattacccaagtcttctcccgtccattccagtcaaatctgggctcactcaccccagcgagctctcaaatccctctccaactgcctaaggccctttgtgtaaggtgtcttaatactgtccnnnnnnnnnnnnnaacagtgttttgtagatttcagatgactatgcagaggcctgggggacccctggctctgggccgggcctggggctccgaaattccaaggcccagacttgcnnnnnnnnnnnnnntatccagaattggttgtaaatactttgcatattgtctgattaaacacaaacagacctcagaa

SEQ ID NO: 360635 - DNA, 1323 bp, Homo Sapiens
  misc_feature (1052)..(1052): n is a, c, g, or t
  misc_feature (1064)..(1065): n is a, c, g, or t
gggtacgaacataggctaggtcgaggctgggtgttaattcggcacgaggcctggtgccagtgtgacgagtaccgcctggatggccacaccatctcagacctgagccggagcagccggggcgagctgatccccatctcccccagcactgaagtcgggggctctggcattggcacaccgccctctgtgctcaagcggcagaggaagaggcgtgtggctctgtcccctgtcactgagaatagcaccagtctgtccttcctggattcctgtaacagcctcacgcccaagagcacacctgttaagaccctgcccttctcgccctcccagtttctgaacttctggaacaaacaggacacattggagctggagagcccctcgctgacatccaccccagtgtgcagccagaaggtggtggtcaccacaccactgcaccgggacaagacacccctgcaccagaaacatgctgcgtttgtaaccccagatcagaagtactccatggacaacactccccacacgccaaccccgttcaagaacgccctggagaagtacggacccctgaagcccctgccacagaccccgcacctggaggaggacttgaaggaggtgctgcgttctgaggctggcatcgaactcatcatcgaggacgacatcaggcccgagaagcagaagaggaagcctgggctgcggcggagccccatcaagaaagtccggaagtctctggctcttgacattgtggatgaggatgtgaagctgatgatgtccacactgcccaagtctctatccttgccgacaactgccccttcaaactcttccagcctcaccctgtcaggtatcaaagaagacaacagcttgctcaaccagggcttcttgcaggccaagcccgagaaggcagcagtggcccagaagccccgaagccacttcacgacacctgcccctatgtccagtgcctggaagacggtggcctgcggggggaccagggaccagcttttcatgcaggagaaagcccggcagctcctgggccgcctgaagcccagccacacatctcggaccctcantcttgtcctganngtgttgagggtgtcacgagcccattctcatgtttacaggggttgtggggggcagaagggggtctgttgaaatctgagagtcattcagggtgaccctcctgcaggggagcccttctgccaccagcccctccccaatttttttaggggtggaaggcaaccaggggccatggtgcctgcccctggttgcccgaagcccccagctggtggggccgggcctccctgggtggcttaaacaacaaaaggtttccaccttttccac

SEQ ID NO: 360636 - DNA, 2933 bp, Homo Sapiens
  misc_feature (2333)..(2397): n is a, c, g, or t
  misc_feature (2433)..(2476): n is a, c, g, or t
gagcgaggcctgggtggcgaattcggcacgaggaatgccagtacaggtggctgagagttttgaatccagaccttgtcaaggggccatggaccaaagaggaagaccaaaaagtcatcgagctggttaagaagtatggcacaaagcagtggacactgattgccaagcacctgaagggccggctggggaagcagtgccgtgaacgctggcacaaccacctcaaccctgaggtgaagaagtcttgctggaccgaggaggaggaccgcatcatctgcgaggcccacaaggtgctgggcaaccgctgggccgagatcgccaagatgttgccagggaggacagacaatgctgtgaagaatcactggaactctaccatcaaaaggaaggtggacacaggaggcttcttgagcgagtccaaagactgcaagcccccagtgtacttgctgctggagctcgaggacaaggacggcctccagagtgcccagcccacggaaggccagggaagtcttctgaccaactggccctccgtccctcctaccataaaggaggaggaaaacagtgaggaggaacttgcagcagccaccacatcgaaggaacaggagcccatcggtacagatctggacgcagtgcgaacaccagagcccttggaggaattcccgaagcgtgaggaccaggaaggctccccaccagaaacgagcctgccttacaagtgggtggtggaggcagctaacctcctcatccccgctgtgggttctagcctctctgaagccctggacttgatcgagtcggaccctgatgcttggtgtgacctgagtaaatttgacctccctgaggaaccatctgcagaggacagtatcaacaacagcctagtgcagctgcaagcgtcacatcagcagcaagtcctgccaccccgccagccttccgccctggtgcccagtgtgaccgagtaccgcctggatggccacaccatctcagacctgagccggagcagccggggcgagctgatccccatctcccccagcactgaagtcgggggctctggcattggcacaccgccctctgtgctcaagcggcagaggaagaggcgtgtggctctgtcccctgtcactgagaatagcaccagtctgtccttcctggattcctgtaacagcctcacgcccaagagcacacctgttaagaccctgcccttctcgccctcccagtttctgaacttctggaacaaacaggacacattggagctggagagcccctcgctgacatccaccccagtgtgcagccagaaggtggtggtcaccacaccactgcaccgggacaagacacccctgcaccagaaacatgctgcgtttgtaaccccagatcagaagtactccatggacaacactccccacacgccaaccccgttcaagaacgccctggagaagtacggacccctgaagcccctgccacagaccccgcacctggaggaggacttgaaggaggtgctgcgttctgaggctggcatcgaactcatcatcgaggacgacatcaggcccgagaagcagaagaggaagcctgggctgcggcggagccccatcaagaaagtccggaagtctctggctcttgacattgtggatgaggatgtgaagctgatgatgtccacactgcccaagtctctatccttgccgacaactgccccttcaaactcttccagcctcaccctgtcaggtatcaaagaagacaacagcttgctcaaccagggcttcttgcaggccaagcccgagaaggcagcagtggcccagaagccccgaagccacttcacgacacctgcccctatgtccagtgcctggaagacggtggcctgcggggggaccagggaccagcttttcatgcaggagaaagcccggcagctcctgggccgcctgaagcccagccacacatctcggaccctcatcttgtcctgaggtgttgagggtgtcacgagcccattctcatgtttacaggggttgtgggggcagagggggtctgtgaatctgagagtcattcaggtgacctcctgcagggagccttctgccaccagcccctccccagactctcaggtggaggcaacagggccatgtgctgccctgttgccgagcccagctgtgggcggctcctggtgctaacaacaaagttccacttccaggtctgcctggttccctccccaaggccacagggagctccgtcagcttctcccaagcccacgtcaggcctggcctcatctcagaccctgcttaggatgggggatgtggccaggggtgctcctgtgctcaccctctcttggtgcatttttttggaagaataaaattgcctctctctttggnnnnnnnnnnnnnnnnnnnnnnnnnnnnnnnnnnnnnnnnnnnnnnnnnnnnnnnnnnnnnnnnngagagggggggccgcgcgcacaagaagatatctccnnnnnnnnnnnnnnnnnnnnnnnnnnnnnnnnnnnnnnnnnnnnatatttgcgagcacaagaggggggccccactaaaagggagacgcgcctctcactaaatacgagcagacagacggaggtgcggagccgccagtttaacacacacgcgccgtgacaggggggcgacaaacagcggccgaaagctgggaaccacccatgtgaggaaagaacaccccataaacacgcggaggggggggagggaacccaccacatgggtggggacacacaaccacctccccctctaccgaaggaaatatatatctcacacggcccccctccgcgggcggcgaacactatcacaccaacccctctagcacacgacgggatctcgaccgcgcgggggggtcaacccccaactcccccgccatatcttgttgcccgcggggccagccaagcacagaaagtggtcggcgcccccaccgcggggggcttacatcacccacggacaacccatatcccg

SEQ ID NO: 360637 - DNA, 1069 bp, Homo Sapiens
  misc_feature (64)..(73): n is a, c, g, or t
  misc_feature (91)..(118): n is a, c, g, or t
aggcccctgggggtccccaaaattctggtgacccgaagggggccccccggttccctttgaaatnnnnnnnnnntgcccgacaaattccctnnnnnnnnnnnnnnnnnnnnnnnnnnnnttaagggtaaggaagggaccggaagggcccaagttggtcaagaaggatttccccggggcccttcccggggggctgggccactctggaaggcccggcccttgtccttggagcccccagcagcaaagtacactggggggcttgcagtcttgggactcgctcaaagaagcctccctgggtccacccttccttttgatgggaagagttccagggattcttcacagcattgtctgtcctccctggcaacatcttgggcgatctcggccccagcggttgcccagcaccttgtgggcctcgcagatgatgcggtcctcctcctcggtccagcaagacttcttcacctcagggttgaggtggttgtgccagcgttcacggcactgcttccccagccggcccttcaggtgcttggcaatcagtgtccactgctttgtgccatacttcttaaccagctcgatgactttttggtcttcctctttggtccatggccccttgacaaggtctggattcaaaactctcagccacctgtactggcattgctggtcagtgcggttagggaagtggctggccaggaacttccagtcctgctgtccaaactgcctcaccagggccctcagctgctcatcctcctcatgggtccatttgaccttgcacttgctatccctctgctccggcacatctgaatctgtgtcctggtagtgcagctcatccagatcctcgcagcgcgtccgccgagacatccccccggcccggaccgcgccgcgctcgcccgcccgccggcagagcccggagcgggagccgggccggggtcaggacccgggctgctccggccgctccgggccccgggccgcgctcgaaggcgtcagcgtgtcagcaggtcccgcgctcctcgctcgcaggaactgcagtcgccgccggcgcgggttgaagcctcgtgccgaattcgccacccaggcc

SEQ ID NO: 360638 - DNA, 460 bp, Homo Sapiens
  misc_feature (11)..(11): n is a, c, g, or t
tcccttcctcnccatatgccacccttcccccaaagctgatagggcagaggtgcactttatgaaactggcacttgactgaacagaaggaaacagctgtaatcagaattctaaacgcacaactcgggagctgtgcacggcttctcaagtgattcagttgcagaaccaagagcaaaactcgcctgtttttgtcctcaatggcacccatgagctttccaatagtatagttttctttctttccttgtcctggttgaaggtaacgtgttcctagaaaagaaaatgctgcataggaaaactgagatgccttttattccaacgtgtttgatccctgtcactcattattctgtactttttattgtacattctattcctgtaattattgtgccctttaagtgttgtaaaatcgttttggaatttgtgcctgctagttatgcaataaacaggctctacaagtgaaaaaaaa

SEQ ID NO: 360639 - DNA, 510 bp, Homo Sapiens
  misc_feature (78)..(78): n is a, c, g, or t
  misc_feature (109)..(109): n is a, c, g, or t
gaaccagagggaaacaagcggtcccccccaagccccttcaacagaaaccgtcacctgcccgggaatgccaaaataggnccctatttggcccaaagaacagtgaatgggnccccaaagatcaaacacagcatttccatgtaaatccaggaattcctaaacgccacaacctcgggaagctgtgcacggcttcctcaagtgattcaagttgcagaacccaagagcaaaactcgccctgtttttgtccctcaatggcaccccatgagctttcccaatagtatagttttctttctttccttgtccctggttgaaggtaacgtgttccctagaaaagaaaatgctgcataggaaaactgagatgccttttattccaacgtgtttgatccctgtcactcattattctgtactttttattgtacattctattcctgtaattattgtgccctttaagtgttgtaaaatcgttttggaatttgtgcctgctagttatgcaataaacaggctctacaagtg

SEQ ID NO: 360640 - DNA, 512 bp, Homo Sapiens
  misc_feature (13)..(13): n is a, c, g, or t
  misc_feature (42)..(42): n is a, c, g, or t
  misc_feature (51)..(51): n is a, c, g, or t
ccccagccagctnaatcccaaggtagagaatgcccccggaanaaatcccanaggcagccctttgggtcctgtgctgtcaaatgaagaatgccccaacctgtatgtcaaaccccccaaaggccccctaacccgcaacaacttgggtagggaaagattcatccccagtggtttggtgacagcaaagatgagccccacagagaagcaggctcacttccctgcacagctgtctctgtcggagagcaagtctgttttgggaactagaacgcaattgtgaaattataagaccagtggatttttttacctggcacatgggttggtgttgaatgaagtgttcagatggataaggatcaatctcatattcattccctgggatgtttagttaccagttttcccaaagtgttctggtagcatctaccatatttcatcaaatctgtgattcctttgattattatatgaaccattattttatgtatcattaagaaaaaatactgccaattaaactctgtcatatc

SEQ ID NO: 360641 - DNA, 176 bp, Homo Sapiens
ggcgcttctaaggcccggtctagggtgtcgctctgctggcctggccggcaaccccagttctgctcctctccaggcacccttctttcctcttccccttgcccttgccctgacctcccagccctatggatgtggggtccccatcatcccagctgctcccaaataaactccagaagggg

SEQ ID NO: 360642 - DNA, 1042 bp, Homo Sapiens
atgcttgcttacctttttccttatccttctcctcttgtctttctactttcctccacacccgtttatctctcttcttttctgtgatgtcttgctgtcacaccccttagcgggtctctttgctcttatgtatcttctcgtccatcattgtggcacaagcataccggtcaacttatctttctactatgcatctccagtcggtattccaatgatgtagattctgttcctagtaactatatttgctcggtgactctacttcggtatgtgtgtttacaaatgtacagtacatatcagcaagtatttttgcttcacgtttactttcttcgattgtagtgctttggtattcctaccagcaaccccaccttcccctactagtatgtacagtgttctgtctccattcgaaatctacaatgtaattatgagtgcttattgtatggggtttggaaccaaaggatgaatgatagcattcagagacttaatatttgaaaaaggaatagtcagtattttatattttattacaggtactgatatttataaatttaataaactgtaccatgctgctgcatgttttcaagtacatgttgaacagtaaggattggggagttgttttttaatggtcacctaaagcagccgctaaagaaaggttgaaccaaaattttgcaccgggtcaaaccctcatgcatttaccatttgcagatattttcccatcattattaaaaaacaggaacttttaggccctgaagatccatgtggaccagagcaaattaaagttcagtttgtgtcacaattcattgccagacttcattggaatgctttgtttgatgatgtatgttcattctcagctttattttcagatgcttaactgggcaatgaagtctaacttcaggttgaactttctcatgtttaatctcaggctaaatgtaaatgatatttgtaaagtttgaataaaattctgtttactcattttgagttagtatgaaaaaaagtgattgtatgtttaagaattgaaattgttcattttgtgataaatgattaattccaaaaa

SEQ ID NO: 360643 - DNA, 536 bp, Homo Sapiens
cctctgtactaaaatctatttcagggaatgttctgtctagtgatttgctcaccatttgatatataatgaattataggacaagtataagctgatctgctatagctgtccatcagagagaatacacgtggctataacatctataacaaaacgacgattcctctacaagaggctgtttctcactgctaacgttggtgtttctggcgtgggaagaaaatgcacaggcatgcatggcatgcacgttcagacagctgcattgtaagagttctgtcatgcagtctgaaaagggaagaaacaggatggctttctgtagccacacctgtgaggcgtgatgattgttgtattattagattactgatttttcttttctgaaaatacatttgagttttaatcacatctgtggaagctgtaacttttaaggtagtcaatttcatgtcttgttcaacgatgtaagcagaaactgaattgccctaattttgccaactggccattattgggattattgtttaaatttttggtaaaggaagtaatctcctttc

SEQ ID NO: 360644 - DNA, 1132 bp, Homo Sapiens
  misc_feature (878)..(878): n is a, c, g, or t
  misc_feature (1004)..(1015): n is a, c, g, or t
  misc_feature (1023)..(1023): n is a, c, g, or t
  misc_feature (1038)..(1038): n is a, c, g, or t
ccaagctttgaatagcctgctgtgttcatggaggctcatactggcgatctctagtggctggctaaagcttgaattgcaaaagatctaatttctggtctaatgtatatatgccttaaatatagttgcgttcaaacgtgggagctgcaggtgcaacttgattttatgacaaatggctgccacataatttgcacaagcagtgcttcgtcaagggcagctaaatcaggcgagctttcaatcaaaataaatgtactactaaaccctacttagcggctaactagcccaagagcagacagcccacggacgggactgcaagtcgggaagcgcgggcggaagctgttgcaggcgcccacctggtggctccatcggccgcgttcatcagtcagcacgacccgacctcagtggcgtcctcacaacacagaccggaccttgggtcttaccccggcacctgagaaccacttccggtgagtagcttctacttccggagacgatgactcccccgcgtcccagaccggaagaagcccggcggagaccggcctcgctcggccacttccggcaagggcggagccggccagtggtgcgcgagcgcagataactcccctggagaggcgggatgttcaactcccacccccggtcccttgggcggccgtgggtcccccttcgaagcggaggaatggcccaaccctcgcccgcaccttcgagcccctttagggtgccgtttaagaacagtgggcgtggcctttacgtaaatcttcgagatgggaacctccagaatttgtctcaattgtctaaaaggtaatgagcgtcagcgacattcaagggcactttgggctaaaaaagaaagtgcttgtacacggatggaaatattctagaagaacatnaaaggaatttcctcttaggaggttagggaaatgagcacgaagtatgttttggtgcagttttttgttcaacccaatgcgtattttcatattgagaggcaatataaatggagcgaaagtatcttgagnnnnnnnnnnnnctaccagnacttgccgttgctgnaaagtaatattttctctttcgagagttttcatggccttttaaattacacccccacctccacaggcaaataaatttgttttggaatgcataccac

SEQ ID NO: 360645 - DNA, 667 bp, Homo Sapiens
  misc_feature (217)..(217): n is a, c, g, or t
  misc_feature (228)..(228): n is a, c, g, or t
  misc_feature (614)..(614): n is a, c, g, or t
ccccaatggaatccattcttcctccaccattctccctggcagagggaagtgactacacccctatgtgtgtggacatactgacgctcctccatgaagcagcaaagttctgttgtttcaggagactgtgggccttgaggatgtggtagtgacctcaccagaggagttggcaattcctaagtgctgcctggaggcctctacagagacataatgttggaanaacttctgccnacatgccagtgctgggtaagacccctctgtccccacccagtgcccttgaggttatgggtgttggtaggtctgtggcctccatttccatgacgatggtgttaaggactgcatgtttgtgtccccccccaaagtttatatgttgaaaccctgacccccaggagggtggtattaggaggtggggcctttgggaggtgactaggcttaggtgagatcgtgagggtggggctcgccgatgagatcgagtccttataagaaaaggaaggaactagagcgaggtcactttgtgctgtgtgagcatacaagaaaactgccatcttcaagctgggtgcaagtgtcacgcctgtaatcccagcactggaaggccaaggcattaggattgcatgagncccaggagttcgagaccagcctaggcatgataagaccttattgctaaaaaaaa

SEQ ID NO: 360646 - DNA, 1098 bp, Homo Sapiens
cgaccagattggcatcatcacgccctacgagggccagcgctcctacctgctgcagtacatgcagttcagcggctacctgcacaccaagctctatccaggaggtggagatcgccagtgtggacgcctttcagggacgcgagaaggacttcatcatcctgtcctgtgtgcgggccaacgagcaccaaggcattggctttttaaatgaccccaggcgtctgaacgtggccctgaccagagcaaggtatggcgtcatcattgtgggcaacccgaaggcactatcaaagcagccgctctggaaccacctgctgaactactataaggagcagaaggtgctggtggaggggccgctcaacaacctgcgtgagagcctcatgcagttcagcaagccacggaagctggtcaacactatcaacccgggagcccgcttcatgaccacagccatgtatgatgcccgggaggccatcatcccaggctccgtctatgatcggagcagccagggccggccttccagcatgtacttccagacccatgaccagattggcatgatcagtgccggccctagccacgtggctgccatgaacattcccatccccttcaacctggtcatgccacccatgccaccgcctggctattttggacaagccaacgggcctgctgcagggcgaggcaccccgaaaggcaagactggtcgtgggggacgccagaagaaccgctttgggcttcctggacccagccagactaacctccccaacagccaagccagccaggatgtggcgtcacagcccttctctcagggcgccctgacgcagggctacatctccatgagccagccttcccagatgagccagcccggcctctcccagccggagctgtcccaggacagttaccttggtgacgagtttaaatcacaaatcgacgtggcgctctcacaggactccacgtaccagggagagcgggcttaccagcatggcggggtgacggggctgtcccagtattaaaaggtggcggcggaagagctaagcaacgtggcttagtccatcagcatcttattctgggtaataaaaaataaaaataaacggatacctgttttccactgct

SEQ ID NO: 360647 - DNA, 558 bp, Homo Sapiens
  misc_feature (138)..(138): n is a, c, g, or t
ggaaacataaaattcaaagaattcccaaacttgagcttcctgagcctcagtttttgcatctgtcaaatgggtatggggagaccctttgcctaatgttgagagaatccaagcctgagcagggctggtctactgtggacncttagttgtggaccccaacaggccaaagcccttgcctgctgagggctgcccccaggaggcctcacacattcatccggcctcccaggaaacccctgagatgtgctgggcttttgccgtggaacggtgtcggtgagcatgtggccagtagccagagtcttcaacataggtgggaggtctgaaattcgtgcgagaatgaaccaagggtgtggctgtatccttcatggtgagcttggggcctgggcagccttccctctgctgagtcctttggtcaaatgtcatggtgttctgaaccagcactgcagatagaagtataatgtaagtcacacacgtacttctttaaaaagatatgttcttcagtgactattagacaaacagataaatgaaggtaaagggaaaaaatggcaactttagcttttttcc

SEQ ID NO: 360648 - DNA, 366 bp, Homo Sapiens
taccgcagggcgagcacacaccctggaggagcccagatggccttgtgctgagtgtggcctcagctcccattgcctcacggggcctgtctgctaacaggtctgggttttgtgcacagaacggtgctgctaggtgggagatgaagtcagcacctgctggggcgagcacggcttcccaaagcaggaaatcctggagaaatcgagccgtggtctgatcaggccaagaggttgcacagggcatgatactgcaccctgcctgacccagctgggctcacaggtcaggggagagttggggcaggtgaatgtcagcatcaggcttctgttttaaacttttaaaaaaatacactactttggcttccttttatttct

SEQ ID NO: 360649 - DNA, 427 bp, Homo Sapiens
actgcttttgtgtttattttaatcagcagagcacagagacacataaaaactctgggaaatgactaggataaaaatatcagtatgtatctgttttagatattttggagttttgctttttttatgccttgaatattttatttcaaaaagtatctgaagcaaattctcagactgaactacttcttagacctcactgtaagaatattttattcaatgtctcatttatgatagatttgcaagctgctcatttttgaacagctttttgcatgggataggagcatgtctattctaacacatcagcttattcaaaagcaagaattttaaaaataagataaatgtaaagttgttttataaacgatcctgttaattaaaccacagacaccatatatccttctgcatcctttggccaataaaagttgctggagaaaaa

SEQ ID NO: 360650 - DNA, 847 bp, Homo Sapiens
tgggagcctgtcatcacctgaaagtaacagaagaaagctgtcaggcagaggaaagtttcaacaggcacttggtgagaatgggaagcatccatgtcatagggaaatcacggggacagaggaggaattcacgggatcagagcactgagaaactccagaggcttctggttcaccgccctgattccacagatgtgggtcagaggcagagatggaagttggaatggacaagcctgccctctcctcagctctccatggctctgtcctcaggctgtttctgcaatttgacatgaggcctggccccagggaaaccagtggggcctcatctcctccctgtgctgctctgaggtggagccttctcagggtcagtccagctctggagcccctctccagctcggtcaccaaagctgtctggtcccagggcggtgctgagtgacaggcacgccagccaatccaatcggcaatttcatacccaatgcatgtgactgataaagagataacaccctgtctccaagacacaggctttacataaacagctttaatgacttcttcacttagagacaagactccttagtggtggaacctcaggcatccgtgcaggatgtaagaaagctcccgtatatacatgaactgagaagtgtgtagaagaataaatactgtaataggtaataaaatgtatgtatttttatttatgcgctactttggcctttctccctctctggggatatacccatacataccaaaatggatttccttctatgggaaacctggaaagatgtaatattcctttacatatgaaaatttaaattaaatgaattttttttccggatcctattgaaccccccaaattata

SEQ ID NO: 360651 - DNA, 334 bp, Homo Sapiens
ctctctctgtcctgcaggaacttccttccccgggacgcccgccctgcagtctgtgtggcaagagatcccttatcaaccagagcagcccagggtcagcacccagcccgatgcacacgcccagaaacaaagtaccagagctgctcgcctcaggattttctggaggaagaagaggaagaagcaagcatttgagagatgacaactccatatgcagagatccaatatgactccagcctacacttctcaccaggccccaaagttttgatggttacaaatattgtcctccaatgtgacatattttataatgtattcaaaatataattattgacaaacggtg

SEQ ID NO: 360652 - DNA, 378 bp, Homo Sapiens
  misc_feature (31)..(31): n is a, c, g, or t
  misc_feature (44)..(44): n is a, c, g, or t
agcccctgctgacattggatttacatgcagnttttatgtccagncccttaaaatcacaaatatatggagagaaaaatggtatagacaatagaatattctactgggcctataacgggtccattaagtgcttatttaaattgtaaacaatcaaatttaatttggtgtttataaaaaattatgtatgtgaacatacattctgttatctatatgtgtctgtaatccattagcttatttacaatgatcaaagaatagaagtgtgaataaatcagaatggcacatgattgaaaatgctgtgtaactgaagatgcatttgtgtagtcttgaatttcatttgaaacaaaattgttagtctgtatcttgaagcacattgctactttg

SEQ ID NO: 360653 - DNA, 433 bp, Homo Sapiens
  misc_feature (32)..(32): n is a, c, g, or t
  misc_feature (35)..(35): n is a, c, g, or t
  misc_feature (37)..(37): n is a, c, g, or t
  misc_feature (93)..(93): n is a, c, g, or t
  misc_feature (122)..(122): n is a, c, g, or t
  misc_feature (221)..(331): n is a, c, g, or t
ctggggccaacacaagctcttaagccggcggnttnangcggcccaaaaggacccagggtgctcagccctggttgtgaatagcgccctgtgtgnaaaggagctgcttgtaggcagtgaggagncggacagcatcaccttgggccggtatctccggcagctggcacgccatcggaacttcctgtggttcgtgagcatggacctggtgcaggtgcagtgctcannnnnnnnnnnnnnnnnnnnnnnnnnnnnnnnnnnnnnnnnnnnnnnnnnnnnnnnnnnnnnnnnnnnnnnnnnnnnnnnnnnnnnnnnnnnnnnnnnnnnnnnnnnnnnngagaaaggctccatctctaaaaaaagaagagctaagtgctgtacctaaaacatgcagtatataaactggctgaacttagaaataaactgttttcatgttatg

SEQ ID NO: 360654 - DNA, 786 bp, Homo Sapiens
  misc_feature (339)..(358): n is a, c, g, or t
cgccgccaaaagagatggtccggtccggaatttcgggattgggcatcgtagatattctacacaaactgagtcagtcaccagattcaaacctttgtgacaaggcaaagatggcactgcagcagtacctggcatgatgggagtgcccctgggcacctgcgagcatcccacctccttgtttaaggaagtacaggaaccagcctcatttgattccttctatttgcacaagtcaccttggactgcagggagctgttttgcaaaagcagtttagtaggcttagatctcaaattcatcttgagaacatttttttgaggtagtaatttcctcagaagactcttgtgnnnnnnnnnnnnnnnnnnnnctgagctactcggactctttattagaacaatcaatcattttcctttggacctacaatttttgcctatgctgcagccactttgtgagtgagaatgaatatgtctgtgtgaacacacaggcatgcgtgtgtatgtgcacgtacatgggccagaatgaatggatgtgtgtgtgtgagggatacctcagatttttcttttcttattttgtgtgaaaatctcttttctacagattttccagggtttaagcattgcttgctgtataaaaaactttactgaattatatacagtttgaatgaaatgttattttaaaaacaaaacaattgttaagtgttccataaaggttatgttgaattttggtcagatgaatatttgtaagtaaaaaatatatgcatttctgaaccttcaacttacatagaattttcctttatat

SEQ ID NO: 360655 - DNA, 627 bp, Homo Sapiens
  misc_feature (19)..(19): n is a, c, g, or t
  misc_feature (23)..(23): n is a, c, g, or t
ctaaattcccccagagcanggtncaccagccttgaaattccccagcttctatccaaccccaaggattcccttttcaactttgcccaagaagtatacagaatagtatttccttctctaaaaatgcttttaaatgcacagatcatgacctgaagcaattagttttgaaatgtcctgcccttttatattattctgttccagttttagaagagagaatgcaaggattattgagagaaggaatttccatagctcagataaggagagacgccaatggttcttgaattaacaccacagatagtacagtacaggataaggaaactgaattcctcaggctacagaataaaggatggacatctagcaaatctaaatggatcaaaaaaagagtttgaagctaattttggcaaaattcaggccaaaaaagtaaggccattatttaaccctgtggcaccattaaatgttgaagaatgacatactgactgttgttgcttctttctagcagtgcagggtgaaactaactagcaaagacaaaaattcaggcagtttgtagacaccagtaattttaagaacctgcttagcttctgtgttgtatttaagttatctctaaatagataaattctgactcgtgccata

SEQ ID NO: 360656 - DNA, 1687 bp, Homo Sapiens
ccccaaacctgaattgaaaatgggggagggccggaccaccccttttttgaacccacccaggcagcagggggttcaggccccaacccaatggaggatggccccggaaggaggcccaaggttgtatttccagttcccccgttgccccgggacagccgccctggcccaccagcccccctttgaaggatgaagtcccccgaggccaaagtttcacgcccccttcttcttttttcctccagctcctcccctgggtagccagtccaaggagggctcaaagacttcgggggtatggaggtcccccaaaactgtcatgggagtcttcttccatctccggggtcgtaggggagctgagggcaccctgagaggaggggtccagcttcgccatgccaaccgtccacaccatggcagatgagtatatcagggcagggaatatgggctcatttctctcctgggcagtttctaccagcattcacacaggccatttgggacacagcaaagccacgagatcatacacagagatggcgcccaggatgacccacgcggaccactctgggaggaacttgatgaacaataggaccatgagcgcactgatcatgatgaggtaggcctgctgcagcaccagagggcccttccagtggatgcacaccatgcccactgccccgaagttcccagacagtcagcaagagggtggggtagtccatggccacattgtaggtcttgagcacttccccaaggtagatataggtgaagaggaacagcagcatcagtgaagacatgatcaaccagccatggatgaacttgtagcagcggtacttgtagagcaccaccaagaagatggtcataaccacgatgacgctgatcatgatgagggtgttcagcacggagttgaggaggcgctggcccaccgagggtgtgtcctcagtgaatggcgtgtagatgagctgtccattcttctctgtgtagaagcgcacagacttgatggtggctaccaccacgatcatgcacagagtgacaggcacaaacagcatgatcacgtgcttcgctccgtatttgagggtcagctcattcctccaggcctggcggccgcccgggaaccccactacagacatagcggtcagggtcctcctcaccgtcctcctcgttctcctggcttctccactgggcagtgttctctccatcctctgggccctgcctgccctcctggcaggagcgcggcgtggggctctcggccgacattagggacgtccgctcatcacacacttcttcctcgctgtcagaggccatgaatgtgagcatagccctgcctctggaagcaccacgaacacttggggccgcagagaggtctgaatcccggacacttggtttcttcttctcagcaggctaaatgaatgatgctccctggctttcaaagagggcagcgctggtttttaacacgtcactttctatggtcacacagctccctcacatcactctcctgacgtctgagaagtcccacgtcctcgctgggcgaccttgggaaaagtcactttagctctgtggcctcagtttcttcatcagtaaaattcagaggggggactagcttctgtctcaggttccttcagctccaaaagcttgcttctggctgtctcctcactgctggaaatgcctgctccgccgccgcgctccagcggagtttacgcagctggctgag

SEQ ID NO: 360657 - DNA, 354 bp, Homo Sapiens
  misc_feature (283)..(283): n is a, c, g, or t
  misc_feature (308)..(308): n is a, c, g, or t
  misc_feature (312)..(312): n is a, c, g, or t
gcttcttgatctagccaggatgactcctggaacttttattaattttctacattgaacacagctgagcattactcacatctgacatctgttcaaacaataacatttctcccctcctggcagcaggctaaaagcaatatgggtaatagctaagtattatttgagacagggtcttgttatgttgcccaggctgatctcgaactcctgggctcaagtaatcctcccgcctcagtctccttagtggttgagtttacaggtgtgtgtcaccgcacccactttagctganttaaataaaagggtgtgtgaaaccncttnctgcctcttagtgtgaagagggttagtactctaggtttgggg

SEQ ID NO: 360658 - DNA, 1050 bp, Homo Sapiens
  misc_feature (369)..(369): n is a, c, g, or t
  misc_feature (405)..(430): n is a, c, g, or t
ggaggaaaccagggggatgggggccccccccaacagcaggggctacatggctaagcgggaatggtaccaatcgccggctttgagagttacccgtcaggaaatgaatcacaggaacgcccccgccacggggtgttccacagggacccctttaagcccgttgtgacacgggcagcctccaggtgggggcctcccatcccccaccaagcatgcaacactgggctggccacctctcaggccctggtagccagtcactcaaagagacgcgagttctcacaccgggccaaccgctggagaattggaggtgcggggaaaggaatcacagtcaatacctcagcgacaccttacaaccctgatattaacaaacagganaccatgacattgtggttaattgttcaataatttagnnnnnnnnnnnnnnnnnnnnnnnnnnagtagaagcaggaacagttgtcaatactaccttctgttggtcccctgttagacaacatacctttctttgaaatgtaaaatgtcaaatatataatcacacaactttagaaaaaacaaactttgacaacaccaacaacaaaagaatcccaaaataaaccagagatttcatgccatataaataaagtcagagcaaatctcgtgcccagggctggtggccccagttccaggggcggtgatgtccagagctggtgtggctctcggggatcctctggtaacaggcgtgatggaggccccgtctctcctttcccgacagagccaagtcttttccaagtccaccaagcaggttagtacagggttagggtgaacctggaagctaagatgaggaggaggagacacgtgtggtcacctggaatgtggacgttgaaggaaaccggggtttcaaaagtgcaggcggagccatcccgagggagccgggtggccccatgtggcctccatgacgttcccttgggttctggggacgcaggagccgaaggccaggcaccagctgctcccatcagctctatgggtctccagcacccctccagcttctggcaggcgtgtgaagaatgggccggcccaggg

SEQ ID NO: 360659 - DNA, 758 bp, Homo Sapiens
  misc_feature (642)..(670): n is a, c, g, or t
gtaacaaacttgtgttagacagttgaaactgttagagttgggggctctgctttttccccctggcaattttcccctggtataagatgtgctagattaatttcattgtgaggtggatgggggagtgaaattgtgaggtggatgggggagtgaaatctccatggttcctgctttgtgttcctctcccagctccatctctttccctagggaccaggcactcatatggcggggtggggtcctagcctcagtttgaagaagtgggggctggagcgtcggttgggggtggtagggatagggcatgatcaaaggggccatttcttgctttttctttcctcatctctcactgcccccttgagctaggtggattttctcttcatgacaagagtatttggtagggaaagcaggtttaaaataaaaagacaacccaccccctgcccttttgcttccctccccatcagtctggttgacaggaagaaaccacaccatcaacaccaacaagtttctgtgttccttttacagcaaaagggactttttatataaccaaatgtggtgttttagtgactttttgataatgtacagttttttgtgaatttaaatttatttctttctatatttttaggaccaatctcatttttaataaggttnnnnnnnnnnnnnnnnnnnnnnnnnnnnnctcctgtttttgccatgtgatgttctacaagtgcagctgtagaaaagtgcttgtcagttgttgaataaaaaaaccacatttgatagag

SEQ ID NO: 360660 - DNA, 444 bp, Homo Sapiens
  misc_feature (24)..(24): n is a, c, g, or t
  misc_feature (33)..(33): n is a, c, g, or t
  misc_feature (44)..(44): n is a, c, g, or t
  misc_feature (72)..(72): n is a, c, g, or t
cctttaatccggggtgaagtccangtgatgaanggccctaaccngaaaagtgaaggagccgaagaatgcaanctgccccaaatgatgaaaatgaaacaagattttgtacctattttttatccaggtgttgtaaaatttgtgcatggctttttgttgttgttgcttagtaactggtagaggagaaaagatgaggaaagaaactcagctttcctcacagtcttttcaaaggtacacagttggggagtaaaatctgactggcctaatcgatggaaaagaccctgtccttttcaccccatcctgcaatcctccgtgcagaggaactacactgttgtattctagtaattcactgtgatttataacaaaccggtgatgtcattctattgtgcacttttgtcaaaccatttatgtgactttaataaacatagtaaacttgctgactgcaaa

SEQ ID NO: 360661 - DNA, 540 bp, Homo Sapiens
ggccagttcctgcctgctcttctgccactcctcccaccccgtagctccagggcaccttcaaggaacccagggttctagagaacacagctggtccctcatattacacagctggaaactcaacctcgcatctctgattccaaatcctactttcagcgtcattctgccttttgtctctgggttttgttctcagcatctgatgaagcggctcaggggtcctgatgaactgctctgtgtcgccccctgccccggagggtgggaggaggttgcagtattctggatgggttagttgtaggtccctagattcaccccatttttaggatccttctggcagatagtatgccaaatggtatctgtacctttcttagcttgtcggggtgtcttgcttttaattctctggggcttgtaagttacagccccaatttctttactttgctctctaaggtagtgattgttttgcttgtttctccctaataaaattacattttcctcccagcatctagtggacattatatattgggaaccaaaacaaactaaaaaaaa

SEQ ID NO: 360662 - DNA, 450 bp, Homo Sapiens
cgttagccagtccactgcccttctgacaatgtgtggagtcacgtatgcttggtatatgcctttactacttttaaagttctacagtttattacttgcccaagtgttactaaatccttttcttatgtgtactggatggagaaaaaattatagccagcactttgagaggaaagttttcagaaacaatattaactggcactactaactgaaggccacaggagatgctatcaatgttatttgtaatctgaagattgaacaaggctgtgaggctcatttcaaactattttgaggtgttaaaatatatatatgctgtttctcagctgttccactcaaaccgtgttaggactctcaaaggtaaaatgtcacaggggcttttcagttgttacagagctcagcagctgtggttgcccctgttctacaccaatttcagttcaataaaaatgttaactttgc

SEQ ID NO: 360663 - DNA, 494 bp, Homo Sapiens
tcaatccggaccattgagtcagaaacacaaagcttgaaacctcgagagggaagactcctgacatttctagtcatgccagcttcccatcaagccagccacattcgatgaagtgtcctcaggcattttggcacgtccagttctgttcccggtccaggttgtggtttccttgaaaagcagcaggtgtaggtggtaggtgcatggaaagaggcccactgaacttcaaggagtttatgtccagggatcggcctgcagggctgaggagagagggttgcagcattcacccttccctcagctcgtttgcctatgtcccccccggaggagagagaaattcagcaggaataactggatttcatcgggtaaattccacaaatattgattaagtattccccaccccaccctgttctggtgagtcttcagtgtggccacaaatcacataagaaacttgttaaactgaaaatttacagcctagacaagaaagtgagacccccatctct

SEQ ID NO: 360664 - DNA, 467 bp, Homo Sapiens
ttatgcactcctatgcatgtgaataacatgtggtgtaattctgcttcttacagaagtattactgaaggtattatttccaatattatttggtttattatgcggatcttttttatatatgcagtcccatcccttctgtgccactcaatgccatccagacatggtttttccctccaggggcctttctctccagagggcacttcggctgcctctgcttcctctcattcgaggcccggctcttgctgacagaataggttccgttctgggcggtggttctcgagcctgccattcaaaaccaaagcaaattggagcatttctcacaacatggtattgaagttcctttttgttctcaaaagttgtgaccgtgttaaattgtactcccttagtcctgtaaggtatgttaagtgaatcgcagttacgctgtacttttattaatatttaacataattaaagatggacccataagagtg

SEQ ID NO: 360665 - DNA, 433 bp, Homo Sapiens
  misc_feature (268)..(268): n is a, c, g, or t
  misc_feature (270)..(270): n is a, c, g, or t
  misc_feature (299)..(299): n is a, c, g, or t
  misc_feature (370)..(370): n is a, c, g, or t
caagacccctccccgctgacctcactcgagccgccgcctgggcagatataagcggcggcccatctgaagagggctcggcaggcgcccggggtcctcagcgctgcagactcctgacctgccgactgcggatcccgagtccccggatcccggacccatcctgtggagcccactcctggcagacgccgcgatgcccggcccttggttgctgctcgctctggctttgaccctgaacctgaccggtgtccccggcggccgtgctcagccagangncccagcaggaggcagtgacggccgcgganatccgggctggatgacttcctgcgccaggtggagcgcctcctcttcctccgggaaaacatccagcggcttnaaaggggaccagggtgaagcactccgcgtcccagatctttcaatctgactggctctccaaacg

SEQ ID NO: 360666 - DNA, 947 bp, Homo Sapiens
  misc_feature (529)..(578): n is a, c, g, or t
cccgactcttttcctggccaatcgctgcatacacttgtcgagacggccacaatctacctacgtacgtcgactcggctacctaccatactggcgaaatgagactggccagggtccccgtggacctgtcggatccctccaagaggcagttctacatcaagatctcagacgtgcaggtgtttgggtatagcctgaggttcaacgccgacctcctgcgcagtgtagtgcagcaggtcaaccagtcctacacacagggcggccagttctattcctcttcgtcggtgatgctcctcttgttggatattcgggaccgaattaatcgcctggcccctcctgtggccccggggaaaccccagctggacttgttctcctgtatgctgaaacaccgcctgaaactgaccaacagcgagatcatcagggtgaaccacgccttggacctgtacaacacggagatcctcaaacagtcggaccagatgacagccaaactctgctaacccgggactccttgccatggacttttcctgttgttgtnnnnnnnnnnnnnnnnnnnnnnnnnnnnnnnnnnnnnnnnnnnnnnnnnnaaatttgtaaaatgtaaattaatattccaaagaaaaggaggaaaatcttcatttgttggaaatgaaaacgttctagcaactgtataaaagcgttgggcatgtttgttatttctatactcactctgtcatgaagaagggtctcagccttttgtggagcattgagggagttgcttcttaggcctcaggtgctgtattgggggagaagggagaaagcatatgcaatgaattgtaaagatctctgctgtgcaggtgctaagattaaacactaaaaagaaagagagatatatgtaatgtacaactgacactgccatttttcctttttggaggaaatggacatagataaagaagatatttcttcggttaagattt

SEQ ID NO: 360667 - DNA, 381 bp, Homo Sapiens
  misc_feature (11)..(11): n is a, c, g, or t
agaaaaccagnaaaatccccccgggaatgaaagattaaaaaatgtagccgctgttatttgcctggtgaatcccccctcttgcctcttctttagtttgaaaaaacaaaaacgtggccctggaattttcattttgatgccagaaattttgaaattgaaaatgtgccatgttttggtgcacaaaatccttctgtgggcaaaactttgtttttgttttgcacagtaagaaacaataggcaagcgttatgtttttggtaagttaactatgaaagctttcttatttttattattaaaaatgtaacaatttaacccacaggaaaaaaaattactttgtatgcttgtttgaaccctatgggttcgttttattaataaaattattacact

SEQ ID NO: 360668 - DNA, 404 bp, Homo Sapiens
ctcttcacgtcaaattacaatcaacaagactggaaacatccatgctactttcaaaccaggaaagagcacgatttttgttcaacaaaagctgcatcaacaaacaggggcccttgcaggctgctgtgctgggccccagccacgtttctgagaactggctgggggccaggaggcggagccacacggtgcggccacagaaggacacacggagaggagcccccgggacaatccaagcacgaggccaggcaagcagtgcccaggaggccagacgccgctggattccctggcccacagcacaggcggccgaaagctgagtggccgtgacacatgtgccccaggtgactctgagctggagaaagtgttgattcaaaggtactgtgtgtgtgtcgagaccccagagctcggtg

SEQ ID NO: 360669 - DNA, 482 bp, Homo Sapiens
  misc_feature (29)..(29): n is a, c, g, or t
gtgaccacaagtacctcctgtttattggnccccaaagcaagtccatacccctgacccgttgtggagtgagggaccggcaataggggaaataccattccctgcccacccccaggagaactgggatatttgtgaacctgcctatagtcattacccacaccttggcttagcagcaaagagtcttgttgtaaacaaaatactggcagattttgctttagctatatcataaagatggggagggggggaatagatagtggaaatggggaaattaacatctgtcacaatagacagtgtataaaattgataactgatggagtagcagtataaacatgttaaaaacatgagggtaaatatcagagaaaacagctaagagagttaaaattattttgcttccatggagtaggactagtggtgagaagcgttgaataggaaactgcagtatttcattataagcttttgaagattatttaccatgacaaaaaaaa

SEQ ID NO: 360670 - DNA, 380 bp, Homo Sapiens
  misc_feature (56)..(56): n is a, c, g, or t
cccctcccaactgaaaaacaaaaatggaggctgctttgggaactgccccttctcancccccctaaagtctgttttgtaaatgccctgtggtgcctctcccctcccggacctttccctctcgggggtcaccacactttgctaactcttgtgtgcacatattttataatagagtagcgagggaatggtgccgcctccagcttccgtaagctgcccgggctctggggggctctgggacaatcggggctgggaagtgactgtgctcttattgtacactctttatttctctgtatctttggcttgtgctctttgtaattaatgggatttgtctgccttttcaacactatactgagcaataacaataaatgcacacgtggaaatgc

SEQ ID NO: 360671 - DNA, 549 bp, Homo Sapiens
  misc_feature (21)..(21): n is a, c, g, or t
catgtaggtaagcctgggcancttctgttggcaagagcttttgcaatttcctgtgtttgtcctgggttctggggcatcagccagctaccccttgtgggcaaaggcagggccacttttgaagtcttccctcagatttccattgtgtggcctggtgggtcagggggagtctttgcaccaaagatgtcctgactttgcccccttgcccatcagccatttgccatcaccccaaacaactcagcttcggggccggtgaggggaggggcctcccccagcacagatgaggagcagctggggtaggctgtctgtgccatggccccccactcccccttcccttggagggagaggtggcaggaatacttcacctttcctctccctcaggggcaggtggtggaggggcgcccagggtcgtctttgtgtatgggggaaggcgctgggtgcctgcagcgcctcccttgtctcagatggtgtgtccagcactcgattgttgtaaactgttgttttgtatgagcgaaattgtctttactaaacagatttaatagttaaaaaaaa

SEQ ID NO: 360672 - DNA, 481 bp, Homo Sapiens
attattctacccccttagtccctttgcagatccccactcctgctcagcaggctcttacctctgacccccagctttcattgtggctgttagcaacatcctggggtttaaactccacccacgcccgatctggctgtctagagggattctacgcctgcgtgctgccgcctccccaagaggcattcaggttattggagaactaatctcatctcaaggggccagacaccaagtcccaaagcctacagacctctttccgccaggccctgaaacctggccccgtgccagcaggatgacaagccccagggcgctcctgatgaatatggattggagatgatgtacagtttttattcccctctggcttttgaggaatgaaatgatttgcactttgaaaacctgttaaccgtagcctctggacactgagactggaaggagaataaaggatgcttgttgtttttaaactataccaggtttcccagaaagaaaa

SEQ ID NO: 360673 - DNA, 539 bp, Homo Sapiens
gactgaagattggcaaaaacgaaaagcttcttcctccaagagcccattgaagaagcccagtgatgagacggtgagatggtttgagtcctcggtgcctgggtagcaggaagaaagacctgcatcctgcatctgtacttggggaagccagcggagaggacggggaggttacttctctaagtttctgcagaaatattgaaggctggagtttggaatccttaaacttggccttctcaaactcagcagcagatctccgggattctgctgttattatccaaaggcgttggaaggaaagatggatcttcttacatgctagaagttttaaacggtccttaacatgcctttgttcaagcaccttccagaatgtaaggttcagcagctctggtttctattacggtgacttgaatgtcagattcaagggcccggcgtcaaaggaaattggttttgactttttgtaatctaggagcgacagttcgtgagatgtttattcagtgttaaagagcctgtttttctaccaaacaataaaaccaagagaagaaaaa

SEQ ID NO: 360674 - DNA, 882 bp, Homo Sapiens
  misc_feature (591)..(748): n is a, c, g, or t
  misc_feature (773)..(797): n is a, c, g, or t
atcgatgccacagggtatcaaacatggtatgcgtatggtgaaatggttggcatcagtcatttaaaaaatatttcagcctaagttttctaagaggtatgtggattacattttaaaagccagcttaggggtcacagcagccttagttcaggagaagagctaatcacaggtgaccactcaagtcctttcaaggaagaccggatgatgtatttagttcccattttccacggtgattgactcaatttaagtgtattgtggctatatgtaatttacaggctgctttgcgttgcaggtgggaaaatctcccaggctggtgtgaggctgaactggggtaaaagaccccctgacccctcctcattcttctaaggtcaccacctcttagagggtctcttattttctttcagagatcaaatgcacagttatgctgtacaactaaattctgcagtcttgggaatccttacgagtaccaactattagtcactttttaaagtccccaaagtggagtgaggatagggggagtggaagcagtgtttggttcttactttacccaaactgtgtataaagaataaagttagcagaatgatgccacagtcnnnnnnnnnnnnnnnnnnnnnnnnnnnnnnnnnnnnnnnnnnnnnnnnnnnnnnnnnnnnnnnnnnnnnnnnnnnnnnnnnnnnnnnnnnnnnnnnnnnnnnnnnnnnnnnnnnnnnnnnnnnnnnnnnnnnnnnnnnnnnnnnnnnnnnnnnnnnnnttctttggcgccccccccgcccccnnnnnnnnnnnnnnnnnnnnnnnnngggggccgcccccccagagaaaagggaaagggggtattatttttcccaaaaaacccgggggaaagaaaaggggtggtttcccccc

SEQ ID NO: 360675 - DNA, 505 bp, Homo Sapiens
gctttattgcttccttagtaacaaaattgaccaaatcgggacttggaaacaggagctgatgtgccagcatacaatttgagctaaaattccacattcaacagcttttgaaaaaatttacaggtgggcttgctttgctgcctgactgtgaaggatgggaaagtattttagtgccccttataggctgtgtggaaattttcttctggagagagtttggttgggataatgattgagctctaaactgggaataaagtcatctgggttttcctttcacctgttttgtgatcataggcgtagaattaccttattaattagtgttgattattgtgtaatatttgagttatagggtattttttagcacatcatcacagcagaattttccacctggagtgtgttcacgaggacttcggggtattatgaagcgctctaataggcgcctctctttagatagtggaggaattgaaactgtatttgggaagtatgtcctgctttggaaaacagcatatac

SEQ ID NO: 360676 - DNA, 528 bp, Homo Sapiens
  misc_feature (37)..(37): n is a, c, g, or t
taaatatgtcactttcccattttcctttaaccatgtnttgtgtgacccagaaagacctttgagaaagatggctgcttccaccagggtggagccttccaggtctgcatgatgatggggcccgtttcctggccagagggtggctctgggagcagttgtgctgcgggcttgctgggggagaactctaactgttgcagaaacagagcctcatggcttgcttaaattacttagctggaatattttaaagtgtcagataatgtgatgtacaaagagagtatgccgatgcatttcattggttttgcattatctgtatcagtatttcccattgctagcccgaataatcaagaccagactgtttcttgtcactggattctggaagccttgccctttcaactggatttatgtttgtttctgctgctgtgaaaccccaaagtaatgcagtaggttttaattgaaaattgtttaattctattattgataattatttattgtaataaaagtaaaagagtaattttaaaccttttaattgtt

SEQ ID NO: 360677 - DNA, 452 bp, Homo Sapiens
  misc_feature (23)..(23): n is a, c, g, or t
  misc_feature (31)..(31): n is a, c, g, or t
  misc_feature (48)..(48): n is a, c, g, or t
  misc_feature (239)..(239): n is a, c, g, or t
  misc_feature (271)..(271): n is a, c, g, or t
cgccagaagaaggggccccgttnccgggccnaagggtggccccggganccagttgtgccgccgggcctgccggggggagaaaccccaactgttgccagaaaacagagcctccatggcctgccttaaattaccttagctggaatattttaaagtgtccagataatgtgatgtaccaaagagagtatgccgatgcatttcattgtttttgccattatctgtatccagtatttccccattgnctagtcccgaataatcaagaccagactgtttncttgtcactggattctggaagccttgccctttcaactggatttatgtttgtttctgctgctgtgaaaccccaaagtaatgcagtaggttttaattgaaaattgtttaattctattattgataattatttattgtaataaaagtaaaagagtaatttttaaatccttttaattgttaaaaaa

SEQ ID NO: 360678 - DNA, 434 bp, Homo Sapiens
  misc_feature (65)..(65): n is a, c, g, or t
atcctaaaacttatgtaaaaattccaattgttgcctgtaaaataattaccacaaaatatccaatncccgtgaataacccttccattaatccagccatgaaaagggttaaatttttacctgagccacaatgtaatttttgaatggatccttccccaaatggcctttaataaaatgccagattttgcactgactgatgtgactgcccaggccgtccccaatccttgagccactgtggtcccttccgtgtttgaactgcgaacagctccattttagttccttcttgggaagaaagaatgcattcgaattcaaatgagggatgatgggcctttgaggttgtaatcagtttgagacagaaattaatgtaaaactaggcaaatcctgtaacttaatgatgttgatctttgttttcctatttataaagcttttttcccctt

SEQ ID NO: 360679 - DNA, 734 bp, Homo Sapiens
  misc_feature (19)..(19): n is a, c, g, or t
  misc_feature (43)..(43): n is a, c, g, or t
  misc_feature (83)..(83): n is a, c, g, or t
cccctaaaaaatggggganaagccccagaaggatggtgaccanccaagtatgggggtaggatggaagaatccagggggaaaantccttaattgccaccagacctttaataaaccccattataataaagtgtaaattcccatacctttttacctgtggcaagggtgtgatgtgattgttaatccttttaatttttgaatcccaaactgaatttaaagtgttgaatacttaaatcctcacaagtgaattatgaaccatttgtaaagtgtttctataactctttgtatcatgtgttggtacatcttatcaagttttttctggcatgtaattccattctaaacttatgtaaaatttctattgttgctgtaaatattacacaaatatctattccgtgataaccttcattatcagcatgaaatggttaatttttactgagcacaatgtatttttgaatggatcttcccaaatgtctttaataaaatgcagattttgcactgactgatgtgactgccaggccgtcccaatcttgagcactgtggtccttcgtgtttgaactgcgaacagctccattttagttccttcttgggaagaaagaatgcattcgaattcaaatgagggatgatgggcctttgaggttgtaatcagtttgagacagaaattaatgtaaaactaggcaaatcctgtaacttaatgatgttgatctttgttttcctatttataaagcttttttcccctt

SEQ ID NO: 360680 - DNA, 363 bp, Homo Sapiens
ggagcgtggagggcatctgtctaccatcgcccgctgccaatctaagccagtctcactgtgaaccacacgaaacctcaactgggggagtgaggggctggccaggtctggaggggcctcaggggtgcccccagcccggcacccagagctttcgcccctcgtccacccacccctggctggcagccgccctccccacacccgcccctgtgctctgctgtctggaggccacgtggatgttcatgagatgcattctcttctgtctttggtggatgggatggtgcaaagcccaggatctggctttgccagaggttgcaacatgttgagagaacccggtcaataaagtgtactacctctttacccctaaaa

SEQ ID NO: 360681 - DNA, 525 bp, Homo Sapiens
  misc_feature (56)..(56): n is a, c, g, or t
  misc_feature (63)..(63): n is a, c, g, or t
ccccacttcccgaatgtctatttcaaatcaaggccccttaaataggggttaaattnaaccaanctttgcaccttaaggcttaacaccataggaactttgctaagccattgtcccctgggaataaaagggcaacacccaggaccaaagtggcaaaacctgtgggcttcaaacctcggggcccagggcatgcctgcccaccccctgaacaaaaacaggttcccaaagtgctacccttgcttcctgccccttgaggtgggcccaggctggctcctggctatgcagggatctctggtccccaggagaccttgggggccaggcaggtaaggatcaggggtgataggggagagcaattactttgttcactgtatgcacccgcgggggcctgggagtccccatttgcaggtgggttagcctccagcccacaccacccagacctaggcttccctcttctcaggatccaccacagggttaggggacaggaagcctgttctattctcaataaatcttacaaaattccaaaaaaaa

SEQ ID NO: 360682 - DNA, 464 bp, Homo Sapiens
agtagggggtgaagtgagccagcttgcacctcaggctaacacataggactttgctcagccatgtcccctgggatacaggggcacaccaggaccaagtggcagacctgtgggcttcagcctcggggccggggcatgcctgccaccccctgacaaaaacaggttccacagtgctacccttgcttcctgccccttgaggtgggccaggctggctcctggctatgcagggatctctggtccccaggagaccttgggggccaggcaggtaaggatcaggggtgataggggagagcaattactttgttcactgtatgcacccgcgggggcctgggagtccccatttgcaggtgggtagggcctccagcccacaccacccagacctaggcttccctcttctcaggatccaccacagggttaggggacaggaagcctgttctattctcaataaatcttacaaaattccaaaa

SEQ ID NO: 360683 - DNA, 618 bp, Homo Sapiens
tagaaggagccactcatttatgagagcgaccgtgatggggccattgaagacatcatcacagtgatcaagacggtgcccttcacggcccgcaccggcaagcggacatcccggctcctctgtgaggccagcctgggagaagagatgcccctctagcccctcagatctgcggaaccagccctacatccgcgcagacacaggccgccgcaagtgcccgtcggcgtcccccgggccccccactgcaaggtcaacctccgacctctcgctgtagccgctatttctgcaaggtggattctgcaggggtgtggggccgtggacaggctgaggctcaaggaaggtggtcctcagctcggctggccgggcagcccctcctccgctgtggcccgcctcaaacgggctggtgcatcctcctcttggccacagagggcagcatcgcccgccccttcccccaaaatgctgttgcagcacccaccctaaagccccctccaaatagccatacttagcctcagcaggagcctggcctgtaacttataaagtgcacctcgcccccgcaagccccagccccgaggaccgtccatggaccttatttttatatgagattaataaagatgtttgcaaaag

SEQ ID NO: 360684 - DNA, 869 bp, Homo Sapiens
ctcgataaagaaccgcagcacgaaataaggtagcgaggcctgggtggcgaattcggcacgagggccgcctgtggccagagccggagtaacgggactcccagctgcgcgtcgcagtcccgacgcgagaagggctggagtcggcgtccagcctagagcccccggtgggagccaggccgggacgcgtgcaccatgccctacctgctcatcagcacccagatccgcatggaggtgggccccactatggtgggcgatgaacagtcggatccagagctgatgcagcatctgggggcttcaaagagaagagccttgggaaacaacttttatgaatactacgtcgatgaccctccccgcatagtcctggacaagctggaacgcaggggcttccgtgtgctgagcatgacgggggtgggccagacgctggtgtggtgtctgcacaaggagtgaccttctcatgctgatttgcagacggggcacccctgtggaggggctgctgtgggccctgacctccaagctcctgcctcaccgtctgccttgctcctctcttcccaaatcatcaccgccatgggcccagccccaaagggcagtgaatggccttctctgaaaccctgcgtcaagcagtgggagagggcagtgcccggtgccctggtgctcccagctgccctcctgcttcgggcctgggccgagggccttgtgtaggccatgttcctcgggcagctgccccgggccggagctgggcactccagcggccctggcgcgtggctcctgcataactagccccaagccaataaagggggctgtgcgtggccccatttacttttcgcgaccaccgagcggtgtccttgtgcgggccgccttccggcccttcgaaa

SEQ ID NO: 360685 - DNA, 384 bp, Homo Sapiens
  misc_feature (27)..(27): n is a, c, g, or t
  misc_feature (65)..(65): n is a, c, g, or t
tggccggaggttttttaaataacccancccctactatccgtgttccccctagatacccctgtaantcctaatgtgaatagtttgttaatattgcctgtaaagtattatattgtatgatttgaagacagactatatgtcattttattatactccatcaatctataatatattagactgatgctttatcctaaaatgctttgagtttgtataatatatcttgacaaattttactaccatatgttatgtaataaatgtgtatttttgtacttgcagaaactgctgctaacttttaaagttgtttggttttcaaggcactgataatggatatgtatgaagtccatgctgtctgttaaataaaatgccattctgcagaattaaccatcc

SEQ ID NO: 360686 - DNA, 1930 bp, Homo Sapiens
  misc_feature (1222)..(1222): n is a, c, g, or t
aatccctacgagggccgagtggaggtgctggtggagagaaacgggtcccttgtgtgggggatggtgtgtggccaaaactggggcatcgtggaggccatggtggtctgccgccagctgggcctggaattcgccagcaacgccttccaggagacctggtattggcacggagatgtcaacagcaacaaagtggtcatgagtggagtgaagtgctcgggaacggagctgtccctggcgcactgccgccacgacggggaggacgtggcctgcccccagggcagagtgcagtacggggccggagttgcctgctcagaaaccgcccctgacctggtcctcaatgcggagatggtgcagcagaccacctacctggaggaccggcccatgttcctgctgcagtgtgccatggaggagaactgcctctcggcctcagccgcgcagaccgaccccaccacgggctaccgccggctcctgcgcttctcctcccagatccacaacaatggccagtccgacttccggcccaagaacggccgccacgcgtggatctggcacgactgtcacaggcactaccacagcatggaggtgttcacccactatgacctgctgaacctcaatggcaccaaggtggcagagggccacaaggccagcttctgcttggaggacacagaatgtgaaggagacatccagaagaattacgagtgtgccaacttcggcgatcagggcatcaccatgggctgctgggacatgtaccgccatgacatcgactgccagtgggttgacatcactgacgtgccccctggagactacctgttccaggttgttattaaccccaacttcgaggttgcagaatccgattactccaacaacatcatgaaatgcaggagccgctatgacggccaccgcatctggatgtacaactgccacataggtggttccttcagcgaagagacggaaaaaaagtttgagcacttcagcgggctcttaaacaaccagctgtccccgcagtaaaaaagcctgcgtggtcaactcctgtcttcaggccacaccacatcttccatgggacttccccccaacaactgagtctgaacgaatgccacgtgccctcacccagcccggcccccaccctgtccagacccctacagctgtgtctaagctcaggaggaaagggaccctcccatcattcatggggggctgctacctgacccttggggcctgagaaggccttgcngggggtggggtttgtccacagagctgctggagcagcaccaagagccagtcttgaccgggatgaggcccacagacaggttgtcatcagcttgtcccattcaagccaccgagctcaccacagacacagtggagccgcgctcttctccagtgacacgtggacaaatgcgggctcatcagcccccccagagagggtcaggccgaaccccatttctcctcctcttaggtcattttcagcaaacttgaatatctagacctctcttccaatgaaaccctccagtctattatagtcacatagataatggtgccacgtgttttctgatttggtgagctcagacttggtgcttccctatccacaacccccaccccttgtttttcaagatactattattatattttcacagacttttgaagcacaaatttattggcatttaatattggacatctgggcccttggaagtacaaatctaaggaaaaaccaacccactgtgtaagtgactcatcttcctgttgttccaattctgtgggtttttgattcaacggtgctataaccagggtcctgggtgacagggcgctcactgagcaccatgtgtcatcacagacacttacacatacttgaaacttggaataaaagaaagatttatgaaacgtgtctgtgtttcctttgacccacagcacctgggccctgagcagcaggcttcctatgttcagt

SEQ ID NO: 360687 - DNA, 484 bp, Homo Sapiens
  misc_feature (32)..(32): n is a, c, g, or t
  misc_feature (66)..(66): n is a, c, g, or t
  misc_feature (71)..(71): n is a, c, g, or t
  misc_feature (80)..(80): n is a, c, g, or t
gagtctgggtcaatggccctaccttcagctanaaacctgttaggtcggtttagaggaagctccccngaaanttccctcgnggtaatcttcccatcccactgcccctgacccctgttccctgtctataaaaccccagtttcccatggtggattcagagctgaggccagtctctctcccctactaaaagtccccattgctgtggtccccgtacctgtcatgatggtccctaaataaagtcttactgtgctttaataggtagcattgaaaaatttttttctttgacatcattcatgacaacatgaaacctattgggacagcatgactgtgcagggtctttagagctcagctttctgaggccctgagcattcttggttttccgacatcgtgaacctgttctgtgttgcaagatatcactcaagccagtgttgcttaataccatctctttgtgtaatagatctgaataaagtaattgtaatacaccaat

SEQ ID NO: 360688 - DNA, 450 bp, Homo Sapiens
  misc_feature (41)..(41): n is a, c, g, or t
  misc_feature (56)..(56): n is a, c, g, or t
  misc_feature (100)..(100): n is a, c, g, or t
  misc_feature (179)..(179): n is a, c, g, or t
  misc_feature (229)..(229): n is a, c, g, or t
aaaacctatgggttcaaagaaaaaaaggacggggccttganggggaatccctgaantccccttatatgaccccaaactgaccatactaaaagaagtgtanaaggtctttttaaggctctaaaatgtcagggtctcccatcccctgatgcctgacttgtacagtcagtgtggagtagacnggtttcctccacccagggttgactcagcgggatgatctgggtcccattcntggtcttaagaccccaaacaagggttttttcagctccaggatctggagcctctatctggttagtgtcgtaacctctgtgtgcctcccgttaccccatctgtccagtgagctcagcccccatccacctaacagggtggccacagggattactgagggttaagaccttagaactgggtctagcacccgataagagctcaataaatgttgttcctttccacatc

SEQ ID NO: 360689 - DNA, 2561 bp, Homo Sapiens
ggactccagtcagttgtacttactgagaatccctgagtgccctctgccccttctggcaacatgcacattcctgtcttctgcctgctccctcatgtcagtgcagttgggctgggctgacctactaaaacctgccccatgtatggacatggaaggccatggctgccatggcacttgggacactggaggaagaaacagaaacagtaggtttcttcctgtgtgtccccctagtggttttcgtttccatgtggtgctatgccacagagagaaatggtcccagtctggaactcttccgtgctgccgtgcctaggaaggaaactctgaagatttgggcagcctgagtctcttggtttctgagctggctcctgaatatatgttcaagtgggtgtgcccatagggcctgggcacgtgtctctagcaaaaccagggcctgagcataagaactgggattgcaggcatgagccaccgcgcccggcctgcccctttccaagagatatgctcagcataatgagagatcaaccgtggtggggagtgggtccaagtaagggttctcattgttgccttttaagaggcctaagtcctgcattaactcagtccaaccattaagtgatgcaggctgctcttccctcatgtgagaaaaacctgtttccctctggttcttcctggctttgcacctggtggctattacaaagcagtactgcagtatgtcttggacctggaaagttggacatgtgtgtggctcaacagttttctcgggggagttcagtgaccttttggtggccaccctctgttctcacctgtgagttcttgcaggtggcgacttcatctgcaaggtcacttacatagccccactcagctgcttcggaaagcgtgacgaagcagtagtcctcagtgtgtgtgtaagtgaagaggaccttgtggtagcagggaccatgcttcattcgtggctgtgtccccatctgagggcctggtatgcagtaagatcaataaatacttgtggaatgcatgactgctggctgcctgtgtctgcctggcgggagagctgtggaactaggggtccacatgaggacagactactgtggtgctgcctacctgccaggctggcccaccttccccacccccacttgaccttactctcttgaggtcctaaaggtatgattcagacctttcagccctttccagaactttgaccctctggagacagggcggttctgcagggggcggtctagcccctagctttgttctgggcagcccaatcagctctggattgcccgagctgccctgaagagtcagccgaaagagctggaggcttcttccctgtggttgcgggttcctgcattctctgctctaaatcccagcctgcccttggggctgcccacgcccccttcagatcctttgctccggagagagacctgtccgagcagaggcctggactacatctcccggcgtgcctggcagtgtggtggcctctgtgcgccgtctgcactcgttgcaggcgacgatgcagagggctgtaagtgtggtggcccgtctgggctttcgcctgcaggcattccccccggccttgtgtcgtccacttagttgcgcacaggaggtgctccgcaggacaccgctctatgacttccacctggcccacggcgggaaaatggtggcgtttgcgggttggagtctgccagtgcagtaccgggacagtcacactgactcgcacctgcacacacgccagcactgctcgctctttgacgtgtctcatatgctgcagaccaagatacttggtagtgaccgggtgaagctgatggagagtctagtggttggagacattgcagagctaagaccaaaccaggggacactgtcgctgtttaccaacgaggctggaggcatcttagatgacttgattgtaaccaatacttctgagggccacctgtatgtggtgtccaacgctggctgctgggagaaagatttggccctcatgcaggacaaggtcagggagcttcagaaccagggcagagatgtgggcctggaggtgttggataatgccctgctagctctgcaaggccccactgcagcccaggtactacaggccggcgtggcagatgacctgaggaaactgcccttcatgaccagtgctgtgatggaggtgttggcgtgtctggctgccgcgtgacccgctgtggctacacaggagaggatggtgtggagatctcggtgccggtagcggggggcagttcacctgggcaacagctattctgaaaaaaccagaggtgaagctggcagggctgggcagccaggacagcctgcgcctggacgcaggcctctgcctgtatgggaatgacattgatgaacacactacacctgtggagggcagcctcagttggacactggggaagcgccgcgagctgctatggacttccctggagccaaggtcattgttccccagctgaagggcagtggtgcagcggaggcgtgtggggttgatgtgtgagggggcccccatgcggggcacacagtcccatcctgtaacatggagggtaccacagatggtactgtgactagtgggtgccctcccc

SEQ ID NO: 360690 - DNA, 1302 bp, Homo Sapiens
  misc_feature (1142)..(1162): n is a, c, g, or t
agctgacaaagtttgcagagaaattccaggaggtggaagaagcggccaagacagccaaagacaagacccaggagaacatggagccctcgagtaatcatcctgagaatcagggcgtggagccccatcttctactccggcatccagtgtcaacgggacggacgatgaaaggcctctcaggccgctgcagccgacacgcacctgcagtctgggaaccacaagctgaaggcggcctcgacgcagagctgcccacgggaagaggtgggagatggagctgcagacccggcgggagaccgacttccggctgcccacggggctgcaggagtcgacggccagtgcggagcagaggaagaggccgtgagtcagagtgcgactgtgtctctgagaagatggaggcggcagagagaggatcaaaacttggaagataaagtgcgttccctaaagataggccctgaggagagcaaatcccgacagcgccacctggaggcgcttcctggtggcgctggaccggaagatccaggcctgcataacttccgcccaggcctcccaggctgggcaccaacaactagggctggcagaggcccaggacccccaccgtgagtcccaagcatgtgtgcgagaccagatagcgctaggacgttcctctgtgtgcattgcttctgtaaatgcaggcgcagtgtgtcgtgtttccaaaccagttgtgccatccactcactcctttccagaatagaaatctcctctcgcttctctggccttgtgagggttgtggacaactgggaagattctgactcaggaaaccagaactaggtctaccttcaacatttatgcagtcagggcagggatgtttatatctttcataagggctgttgcaaccatatgaatctgaaaaaacacgcattttggaaaacccaaatattgatattctttaacacaaagccatcaggctccttttatcaaatagcattcagagtatttgaatgtccaccagacaccagccccggggggcacagagagaacaacattcctctctgtcaacatcgagaggctttaaaacaactgtttagtggaaactttctgagagatggaaaacaagcttctggtgggtgcattttctggcccggagttgcctgcatccacgctactgnnnnnnnnnnnnnnnnnnnnnagtttgtacggttgcaacagtgttccttttcttggttttaatttctgagcagatgattgtgctgtgggaacagcacacagtgagggtgcctagcacaatgtctggcacaaagtaggtgcttaataaatatttgttcaatt

SEQ ID NO: 360691 - DNA, 482 bp, Homo Sapiens
  misc_feature (25)..(25): n is a, c, g, or t
  misc_feature (49)..(49): n is a, c, g, or t
  misc_feature (56)..(129): n is a, c, g, or t
ttttttaaacttttaatagagacanacagggttttgctgtgtttgcccngctggcnnnnnnnnnnnnnnnnnnnnnnnnnnnnnnnnnnnnnnnnnnnnnnnnnnnnnnnnnnnnnnnnnnnnnnnnnnctactctttatctccaaaagccgaggccttcctgtaggccattcatgatggattgctgctcaccccacgtggccattaacacatggctgtgggtttccaacctggccccttgtatgaaaaaccctaggtaaacacatcaaaataattatcccccggcatagcactttatttaaaagtccctcattttatgatgaggaaatggggcctccaggagggcaatgggcagagtgtgaccatcctacccactgcctctcaggagccccttgtatctgccacgagtggcctgcctcactgcaagctgtggcacagatacgtagttagacatggttaataaaaatcattgtgatttaata

SEQ ID NO: 360692 - DNA, 1087 bp, Homo Sapiens
tcatacaccgggacctggcggccaggaactgcatgctgaatgagaacatgtccgtgtgtgtggcggacttcgggctctccaagaagatctacaatggggactactaccgccagggacgtatcgccaagatgccagtcaagtggattgccattgagagtctagctgaccgtgtctacaccagcaagagcgatgtgtggtccttcggggtgacaatgtgggagattgccacaagaggccaaaccccatatccgggcgtggagaacagcgagatttatgactatctgcgccagggaaatcgcctgaagcagcctgcggactgtctggatggactgtatgccttgatgtcgcggtgctgggagctaaatccccaggaccggccaagttttacagagctgcgggaagatttggagaacacactgaaggccttgcctcctgcccaggagcctgacgaaatcctctatgtcaacatggatgagggtggaggttatcctgaaccccctggagctgcaggaggagctgaccccccaacccagccagaccctaaggattcctgttagctgccttcacttgcggctgaggtccatcctgctggacgctatgtcctctgcccttccacaacccctagccccgctcagcctgctgataggggctccccagcagccccagggcaggaggatggtgcctgagacaaccctccacctggtactccctctaaggatcccaagctaaagcactgcccactggggaaaactcccaaccttcccactttcccaccccacgccttatccccacttgcagccctgtcttcctacctatcccacctccatcccagacaggtccctccccttctctgtgcagtagcatcaccttgaaagcagtagcatcaccatctgtaaaaggaaggggttggattgcaatatctgaagccctcccaggtgttaacattccaagactctagagtccaaggtttaaagagtctagattcaaaggttctaggtttcaaagatgctgtgagtctttggttctaaggacctgaaattccaaagtctctaattctattaaagtgctaaggttctaaggcctaaaa

SEQ ID NO: 360693 - DNA, 434 bp, Homo Sapiens
  misc_feature (334)..(334): n is a, c, g, or t
  misc_feature (413)..(413): n is a, c, g, or t
  misc_feature (424)..(424): n is a, c, g, or t
ttttttttctttaagataaatttgtttttaatgtaattacttagtggtaaatttattaaacatgatagtccaaatggtaccctaatttagatgaggtgtggacattgaaacttaaattataagacaaaatcttgaggccatacactatatggccatacactcactcttcacaatatgtaggctcaatttggtgacatttcagaacatgataatggatttagtgataccaagatttgtcagcaattccctacatatagtctgaaaaacatatgaaatactatgaacctctatgaactaataagcctacctacatgtttttaagatcatacatagncatgcatttcaagactcaaagtttgttacagggtttaatttttgaaggccaatttgcggtaacacacttttactggacntcaaaatgggngattaggtcc

SEQ ID NO: 360694 - DNA, 468 bp, Homo Sapiens
cgcgcttctccacggtagaggcgtgttctccagtttagcaggctggtgttaaggctttaggaggaccccagtttcccccatgacagtgccctctaactagccagagaataggtagcgtccctcctgatgatggctcataatctgaagcatcttgagctgggggtgtcagggggagggcctgctggcctcaccgtgaggcagccgcgggagggagcgctgacgtcacagaagcgaaggcttgatgctgcctcagcagcctcagctgtgggggggaagcgcgtgtgcatcgtgtcaactactgtacatgttggtcatgtgaaaggaattatatatgtatagtattacaagtatttttgcatttttacaagattgaaatttgtagcattttgtattatttacacagaatttatttgtatatgaaactcataccataatttaattcgaataaatgaaacttttctatatatt

SEQ ID NO: 360695 - DNA, 531 bp, Homo Sapiens
ttgcatggggtaggtcagacaacttggatgtgggttttagttctgggtcttatacttcaaatgatgcagggcagagtgatcccacgccagggcaagctgggtgctaaaggatttaggcgctctatcacaagaggaacaggaaaaaagaaggcttaggtggggaatacgagagctgtcttcaaacatctgggagaatgtcctgtgttccctcaccgtctaaggctcagggacttcttccagaacaggatggagccctggacacacaactacacacacaaacaattgtcacagagtgggaggcaggataaagtggtgagtaacagcctggcctgagacacaggctcacgcatctgacactggctgagccgcgcactagctgagtggccttgggcatgttttgtaacctccttgactgttcccttatctgtgaaattgagataaatgtactacccacttcataaaaagatcaaatgtgataatacttgaaatatgtttagaacaaagttggccatattcaataaatgttagctt

SEQ ID NO: 360696 - DNA, 1045 bp, Homo Sapiens
  misc_feature (542)..(577): n is a, c, g, or t
tatgcagaaaaggcaaacagtaatagtcagcctcagtttatccttctagttgtttcccagatgcttccctctcttcctgcaatactatattaacatttacggggtgtggagctatgtattgtttctattttagtttttaaacttgcaaaattcatgataaagagtcatcgctgtgaccttggagactgacaatcttctatatgtttttttgcagattgttaaagagacatgaaaataacttatcagtgctagccattagtaacatggaagcttcctccacccttgccaaatgcctttatgaacttaattttacagttcagagtaaggaacaagaaaaagactcagaaatgctgcagtgaaaaataattccacttacacagtgggggactcaaagtcagccacatttcacatactgttactgaagaaagcaccaagtcttaatggaacaaagaccatagaatgaattattttatctcctcccatgatgctgagaggaagcttcgtattctgatctctgagtgaatccctttgttctctgtttnnnnnnnnnnnnnnnnnnnnnnnnnnnnnnnnnnnngaactggcggggggatggtcaaccagcttatctggcaggatgtttcagatcctgataaatcctgatgggaaacgggtatgatcagaattcagtaccatccacatgggaatatacttgggaatatggtaaaccctacatgagcagatgaacatagaagcataaatattttatctatatccaaaaaggagcacattttatattacaaaaccgttaaagcgggttggaataatttaaaaaagtttcagcacaccttatacccccgatctcagagggggccaccaatatctagctatggactcgagtgtccgtttagaaatcagtagcttggtttccttacttgagccaatatattcacacttatttattatcattacaatttaccagtctgaatagatcttgtaaatatttgtgaatagaatgatacctgtcatgccactgcagccagctggatatacattctatggtgtc

SEQ ID NO: 360697 - DNA, 1530 bp, Homo Sapiens
  misc_feature (269)..(269): n is a, c, g, or t
ggtcgaattccgggatctccatggaaccacagggactttagatatcactcagcaagatactgccaaaggtgatcaactagaaagaatttctaatggacctgtattaactttggggtgggttcatctgtgagcagtatacaggaggcttcaaatgcggcaacacagcaatttagtggtactgatttgcttaatggacctctagcttcaagtttgaattcagatgtgcctcagcaacgcccaagtgtagttgtctcaccacattctacaancctctgttatacagggacatcaaatcataggcagttcccgacttcaggatccaaaagtatcccattctcctgccctatcatctgacgttcggtctacaaatggcacagcagaatgcaaaactgtaaagaggccagcagaggatactgatagggaaacagtcgcaggaattccaaataaagtaggagttagaattgttacaatcagtgaccccaacaatgctggctgcagcgcaacaatggttgctgtgccagcaggagcagatccaagcactgtagctaaagtagcaatagaaagtgctgttcagcaaaagcaacagcatccaccaacatatgtacagaatgtggtcccgcagaacactcctatgccaccttcaccagctgtacaagtgcagggccagcctaacagttctcagccttctccattcagtggatccagtcagcctggagatccaatgagaaaacctggacagaacttcatgtgtctgtggcagtcttgtaaaaagtggtttcagacaccctcacaggttttctaccatgcagcaactgaacatggaggaaaagatgtatatccagggcagtgtctttgggaaggttgtgagccttttcagcgacagcggttttcttttattacccacttgcaggataagcactgttcaaaggatgccctacttgcaggattaaaacaagatgaaccaggacaagcaggaagtcagaagtcttctaccaagcagccaactgtacggggcacaagctcaactcctagagcacaaaaggccattgtgaatcatcccagtgctgcacttatggctctgaggagagggatcaagaaaaccttgtctttcgagattttacagatgaaaaagagggaccaataactaaacacactccgactaacagcctgcccttaatattaaaaaaatattgggaaaacaatttcaaaatgtgggcccccagatttgtttaaagaagaaactggaaataaccttatcagtggcctagcccattagttcacctggaagccttcctccaacccttggacaaaggcgcctttatgaaacttcattttcaccgcctcacaacaaaggcaacaggaaaaaataaatcccgacatggctggtaaggggaaaaattaatccccccctttcacacggggaggggacttcaaacagccagccccacctttcccctaacccggttacttggaacgaaacgcacccaccccccttatattgggaaaacaacgacacccttgctaaattac

SEQ ID NO: 360698 - DNA, 737 bp, Homo Sapiens
aacgggtgtgagccacggcgcccagcccaggaagagtttttaaattagagctctgtttaattataccactgggaaatcatggttacgcttcaggcatattcttccccagagtactacttacattttaaattccattttgtaaagttaaatgtcagcattccctttaaaagtgcccattgtcctttgaaagtagacgtttcagtcattcttttcaaacaagtgtttgtgtaccttttgccaagctgtgggcatcgtgtgtgagtacagggtgctcagctcttccaccgtcattttgaattgttcacatgggtaattggtcatggaaatgatcagattgaccttgattgactgtcaggcatggctttgtttctagtttcaatctgttctcgttccttgtaccggattattctactcctgcaatgaaccctgttgacaccggatttagctcttgtcggccttcgtggggagctgtttgtgttaatatgagctactgcatgtaattcttaaactgggcttgtcacattgtattgtatttttgtgatctgtaatgaaaagaatctgtactgcaagtaaaacctactccccaaaaatgtgtgggctttggggtctgcattaaacgcttgtaggtccatggttcatgcccaaaaatggggctgggaaaccgtttggcttttattttacctttccagtcaggcggttggctttttcaagatccaccactttttatccaaccaccg

SEQ ID NO: 360699 - DNA, 845 bp, Homo Sapiens
  misc_feature (48)..(84): n is a, c, g, or t
ctgtatacgactcactatggggaatcggagttatcgcggtggcggcgnnnnnnnnnnnnnnnnnnnnnnnnnnnnnnnnnnnnnatcaggccaaatcggccgagctcgaattcgtcgagagcggagttgttgagcaggtccgtgaattgtcagcgcgctgtgggcgactgtgtggccgcggcggccgccaggcttgccgcactccccctgaggtgcccgccggaaccaatgtgccctggtccactgggccgtgagcagccaccgactgggggcaacttggcacttagaaccgcagcagggacgtcggtttgctatcgggactcggcgaggacgatggaaatcctgtatgaatgtggaagccattagcagagtaattgctgtctgttaccatgacaaccagccgctgcagtcacctgcccgaagtcctgccagactgcaccagctcagctgcacccgtggtgaagacggtggaggattgtggcagcctagtgaatgggcagccgcagtatgtcatgcaagtttcagccaaggacgggcagctgctgtcaacagtagtgcggactcttgccacccagagccccttcaatgaccggccgatgtgcaggatctgccacgagggcagcagccaagaggacttgctctctccatgtgaatgtacagggaccttggggacaattcatcggagctgcctggagcactggctgtcatcctcaaacaccagctactgtgaactctgccacttcaggtttggcagtcgagcgcaaacccaggcccgtagtggaagtggctgagaaaaccctggcccccaagcatgagaagcggactctgtcggcgacttggtgtgc

SEQ ID NO: 360700 - DNA, 179 bp, Homo Sapiens
tttttttaagacttaacgtcattgtatttattaggttctgaaacaatacacattcacatccttttgaatacagtacatttggcacaataacgtttacaatgaaataacactaatgaatggcaagagattaaaattacatccagaaaggaaaaaaatgtacaaataaagcatcacaatac

SEQ ID NO: 360701 - DNA, 358 bp, Homo Sapiens
  misc_feature (24)..(24): n is a, c, g, or t
  misc_feature (141)..(141): n is a, c, g, or t
  misc_feature (147)..(147): n is a, c, g, or t
cccctattattttcctggccttgnggggaaaataatgtcgggtctttcacctcatataaaaaagccccaacctaatgacactttaaatggtttactttatctacaaaattatgtgttaagaaaataccattcatagcatgnagattnggaaacagtttttaggagaagacttgaatgaagttggagggacattgaatgatggtcacagggcagacgaatgtgtcgtggggcgagttgggatttgctgcagctgtgaagccatggccgtgtctcgtgtgttgttacagaggtgatgtgcttttcgacgggcgcctcgtggcttggaacctcctctgtatgaataaacagttttcacgtc

SEQ ID NO: 360702 - DNA, 155 bp, Homo Sapiens
aaaagtgtccttgttcactgcaacatgcccagtgccacgcacaggtgctgacctatagtaagtcccttaacatttgctgaataggggaaagaaatttccggaagtaaatacagcaattaataatgtttataagctgggcatggtcgctcaggcca

SEQ ID NO: 360703 - DNA, 499 bp, Homo Sapiens
gtgaaccaaaagtagtttcagattagcagaaataaagagctttaagttttaaaagttgagattgaatatttaatgaaagtttattaattctttttccaggaatagcagtaaggtcagtttttttccctaaaataaaaaggtttaataaaccagaaaattatagcaacagtacttaggagaatagttgaagattgtattaattttaattataatagttatttgtcataggctattgatgattagaatttcattagttttgtccactataattttaaaaatagttgtgtcaaatacaaattctggtaaactgttaggttttaacaccagacagtattcaaaggaaattaatgtttgcaaacataaatccatagtcttcatttctttatattgtcacctttgtaaaagtgtttaaaatttgtattgtttgttttgtatatctttgggcatcttgtgtctagctataataaaaagaaacggtgccaaggttcttcaaaaaaaa

SEQ ID NO: 360704 - DNA, 413 bp, Homo Sapiens
  misc_feature (100)..(126): n is a, c, g, or t
ctttaaatgagtgtcattcacttcttttacttaatgttttaagtatagtaccaataatttcattaacctgttctcaagtggtttagctaccattctgccnnnnnnnnnnnnnnnnnnnnnnnnnnngcttgagcacactgatcaaccactgaactgccttcttccattgccctgcaatgatataagggttacatttttgtgtatatggctttcatagttgggatttcagagcactgataccagatattttcagtttgttctctgggagaatttcatttgcatctatgtttttagctatctgtgataacttgttaaatattaaaaagatattttgcttctattggaacatttgtatactcgcaactatatttctgtaaacagctgcagtcaaaaataaaacactgaaagttttc

SEQ ID NO: 360705 - DNA, 379 bp, Homo Sapiens
  misc_feature (49)..(74): n is a, c, g, or t
acggacaatggaagaaggcagttcagtggttgatcagtgtgctcaagcnnnnnnnnnnnnnnnnnnnnnnnnnntggcagaatggtagctaaaccacttgagaacaggttaatgaaattgattggtactatacttaaaacattaagtaaaagaagtgaatgaaactcatttaaagttgtcaaaaaattagcaactacttggagcttatcaattaaaaggaaacaaggtaagcagacacattcattagatcaaagatgaaatgagatcaagttcactggaatcaggctgtaactactcaagtcacaatgacttcagtgcaggagtttcttactggacacagaagtctgattccaagcccactcttcaacagctgagattt

SEQ ID NO: 360706 - DNA, 510 bp, Homo Sapiens
  misc_feature (38)..(38): n is a, c, g, or t
  misc_feature (89)..(89): n is a, c, g, or t
  misc_feature (173)..(173): n is a, c, g, or t
  misc_feature (183)..(183): n is a, c, g, or t
  misc_feature (190)..(190): n is a, c, g, or t
ccggcctaccctgttcccctttaaattggataaagccncccaagtagttggcctaaatttttggaccaacctttaaaatgagtttccantccaccttccttttaccttaatgttttaagtatagtacccaataatttcattaaccctgttcctcaagtggtttagctacccantcctgcccanttttaanttttatttaattttatttgcttgagcacactgatcaaccactgaactgccttcttccattgtcctgcaatgatataagggttacatttttgtgtatatggctttcatagttgggatttcagagcactgataccagatattttcagtttgttctctgggggaatttcatttgcatctatgtttttagctatctgtgataacttgttaaatattaaaaagatattttgcttctattggaacatttgtatactcgcaactatatttctgtaaacagctgcagtcaaaaataaaacactgaaagttttcattttgcaaaaaaaa

SEQ ID NO: 360707 - DNA, 932 bp, Homo Sapiens
  misc_feature (32)..(32): n is a, c, g, or t
  misc_feature (46)..(46): n is a, c, g, or t
  misc_feature (88)..(88): n is a, c, g, or t
  misc_feature (101)..(101): n is a, c, g, or t
  misc_feature (800)..(825): n is a, c, g, or t
  misc_feature (827)..(827): n is a, c, g, or t
cattaatttattcccatatccggggaaaaccncttttaaacccccngtatttaggtggccttattaccgaatcactggtccgtttgtnggggccacttacngacaaaactttaaacggtactggatgccagctctctactcgtggctgtgggacctgtttcttttaggtacttgtgcttattaatctacttactaaattttcacattgacatttttggggatgatactaccatatacgaaatggaaaatgtaatatgctcagtgcttctgtaaaatgcagcaatactggtattactttacatcagtaggcatctttgacatgagcatataaatattttgttgactcagcaaaggtgacactttgtgactaaagtatcccattatatataatgttttttgaaatgttggaaattttggggaattatcaaatgtatagaagttgcatgaaggttatagagaggtgtaactgtttgttaactattacatggatttcatactaggcagtgacaactaacatgttacttcaactaaaagtgtataatgggttgtctttttatttatgaaaataaaagtaattttacttcccccacaaaagccgcccaccgcgagcccgccccacacaagcacacaacgcgcgaccaagcccaaataaatttggtgggcccctcccggcccctccaaaaactttttcaaaaccattttcttttggggcccgcggcgcccattatggtaacggaaacctgggccacaagtgtgcttcccaaaaaaactccgggaccctggactaggggctcgggatnnnnnnnnnnnnnnnnnnnnnnnnnngnggggcaaaaccgagagtgtttttaaaacaaaattccaaaagaggggtttctcggaggcacttacccgtggcttacatcaacccgggatctccaagcgcggctcct

SEQ ID NO: 360708 - DNA, 721 bp, Homo Sapiens
cgcggctccgaggcgtcacctcctcctgtcgcctggccctcgccatgcagaccccgcgagcgtcccctccccgcccggccctgctgcttctgctgctgctactggggggcgcccacggcctctttcctgaggagccgacgccgcttagcgtggcccccagggactacctgaaccactatcccgtgtttgtgggcagcgggcccggacgcctgacccccgcagaaggtgctgacgacctcaactatccatgcgagtcctgcgggtcaacaggacgctgttcattggggacagggacaacctctaccgcgtagagctggagccccccacgtccacgggagctgcggtaccagagggaagctgacctggagatctaaccccagcgacataaacgtgtgtcggatgaagggcaaacaggagggcgagtgtcgaaacttcgtaaaggtgctgctccttcgggacgagtccacgctctttgtgtgcggttccaacgccttcaacccggtgtgcgccaactacagcatagactaccctgcagcccgtcggagacaacatcagcggtatggcccgctgcccgtacgaccccaagcacgccaatgttgccctcttctctgacgggatgctcttcacagctactgtaaccgacttcctagccattgatgctgtcatctaccgcagcctcggggacagggccaccctgcgcaccgtgaacacatgactccaa

SEQ ID NO: 360709 - DNA, 452 bp, Homo Sapiens
  misc_feature (67)..(67): n is a, c, g, or t
  misc_feature (133)..(133): n is a, c, g, or t
aacgggcagagtttagggatagagaatagaagagccgggtaggaaatattgaacataccccaatatnggaccctacctctgttttagtacaaaaatatttctgacatctgaactagaggtcaagagaataaantccatgtgtatacatcctgagcaacctgtctttcagatgataaagtatcctagccttttctgacacccataatagttcattttgtagggaataagccattaggtgtatataattgctttctagaaatgacctaatgtccccaaccactttgtagtggcagatcactgtttcacagcatattttctcccaaggaaagtattcaaaagagactgcaactaacaagactcttatttcatcaaaatttaaatatttctgagttgtatttttaatgcctctttcttttctgcctaaatgcttagaaattataaagcaaaaaaaa

SEQ ID NO: 360710 - DNA, 1176 bp, Homo Sapiens
  misc_feature (97)..(154): n is a, c, g, or t
  misc_feature (551)..(639): n is a, c, g, or t
  misc_feature (739)..(752): n is a, c, g, or t
  misc_feature (806)..(815): n is a, c, g, or t
  misc_feature (900)..(919): n is a, c, g, or t
  misc_feature (1025)..(1059): n is a, c, g, or t
  misc_feature (1119)..(1128): n is a, c, g, or t
gggagcggcgcggggaggcagaggcgagcgcgggcgatcgcggcggcgggacgtctccggcggccgcggcaccagcggcggcgctctgtgtggagannnnnnnnnnnnnnnnnnnnnnnnnnnnnnnnnnnnnnnnnnnnnnnnnnnnnnnnnngccgcctctccgccgccggggacgccaaggtgcggctggtggcactgacatcggcggccctgcctctcctccctcgcccccggccttccccatgtgatcggtcttaatcctggccgtgtgtgcgcgcgtggggctccattccgcggtgctgggtctccgtgccggggtgggtgctcgtgtgtgcgcttctcctccccatcccccttcccccaagaataaaagaagaaccgggaggcgtgctcagaaaataaataaataaccaccacacacgcgcagccgggagcgagtcggcggggctggcggcagcggcggaggaggagtgaaggcggccggcgccggaaggaggggacccccgcgaaaaggccgcaactttaaagccccgctccgaaccctagannnnnnnnnnnnnnnnnnnnnnnnnnnnnnnnnnnnnnnnnnnnnnnnnnnnnnnnnnnnnnnnnnnnnnnnnnnnnnnnnnnnnnnnngccccggttccccgggatcccgagggatgggatgacaagatcccgggaaacccgggacccgtaatgccaaaatggggccggtgctacaccccttgggcgnnnnnnnnnnnnnngggagacaaaagcgcctttggggggaaacaaattgggcgccgcccccgtaaggnnnnnnnnnnaaaagggggcacaaaaactttggggaattcccccccgaaaaagggttggggttccccgcaaaccgcgaacacccctacacccccnnnnnnnnnnnnnnnnnnnncaaaaagcaatatggcctcgtgcaaaaacgtccacagcgggggccacttggcaggggggttcatccggcaacacgatctaccaggccgccccacaagcgcgggggnnnnnnnnnnnnnnnnnnnnnnnnnnnnnnnnnnnggggtttttccaaggcacacaagagaacgtggcttctgactacaaggacggccgacaaannnnnnnnnngcgggggatcattctctaaaagggggcggattctttcatggacaagaa

SEQ ID NO: 360711 - DNA, 668 bp, Homo Sapiens
ctatggcttccttgcgcacttctcaaaaacgatgaaagtcagaaggctgtcaaactcgaatatctttgcaaccactgtttgaatactgtgaattcatgacgaagaatgttcgagagaaagcaggggtctaatccaaaagaaatgtcattaaccaatactccaagtccttgagttttgttatatctgaactagttgaactgtgactgacaggtaatcctaatatatccaaatccaactgaataccaaattgagatggcaaatttttgtttgatataagttagcttgttagcatatgccctagagggcctccatccctgtattctaatgtttttactcaaagctctagcctttaggataggtgaatatgtaaatcttttatcactttctcaaattcaaactaaaggggaaagatcaaaccccttcccttcctacctgttttctgagctggctgacttgccagccacaagctgctcttgcagagttcttaccattcctgtaaatgttttgacttgttgcagaaattcctatctactttattaagcagtattgatctgactgtggaaacatcctctcacttgcattcttttaacttaaaactatttaagaactgatgttccgattattgtatatatttttctaaaaaccaaataaagctacctatgaaaatg

SEQ ID NO: 360712 - DNA, 467 bp, Homo Sapiens
gtggccggtacctactttccacaggatggaggccctctagggcatatgctaacaagctaacttatatcaaacaaaaatttgccatctcaatttggtactcagttggatttggatatattaggattacctgtcagtcacagttcaactagttcagatataacaaaactcaaggacttggagtattggttaatgacatttcttttggattagacccctgctttctctcgaacattcttcgtaatgaattcacagtattcaaacagtgtttgcaaagatatttgagtttgacagccttctgactttcatcgttttgagaagttgcgcaaggaagcaataggaattgccttagctttgttctaactcgacccttttcccccatactgtagtaactccaggcctacttctccagaagtatagctcttccctccactggtccttttcaggaacccctgtggacaaggggatcc

SEQ ID NO: 360713 - DNA, 205 bp, Homo Sapiens
ttttttaaaaacaggatgcaacttaaacttttctttgcatcaaggtatatgcaaaacattggtgccgtgcatcaccaaatgaaagtttgtatttaacgaggaggtgctttacactgtactttttggtgttttttggaaaagttacatttagatctattctgaagctgttcatttttaacaaataaaatgttacaggtttcacatg

SEQ ID NO: 360714 - DNA, 403 bp, Homo Sapiens
  misc_feature (86)..(86): n is a, c, g, or t
  misc_feature (207)..(207): n is a, c, g, or t
acctaaaggggacaaatattgtggctctggcctgtaagtccccatgacaaccccgtgtgctaaaatgccatctggagtggaaacanccttgaggccccggaaggaaaattgctgctgagcttggggagcagaaccaggagctgataagagccccctttcggccaccatgtggctcgaaatgtggccttgactaccttcctaaagcgncgagaggcttgggaacagcagcagggtgcggtggccaagcggaggcgggcattgaactccatacttgaagactgaggctttggatctgggacggggtgttgatgggggagggcaaaatggggtatccaccccatccctttcctggtttaaattggagtcagaagtcttagtggtaaatatttgatatttttattgg

SEQ ID NO: 360715 - DNA, 399 bp, Homo Sapiens
gcttgagagcatcatttatggcatggactgggaacgcaatgtgttcacacaaatgcacgacaattgtacatcagcatctttacaatattaaaggagccatatacaagtctacagccattgtacacaggatggtgatggctggggagccccgcccaccagtcctctgcagtttctccaccggagaacgcttggggagctgtcacaaggccagggggggtccatctttgggcctgtcgtgggggaggcagcaggtctgcaaggactcctcagggccagtcctcactggaatcaggggtcaagagcgccaggtctgcctgtgtctgggtctcattggcaggctagtgtaacaacggggagttaaaaactgtggcatatttcgcatgtgaaaacttggacttg

SEQ ID NO: 360716 - DNA, 434 bp, Homo Sapiens
cacgattctttgcattgttaaaatgattcaaacacactgaaagctaaataatatcaactctatagtacaatgtaaaattttttccagtgtgactgaaaaatcatgaggccgactttcatataattatagtttccacgattaaaatgtgtctataagagtgtatgtttttaatgtatattatacttactgtacatactggttactttattttaggcaataaccacatgaaagaagaaaattatgctgctgcagtggattgttacacacaggcaatagaattggatcccaataatgcagtttactattgcaacaggtaaactagcactattgtggcaggtttgcaattcttaaacatttagattaatagctctgaaggaaaatgcaaatcttaattatttagaaaattttgaaagttcagaaaaatataaagaaaa

SEQ ID NO: 360717 - DNA, 374 bp, Homo Sapiens
gtcatatatggagcgtccggccagagttggaagcgtgagtcagttcgaaattcagtttataggcaagtgacaatgtttctatctgaacctgagagaataaaaggtagttttgaattagacaaaatagacctaaaagttcaaacaaatggtggaaggattgtaaaaatcgtgcaaaaaattccatgtgtcgttatattgactaaattcaaaaaggtactacatggtttttctgtaaataaaaaattgaaataaaagcacaacaaggtactcgtaatgcactaatctgctttttagcaaactttgttaacggttataacagattgttgcttctttaaaattttggagtcattgtaacaaaataaataatttaggat

SEQ ID NO: 360718 - DNA, 573 bp, Homo Sapiens
ggggctgtgggcctgttacccccaggcgcagcagctccctccggatgggcccaggctccactcagtgacacggctcaagtctacatggagctgcagggcctggtggacccgcagatccagctacctctgttagccgcccgaaggtacaagttgcagaagcagcttgatagcctcacagccaggaccccatcagaaggggaggcagggactcagaggcaacaaaagctttcttccctccagctggaattgtcaaaactggacaaggcagcctctcacctccagcagctgatggatgagcctccagccccagggagcccggagctctaactcatcatccccatcagttttcctccctctcagacctgtctttgaggacaaacagatttgtcagctgtcagggtgcagtgggacgtcagagactatgtggtccatcgccttcattgtgtaaatgaggacacagactggcttggtcgcagtgactgtggtgtccttgagatgctcacattactgcccggcctgcctcccacctggaagtctgggaatgaggagattgagataaacttttgaaatccc

SEQ ID NO: 360719 - DNA, 420 bp, Homo Sapiens
  misc_feature (31)..(31): n is a, c, g, or t
  misc_feature (41)..(41): n is a, c, g, or t
  misc_feature (46)..(46): n is a, c, g, or t
  misc_feature (58)..(58): n is a, c, g, or t
  misc_feature (68)..(68): n is a, c, g, or t
ggcctcccctaaattggcaacattttttgcnccctcttggngcatnctgccaagaagnccaatgaaancccatgtatttcctatataagtaccttctacatttttaacctgtttccatttgtaatgatgcctacataattttgtggctccctaatgcaataatgtacagaagataaaaaaatttataattgaacaatttgtctttctgttcgctgaatatattgcaggtcatgctcccatgcccccctttctaagccgatatcaacaagactggaatgtttgtgatatcaggggcaagagttatcatagaacaacaaaatagagtggactcttttagagcatctatatctgcaacctgtaaatggtaaaatgtctgtgtatttttttaaatgtaccttttcaataaaagtacaaaaaata

SEQ ID NO: 360720 - DNA, 739 bp, Homo Sapiens
  misc_feature (112)..(112): n is a, c, g, or t
  misc_feature (216)..(216): n is a, c, g, or t
ttctcgtcattccacgatggtccggggaaggttgggatgtggaaagaattcctatgtgaaacggtcttcggaccacaggccgctggtggtggcattggatcctttaaaccgngaagtcttgtggtcagcgttgggggcccgggatgggcttggacggtgtgggaagattccccaaggattccacagcttgttttttatggccaccagggttccatnggctgcatccacataatcaatgaggagcacatggtgtccggcgcggacgatggctctgtggccttgtggggtctctccaagaagcgaccacttgccctgcagcgtgaagctcacgggctgcggggagagccaggcctggagcagcccttctggatatcgtcggtggcagccctcctcaacacagaccttgtggccacaggctcccacagctcctgtgtgcggctttggcagtgtggggaaggcttccggcagcttgaccttctctgtgacatccccctggtgggttttatcaacagcctcaagttctccagctctggggacttcctggtggctggggtagggcaggagcacaggcttggccgatggtggagaatcaaagaggctcggaattctgtctgcatcatcccactccgcagggtccctgtacccccagctgctggttcctgacactcttatcctccttatttaagtccttcccaggctatgccccaccctctttgtattaaaagcctcctcttttggg

SEQ ID NO: 360721 - DNA, 1349 bp, Homo Sapiens
  misc_feature (466)..(482): n is a, c, g, or t
  misc_feature (838)..(847): n is a, c, g, or t
  misc_feature (913)..(921): n is a, c, g, or t
  misc_feature (976)..(976): n is a, c, g, or t
  misc_feature (1099)..(1099): n is a, c, g, or t
  misc_feature (1149)..(1149): n is a, c, g, or t
ggcacctcccttgggcacgtgtgctgggataaactttccctatgggatttgcccacgtacccaggtctggctggggcccaggcccggatgcagaggcctgcagggcctctgtcaattgtacgcgccaccgagtgccttcaacacagcttgtctcttgcctgccactgtgtgaatcggcgacggagcactgcacctgcctccagccgccggctgtgcagtcctgggtcctcctttctgagggcccgtgtaaatatgtacatttctcaggctaggccagcaggggctgcccgagtctgtttttcatgcgatgacacttgtacaattaattatcttttcaaaggtacttggataataatgaaataaaactgtttttgaacctgacacaagaaaccgaaacaagccaagaacaaacccccaagggctcctccccacccccgacgttgctcggcggcgcaaaacgcgcgcnnnnnnnnnnnnnnnnnccttgccggcggcccccggggccccccaaaagaattttgcaaaaccgttgctgtgggcggcccaccggcccccgaaaaggagagcgggaaatgggggcgtaaagcgggttttcccgccgggagaaaccccgcacgcctctgggctgaagggcggctggaacttttcccccccaaaacaaaaaagagacgccccccggggcggggccaaaccccgcgggggggtggtctcgggacgcacatcgcccgcaaaaaaccaacacttccccttggcaccacacacaaactcaccccgcggcgcgcctccgtaagtgcgcagacagtggggggtggttactcaaacagaggcccgccggggnnnnnnnnnnaccaagaggcgcaccccttaaaatatttttttctctactccaacccggccgatggggcgccccccnnnnnnnnntcgagtgaaggggcgtgcgtcagcgctatcgcggggcaactggaaaaatgtcttntccggggttctctttgtacaaaaaaatgtcgcttcggctgcacgtgcgcggaccagaaccgctgtagttctaacgtaacccgcgaactccagccattttttatactaaataaatacgcgcccntttcttccttaagaagcacaaacgccgggtgggcgcctataagcgagggngggtggtgcccgccgcgcgggggtaatgatgccgtgacgacggggaggacgcgggggggtgtgtcctctaacaaacaccccttcttggtggttgaaactccccccgactgttaagcgctcgtaccaaaataaacaactttattgtcgcccgcccctatggtgtgggcgggggaacacagacagtagggggggaccagcac

SEQ ID NO: 360722 - DNA, 392 bp, Homo Sapiens
  misc_feature (262)..(262): n is a, c, g, or t
  misc_feature (277)..(277): n is a, c, g, or t
  misc_feature (285)..(285): n is a, c, g, or t
  misc_feature (311)..(311): n is a, c, g, or t
  misc_feature (342)..(342): n is a, c, g, or t
ttttttccccgtcagtcaatcttatctggtaatgggatcattactgttatccagtgtcaatggtctcagtagtatttccattcaaaaataatttagcttttagattaaggatttctctttttgttttattaaacattgaaaggtgggactttaaaaaatggtataaatctagattttaaggattcttttcttacaaactgtctcagctttttacaagaaatgtttaaataccaaaatgctgctcagaaaatttaaggtttanttgcccgtggttatnctactgtntctatcctaatgtgtgctcctctgtnctgcgtgtgtaagacgctcagttcatctgantgtttggatgggaagttttgtggttgagcctccaggcatagcactgggcc

SEQ ID NO: 360723 - DNA, 450 bp, Homo Sapiens
tgtttaagggctttatgtatgttaactttggagatgggtgccgttttccaggtgagggaactgaaacttgggggaaattaagtcagggtcacacagccagaaagtggccactaggatctcaaccaaggcagtgtggcttcagagtttgtgctcacaagtgctgtctgtagtgccattcaaataaaaaaggtcacatgccacaagctaggctgattcccagcaccttcccccaaaagaatgtaaagggaagaaccaggacactactatcagcaactctttatccagtttttcatggagacaacggttgacctgtttggacaatggacattacagtgattgattggcaggatgcatgacacgctgggcttgaaaagggactgtttgtatggcaccccactttttaccagcagagctctgaaaaaggcaataattagaatcatgcaaaagcat

SEQ ID NO: 360724 - DNA, 361 bp, Homo Sapiens
  misc_feature (92)..(92): n is a, c, g, or t
  misc_feature (171)..(171): n is a, c, g, or t
  misc_feature (183)..(183): n is a, c, g, or t
  misc_feature (196)..(196): n is a, c, g, or t
  misc_feature (208)..(208): n is a, c, g, or t
tacgagctctccacttcaaagttgtcctgactcagtagtctcgtgctctccggccttcagctcaggcgatgttgagcagaactggtgacacnctccccacagagacggcatcgggcctctctgttgcgggtgtcgctgattttaaacacggctgctctggcgacttacttncgcccgcctctncttccgagggctncttcgcacaganccggcatcatggctggatggctgctcagcaacagcctgagctgccgatcatggctgaagtctgggctgggctggcactggctggcatcctgggaggtggaagcaggtgtggtcagattcaaacttggcgggtagcgcagctgtggcgctgctg

SEQ ID NO: 360725 - DNA, 271 bp, Homo Sapiens
  misc_feature (190)..(190): n is a, c, g, or t
  misc_feature (206)..(206): n is a, c, g, or t
tctgttgtgaaatgatagtgatattcacttctatagtttaaaaatatgctctgtgcagcataaataattgataagcagtgttatcttgtactttcagattggagttgcctttgagagtcaaagatttgtagctcacagaaaataaagaagtactgtgtgggtgtgcctgggagggagttttgctaagaantcttactaaataaagntcaatcagtcaaatgttattgtactcttcaaattctccagggaaataaattgccagcttccattt

SEQ ID NO: 360726 - DNA, 466 bp, Homo Sapiens
  misc_feature (134)..(134): n is a, c, g, or t
  misc_feature (142)..(142): n is a, c, g, or t
ggaaagtgattcacccaaagtcacacagcaagtcatggctgagctaagcccaggattaagcttcctgactcccagttcaccatgaaaagggttctggcaacaggttcaagctggagaatccttcaaaatgctanacccacantctctccaactcttcatctcccctgaacttccagacaaactaccctggatgttgcccttaaaccatttctagctgttaaccctatccagaaaaatgattgagtgatagctgagaagtggaaagtgtgggatttttggcaggtgctctctttcctccgccccccgcgccattctttctcttcctcctctctgtaatggtatgtccagcctcactctccctccctggtgctgtatgcgttccccctgttagctacatttgtgatcacatacccttcttttaagtgaatttttttcatttgatttgtcaataaacgaatcaaactgg

SEQ ID NO: 360727 - DNA, 559 bp, Homo Sapiens
  misc_feature (82)..(82): n is a, c, g, or t
  misc_feature (116)..(116): n is a, c, g, or t
aaaatggtcccgggggcaaaaaaacggctttgaaaaagcccccctacgggtaaaaaggaagaagggggatgaaggcaaaacncccctaagccaaagggaaaaacttcccccaaaanctccggaaggcaaaacccctcctaaaagcccctattatttgaaaatgtccttgaaaaaccctcgtgcaggctcccttaattccttccctgaagtgcccatgggatgcctacaccttgaagctgacagtcatcaacaggggagcctaaagttgaaagcccagctgtgtgtagcagctgttacctgaagacgtgcctacctctctacaaagtgttgatccccttctttcccatgagagagagaactggtgatactccaacaccgtccagttgtggcagctctccagaagtaatagcagctgacaactttctgtgccttttcctttctgttgaaaaggcatagaaagttctgggaacataaacatttttacccttttctatgccatttattttgtaaaaatcctatttaacagttatttaataaaacaatatttttagaaaaaaaa

SEQ ID NO: 360728 - DNA, 584 bp, Homo Sapiens
  misc_feature (12)..(12): n is a, c, g, or t
  misc_feature (25)..(25): n is a, c, g, or t
  misc_feature (35)..(35): n is a, c, g, or t
  misc_feature (107)..(107): n is a, c, g, or t
ggcaagaattangtgtttggcctancatggacccntaacacatgggcaaggaacccctaattaaagggattggtcctaggcaaaaaaccagccttggaaaagccccntcagtaaaaaagaaagagtggatgaagcatactccttagcaaagaaaactttcccaaactcagaagcaaaccctctaaatgcctattatttgaaatgtcttgaaaacctcgtgcagctccttaattcttcctgagtgcccatgggatgctacaccttgaagctgacagtcatcaacaggggagctaaagttgaagccagctgtgtgtagcagctgttacctgaagacatgctacctctctacaaagtgttgatccccttctttcccatgagagagagaactggtgatactccaacaccgtccagttgtggcagctctccagaagtaatagcagctgacaactttctgtgccttttcctttctgttgaaaaggcatagaaagttctgggaacataaacatttttacccttttctatgccatttattttgtaaaaatcctatttaacagttatttaataaaacaatatttttagaaact

SEQ ID NO: 360729 - DNA, 443 bp, Homo Sapiens
  misc_feature (20)..(20): n is a, c, g, or t
  misc_feature (23)..(23): n is a, c, g, or t
  misc_feature (138)..(138): n is a, c, g, or t
  misc_feature (237)..(247): n is a, c, g, or t
cttcaaagtgattcctttanggnccacttgagcaatgaatagagtatattggagctttcctgtggctaagaagaagaaacatgtcatcctgttggcatcaccaagcacctaactctttctaggtaataaaaagtcaanggtcacttcaacgtaaatgtttaaaaccactctttagttaaatctgatgggaactgaacaaagctccaccattgtgtctgaaatcattttacacagggnnnnnnnnnnncaatcagcataattgtaagaatgatttttttgggcccacattcaaccaaagaacaagaaagaaacagacgattttctaatatgtacacagcaaactacagaatgtcatattatccacctgtgaaacatctagtaagcaattgcatctatactttatttctcaagctggcctgccactcatctctatgtgaaagccc

SEQ ID NO: 360730 - DNA, 1140 bp, Homo Sapiens
  misc_feature (550)..(607): n is a, c, g, or t
gcctgggtggcgaattcggcacgagggagcctgatggggggccggggcggggtgcccctctacgaccggaaccacgtcacaggggcctcgtccagcagctcgtcaagcacgaaggccacgctgtacccgccgatcatgaacccgccgccctccccggccacggaccactccctgtacaacatggacatgttctactcttcaaacattccggccactgcgagaccgtacaggccctacatcattcgaggaatggcgcccccgacgacgccctgcagcaccgacgtgtgtgacagcgactacagcgccagccgctggaaggccagcaagtactacctggatttgaactcggactcagacccctatccacccccacccacgccccacagccagtacctgtcggcggaggacagctgcccgccctcgcccgccaccgagaggagctacttccatctcttcccgccccctccgtccccctgcacggactcatcctgacctcggccgggccactctggcttctctgtgcccctgtaaatagttttaaatatgaacnnnnnnnnnnnnnnnnnnnnnnnnnnnnnnnnnnnnnnnnnnnnnnnnnnnnnnnnnnccatgagaaatgtgaactgtgatggggtgggcagggctgggagaactttgtacagtggagaaatatttatacacttccgttttgtcaagacccaaaaattaactaaagacgcactcccgggcattcatggccgggagcgcgaaaaaaacgcaattgaaacgggcccttgggccaaacggtggttttccgcacccaaatttttttgggccaaaaggggaaaaaagctggcccgtttcccccctagaaggggggtcgggctttaattgtcccacacaacccgaggcgataaccatgccgattacaatgaatctcgggctcgaaattcacccctacgagagaatttagcccgtgcctctaatgggctcacggcggccttctttcaggggagaatcccacgaagattaagtgcacaggaataccagccgattattatctaggaaatcaaactctgtcctgcctgtgcgtatacacaacacgactccggaccccaaagcccatcctacggtgttacattgatccggatctcactcgat

SEQ ID NO: 360731 - DNA, 1262 bp, Homo Sapiens
ccggtcgacacttcctggcctctggcttgtccttcctcctctgcctctgttgggcccttccccccggtgccttttcctcgaatcctttctctccattggtcgctgtcctcgtctttgggctgtgttttttcttgccttggctcaccgatgcccgttccctgtgtcctctgtgggacttcatgtgggaattgttgtctttgtgcatgttcgttccctcttatctcccgtctatggcgccttgtgtgtgcttttttgctgccgctctgtgtggtctcggcagatttaggcttcagctgggtatacgcagggtacctgtggcgttgttcctcgcgcgtgtgccatccccgttcccttgtggggccctcccatattcaatcatcccttttgatgcaattccccgtgttctgggaactttccatgtagtgggcaactaatgggtcggcgaacgatggagtgaaggtttcgaaggaaccatgctctccccgtcgttggtatgatgcctctctatggccctccttgggaaggtcagcaacagagggagggatgtggattactgtcgccggctgatttgtatgcactgtggtttggtgtacgcccgggtgcctcggtttgccaaacttttgcggcttctgcctgttgtcgaccttcttgggtgcaacgtcaactcgtcccttcttctggggcaatcgtcctgcctagcaaatggaccaagattatctttcagaggtcacctgaaagacatgtgattacattgcacctgcttttagtaatggtaggattgttcttcccagggacctcccgtatcaccctatctctgcttctttagaggtccctggagccccaggtgggctgaggggcagggagccggctgtgcccagtatgcctcctggaccctccagttctgccacaggtctgccgatgccctgtccactgcctacacatgacagacaagtaaccccctcatgggggatggggacctacctggctcctcagccagcacccagcttaacccctgccatcccatgctgggccctccaggccaagagtctcagctggccgagagtccaggccttgcctcccccgaccgccatggagggggcagcccggcacagctgctgggagcccttgtgtgtctggtcacactttttaggcgtcacgccaaaggccagcctcctggccccaatacccattttggaagcccctgtggccgtgtggatgtcggtaacagttgtataaaataaattctatttatcgctattgta

SEQ ID NO: 360732 - DNA, 580 bp, Homo Sapiens
tccagaacttccacggtctggccccgtcggatggtacagctacgttgctgttgcaagcggtgaagtcatggatcaccactgtcagctcacagccaccagagagcttatcgctgtccagcgtgttctgagacgtccgtgaggcgatggaaatcgtatcaggctggctgctgccgtctccttggctgtccagatcctctccatccctccttcccttctgtcttgtggcgggagcggtcttagggatgtgaatgggctccttcagggctcccttcaggtggatcgtccgctcctggatgacttcgcggatatgctttatccagtcctgcttgttctctatgctggaagccttaaggacattttattatctgaagttggtgttctccccacccacagtgcaatttgcaagggtctccttcaacatgttctgtgacacccaactctgaggtaaacatttgcttttataaaggtacttgcttctcccactggaatctttcacttctttactaaatactaaggacatttcaaaaggaagagatgccgttctcgaccctttcgaattaagtttttgggtcccacactg

SEQ ID NO: 360733 - DNA, 364 bp, Homo Sapiens
  misc_feature (26)..(26): n is a, c, g, or t
cgctgtctcccaaccctacctaaccnaaacctctccaccaaatcgctcccaattttgagacccaaaagctggcgcttctgacttcaggagcgaaaggaggaggcctagtttgggccgatgtattttaaagcagagtggacagcagagagtcaatttccctttcgttgggagtgggcagtggggtggctaattgtcttcggccaaccaggggcctgttgcccaggcaactcaccagctccgcctctgctgattggctgccacggtgggagtcagccaagatttaaagggatgccagcgattgctcttttcaaaacctaccagtcccactgtgggtggagaaataaatggtctttctccaaaaaaa

SEQ ID NO: 360734 - DNA, 1055 bp, Homo Sapiens
atcaggccaaatcggccgagctcgaattcgtcgagagcgggtccctgcggccgccagagggagggttaaggcgcctgggcgcacagcgagccggctgagggggctgtggcggccgcggcgggcgacatggacaacgcggggaaggagcgtgaggcagtacagctgatggcggaggccgagaagcgagtcaaggcctcccactccttcctccgagggctgtttggaggaaacacaagaatagaagaggcttgtgaaatgtataccagagctgcaaatatgttcaagatggctaaaaattggagtgctgcaggaaacgcattttgtcaggcagccaagctccacatgcagcttcagagcaaacatgactctgctaccagctttgtggatgctggaaatgcttacaaaaaggcagatccccaagaggctatcaactgcttaaatgcagccatcgacatttacacagacatgggaaggtttacaattgcagccaagcaccacattactattgcagagatctatgagactgaacttgtagacattgagaaggctattgcacattatgaacaatctgctgattattacaaaggagaagaatccaacagctcagcaaacaagtgtctgctgaaggtggcagcatatgctgcccagcttgagcagtaccagaaagccattgagatctatgagcaggttggggcaaacacaatggataatcctttgttgaaatacagtgcaaaggattacttcttcaaagctgccctctgccacttcatagtagacgagttgaatgccaagcttgctcttgagaaatatgaggaaatgtttccagcacttactgattcaagagcaatgtaacattattgaaaaaactcctagaagctcatgaagaacagaaccgtgaagcttacactgaagcagtgaaggaatttgactcaatatctcgcttggatcagtggctgaccaccatgttgcttcgcatccaaaagtccaatccaaggggatggagaaggagatggagacctaaaatgaaatgtttttgtcttatgcatcgataaaca

SEQ ID NO: 360735 - DNA, 355 bp, Homo Sapiens
  misc_feature (231)..(231): n is a, c, g, or t
  misc_feature (312)..(312): n is a, c, g, or t
cctcctacctccgcgtcctccttctcctcctcctcagcggtgactttccaggtggagcctttgaattttttaaaagaccatagtaatcagatctacttgaaaaattaagtgaattgatttggttggaatgctcttttaccgatgctttaacatacagccactagattcccagaagttgtgcatgagttcctgtgaggagagttggcatcttggaaatcaaagacggttgtnatgcagttttttgatatgaggataacaggaagcgtcaggacaatcatgcccataagaactctaaactgttcagatcatttnatcttagtgaaactggcaattgaactttgctctagttgatggg

SEQ ID NO: 360736 - DNA, 965 bp, Homo Sapiens
ctgccctggtgcatggccttagctttctaggccactgggagttgtggctgggcttcccatcttccacagagacatctccctgtgggatgggcagatgggcctggccttgagaaaggcattggccattggttgccatggtgaccagggaccacgttgctgcctgtaaatgctgagtgagcgagtaagggaggaggggcgattgagggttcacctctgccttggggaggctgatttctcacacactggctggccctcttcattctcactcctccttgggccctgaggctgctggatccagtctgcctgcctccctgtgcagtccagccctgccttgctgcagccccagcccagatggcactcagcgctctcccctgagggagtccctgggcctagccatcccctcactattcccgacccaaagggtgacttttcatctgaacttaaggtgggagatatttttaacttttttccactttggaaaatgtcactgtgacaaaagccagcatactttccctgcacccatctgctcaccagatctcaggcaggaaagcccctctctgttgaagtcaggggctatcttttggtatacttgtgtgaaagtggctggttgggagcagagctaagtggcttcccattaacctgaggtctctttctttactctgggtcagacctgaggttggggaaggcgactgagccatgcttcagaatgtctggtcctggcttgggcctgagtagggcagagagggcctttcatggctgatcagagcttaccagccccaccccaccatggtagccttagggtgctgagtgcctgatactgcctgacaagtgcctgacacgcagcctagttccttcctggcccctctctcactggctgggaaaccctagaccatgtcagataggacaacactgctgggttttacatccagatagtaataaacaccatttcatcattttaaaaaaaa

SEQ ID NO: 360737 - DNA, 776 bp, Homo Sapiens
  misc_feature (29)..(29): n is a, c, g, or t
ccgccaaccctctgtagagaaatcccagnattggaagtctggtttgaatctttgaagacagaaaggtgatatccggcctgctgttttaaagggaccacacttttgaatacctactggtgtttggcagaaatctgagactggcaccagacacaaattttagacatgggtatcttccctccagtaattcactgctcagagtaatttagaagacaaaaacagaaaaaattgtaatgattttttaagtgttagaatatgtttgttaacatactctgcaaaataaatttcaactaatgcaatagacttaaaatatagcctacggaatactgtgattgaagtttgaaggcttgctggttcttattttgcatgcaagtttagacagggtaaagaatgtataaatttatttgagatgagatacagtattgtaaaaatataacctcatctagaattgcttttaaaacaagcaaaagcctattttagtacaaatgtagggtgggtagttgttttaaggtagcaaaatacttcaagattttctatctttttaatttttcatgaagacagaagaaatactttcaccccaaccaatgactgtaagatcttgagagtatgttcttactcatttctgtaattgcagtagtgtagtcatctgcatataaatttaataaatgcatgttaaaatttaagttgatgccttttagtcctctcagagtctgtcacagtttctttgtgtaaatgataaaaaagtttgaatttaatcaataaaacttaaaaatcacaat

SEQ ID NO: 360738 - DNA, 693 bp, Homo Sapiens
acagtttatcagttattacaatgactttttaactttttaaggttattcctccaaaatgctttacccccaaactgcccttgctgtaatgacaattattgctgtttgcagttaatactggtacagtgaaatgtcccagggcagttgtagggtcaatccaatgaaagtagctactgaaatttagtcatcagttacctttgcctgcttagactgactagagctggattcaaaggttgcttaaaaaacctgtcttccacataacaaagtgctgctctagcacaacctgagaactaccctggccacagtcccttccaaaataaacctacaggactttattctagcactgacctcttacagttatgccatcccttgaaataactttttaagaatgtcgattctgagtataaatcatggattgcactgagatatgcaaaacctacatatgtattatgaatcacaggaactaccacttcattctgagctatattatgttctcatttgaaaacacaccctagccagcgtattttaacctatgttataaaggtagttcacactataacattcccaaggcatgttgcattacagttaggtgtttccaagtagtacaaattccctgagttaaatgtattttcacccttcacacagatctgtatgttgatcccgtaccggtcccaaagttcaattatgcccggtgga

SEQ ID NO: 360739 - DNA, 532 bp, Homo Sapiens
  misc_feature (28)..(28): n is a, c, g, or t
  misc_feature (77)..(77): n is a, c, g, or t
  misc_feature (132)..(132): n is a, c, g, or t
  misc_feature (406)..(406): n is a, c, g, or t
  misc_feature (432)..(432): n is a, c, g, or t
gtggcaacttaatgcctcataggcattngtgggtactcaatttccagctacagctttgtgttttttgaactgatgantcattcagccagacattccctgacttggaagtttcctgatcccattggcaacacnacccaaatgttctgagcttaatcctttggaaaataaatggactccttgttcccactgagacctactcctatgttgaaacataggtttcaactcctatgttgaaaaccagggctaactaatttctaaagccagacagggcctaaattgctattttttgggtcaatgtctatctatactatttcctacctgttaaaagacctgtagaaatgcacctatataaaatataggtttattgttactttgtgtcaatggcatgtattattttggactattnctagaaaagaaattacgttggaattnccaatgtaaacatgtttgtgtgaatcagtaaccttctctttcttttgtatgtcataagaaagcaacaaatgagttgttaaatgctaaaattaaacaccat

SEQ ID NO: 360740 - DNA, 813 bp, Homo Sapiens
  misc_feature (784)..(784): n is a, c, g, or t
ccgtgtatcattgcggtttcctctcggccggatgcttttcccgatgtgtctttcgtcgccctctggtcgtcctcgtcctcctgttcctcctcccgctgcaacaggtctgctttccagcccgcagaggggcttcagccgcaagccctcggggggcgtgtcacactgccacatgcaacagcactccgtcctggctgagtgagtacaggtccaggctgttggattcaaagaagcaggccacgatggcatccttatgtccccccagtgcatagtagatgaggttgtcccagcgctcggctccgaacacccaggtggacatgtctttgctcccataccacaaagcacctggagtcatccgtccagtcgatgcaggtggtctcatcgtagggcccaaaataggtcttgtcccagaacgaaggcgttgaactcccgcttcttcccaggggcatgatacatctgggcaatgttaccctttgtgacaacaaacttcctgccatcaggggagaaggacacactgtgcacagagcccttgaagtggaagtggtgcagcacagacctgcagaccaggctgaccagcagcgcatcgcccccttcatcgacgatgatagcgaggcggccatccggggacagccccacgcacttgacgttgtaccgagtggccaggggcagcgtgtcagatttgttgtttttaaggtcaaatacagtgactctattgcccacgggactgataactgaatttccattgcaggtaaaatttaggttcccacgccggtacaccgtacccagnaaatttgaaaaccggtaagcgaacttcat

SEQ ID NO: 360741 - DNA, 2050 bp, Homo Sapiens
  misc_feature (862)..(862): n is a, c, g, or t
agcgggctgtgggcggtgccgcgcggacccccgggaagtgtctctgtgggcggccgccgggttgagctgcggcacacgtgcgacggccatgatgaaggttcgcttaccggttttcaaatttgctgggtacggtgtaccggcgtgggaacctaaattttacctgcgatggaaagttcagtgtatcagtcccggtgggcgaatagagtcactgtatttgaccttgaaagagacaacgaaatctgacacgctgcccctggccactcggtacaacgtcgaagtgcgtggggctgtccccggatggccgcctcgctatcatcgtcgatgaagagggcgacagagagaccagccatccggggaaaagccactccggccgaggaggagaagacaggaaaacgtgaagtactcacggctggccgagtacttcttcaataaagaaggggattttaacgaacctgacgagctgcagcgatgtcataagaagtctcacctcttggtcactggctttgcttctggaatcttccatcgttcatgagcgtgccagagtttaacctcatccactccctgagcatctcagatcagagcagtcgacctcagtggccatcaatagctcgggggacttggattgcttttggctgttcaggcctgggcagctgctggtgtgggagtggcagagtgagtcctacgtgctcaagcagcagggccacttcaacagcatggtggccctggcctaactcgcccgacggacagtacatcgtgactggcggggacgacggcaaggtcaaggtgtggaacaccctcagcggcttctgctttcgtcacttttacggagcactccagcggggtgaccggtgtgacctttaantgccaccggctacgttgtgggtgacctcatccatgggacggggaccgtgcgagcctttgaccttcacaggtaccgaaacttccgcaccttcacctctccacgccccacccagttctcctgtgtggcggtggatgcgagcggtgagatcgtctctgcaggggcgcaggactcctttgagattttcgtgtggtccatgcagacaggcaggctccttgatgttttgtctggacacgaagggcccatcagtggtctgtgttttaacccaatgaagtccgtcctggccagtgcctcctgggacaagacggtgcgcctatgggacatgtttgacagctggaggaccaaggagacgctggccctgacctctgatgctctggctgtgacttttcgccctgatggtgcggagctggctgtggccacactgaactcacagatcaccttctgggaccctgagaacgcggtgcagacgggctccattgagggcaggcatgacctcaagactggcaggaaggagctggacaagattacagccaagcacgcggccaaggggaaggccttcaccgccctgtgctactctgcagacggccacagcatcctggcgggaggcatgtccaagttcgtgtgcatctaccacgtccgtgagcagattctcatgaagaggttcgagatctcttgcaacctgtctctggacgccatggaggaatttttgaaccgaagaaaaatgacagagtttggcaacctggcactaattgatcaggatgctgggcaggaggatggagtcgcgataccactgccaggcgtcaggaaaggtgacatgagttctcggcacttcaaacctgagatcagggtgacctcactccgcttctctcccactgggcgctgctgggcggccaccaccacggagggactcctcatctactccctggacacccgcgtgctctttgacccgtttgagctggacaccagcgtcacccccgggagggtgcgcgaaggcactgcgccagcaggacttcaccagggccatcctcatggccctccggctcaacgagagcaaactggtgcaggaggcccgggaggcggtgcccaggggcgagattgaaggtggtcacctcctcccttcctgaactgtatgtggagaaagtgctggagtttttagcttcctcctttgaagtgtctcgccacctggaattc

SEQ ID NO: 360742 - DNA, 441 bp, Homo Sapiens
  misc_feature (341)..(341): n is a, c, g, or t
  misc_feature (360)..(360): n is a, c, g, or t
ctcatgaagaggttcgagatctcttgcaacctgtctctggacgccatggaggaatttttgaacccgaagaaaaatgacagagtttggcaaccctggcacctaattgatcaggatgctgggcaggaggatggagtcgcgataccactgccaggcgtcaggaaaggtgacatgagttctcggcacttcaaacctgagatcagggtgacctcactccgcttctctcccactgggcgctgctgggcggccaccaccacggagggactcctcatctactccctgggacacccgcgtgctctttgacccgtttgagctggacaccagcgttcacccccgggaggttncgcgaggcacttgcgccanaggatctttcaccaggggccatccttcatgggccttcccggcttcaaacggagagcaaacttggttgcagggaggcccttg

SEQ ID NO: 360743 - DNA, 879 bp, Homo Sapiens
  misc_feature (377)..(386): n is a, c, g, or t
agcggtggtgtgctatttttgctgtcttgtgatgcaggctgctttgggcccctgggtcactcttccaaggctgctgtagagcacagagacatggggctggccagtgttgactgacctgaggagacccctttgtttgttgccttcataactgtcactaaaccgacccctctgccctttcagtggcaactctggtctaagggaacattcagcactctagcggcatctgattggaagttccctcacccaagtaatctcaattccttcctctctccatccctgaaagaaacaggatggattttcctctcttctccctgctacattcactaccagatttttatgctacagtttcattcttgattgtgatttctccatggaannnnnnnnnnctggtgacatttctatcatggaaataggaagatttcggagtgctttgtgaagatttcaattgtctgtctctttctctctttgacttgtatgaaggagattgtacattgcctgatatctctttgtaaatgagaaatattgctaacatccaagcattctgaagtcttgcttatccttctgagtttagttctcattttgttttacattttgtttggggacttggggcaagctatttattagagttttgcaacagagttcttgtttgaagcctctaaagactacctgtaaaattcaaagaataaaattcattttaaacgctcttttaaaacactttggtattattgcttgaggtttgcttatttgaaagaccacccaataactcattgaccctccttgcatccgaattttttcatcaagctttgttaacactaatgatgattcttgaaaatttctgtccttctcagaatgttaataaacttttttactctgtccaca

SEQ ID NO: 360744 - DNA, 560 bp, Homo Sapiens
  misc_feature (96)..(96): n is a, c, g, or t
agaacagcttttgtaagggggcactgagtgtctcaaacagccgcatgggcaggaagagtgctcagtccagttttggttgaatttgtcttgttgccntaaggcctcctatgaaagactgacaggcttggactgaatcttgtgatctggacaccaagggtcacctgtggccccagagctagctctgaagaaaaggggtagtttctttgagaacctccacagcaaaagtttggtcctctgttcccaatgcatgtcccactttaccagctacatcccccagtacctgcccatggctcatgactcatgaaatataaaactcagtaggcaggcataactggttcagacctgccagggctatgtgggaactatcattggtacaaaaactctaagtgtggagaagactgtggtagacaagaggggacatgtctgttctaaacgcacatcagaaacttccaatgactatggccaagtgagataagggtgtacagaacttctcaggacatgcagacctatgtgtcactcataactgaaattcaaataaatattttgtggatttcctgtgg

SEQ ID NO: 360745 - DNA, 254 bp, Homo Sapiens
ggggtacaggtggtgtttggttacatggatgagttctttagtgatttctgcgactttagcgcacccatcacccgagcagtgtacactgtacccaatatgtagtctttcatccctcaccccactccaagatttagttctgccagacgatacatgttgccttcacttctttttagtttatttgcctggacccatctaagtcatacttaaaactctataaagcattttttttctttgaaatggtctcagctccttct

SEQ ID NO: 360746 - DNA, 446 bp, Homo Sapiens
catgttgcacaaccaatgcttcaaaagttgaacaaattgggctgtgacattttgcctcatccgccatattcacttgacctctctccattgactacgacttcttcaagcattgcgacacctttttgcagggaaaacacttccacaactagcaggatgcagaaaatgctttccaagagttcgtcgaatcctaaagcatggatttctacactacaggaataaacaacttaaaaatgtgttgattgtaatggtttctattttgattaataaagatgtgtttgagcctagttataatgatataaaattcatggtctgaaaccgcagttatttttgcatgaacgtaaatgatgaattttagatgctgaaatttctgggcatctaaatcttctttcacatccctgattatttttggaataaactccctgtggaaaagtagggtaccgagctcg

SEQ ID NO: 360747 - DNA, 925 bp, Homo Sapiens
  misc_feature (785)..(816): n is a, c, g, or t
ggtgaaaaaagcctggataagtgggtgccctccatggagcctgaagtgaaaaatttttaaaaaatatccattttgaaaatggccaccttgacctaattcctatgccaacaacaacaaccccatttcctctatcagattgtgacatgtgatgaaaaagtggattttatatgacaaccggcgacgatcagctcagtggttggattgagaagaagctccaaagcacttcccaaggccaaacttgcaccaaaaaaaggtcatggtcactgtttggtggtctgctgctggtctgatccactacagctttctgaatcccggtgaaaccattacatctgagaagtatgctcagcaaatcaatgagatgcaccaaaaactgcaacgcctgcagctggcattggtcaacagaaagggcccaattcttctccacgacaatgcccgaccgcatgttgcacaaccaacacttcaaaagttgaatgaattgggctacgaagttttgcctcatccaccatattcacctgacctcttgccaaccaactaccacttcttcaagcatctcgacaactttttgcagggaaaacgcttccacaaccagcaggatgcagaaaatgctttccaagagttcgtcgaatcccaaagcacggatttttatgctacaggaataaacaaacttatttctcgttggcaaaaatgtgttgattgtaatggttcctattttgattaataaagatgtgtttgagcctagttataatgatttaaaattaatggtccaaaaatgcaattacttttgnnnnnnnnnnnnnnnnnnnnnnnnnnnnnnnnttctggatttgaattccatgttgattatatgcacttggaatatttcttttccatctgtggattgttctgtcacttattttctttaataaatgggtttctgaacaaaaaa

SEQ ID NO: 360748 - DNA, 724 bp, Homo Sapiens
  misc_feature (129)..(218): n is a, c, g, or t
ggcctgggtggcgatactagcacgaggcggggaggcgccgcttccgagcccgcggccagacgccccatcagtagcgtccgcaccgggagccgcggctctcgcccgagccgtgggcgcgcccgaggggcnnnnnnnnnnnnnnnnnnnnnnnnnnnnnnnnnnnnnnnnnnnnnnnnnnnnnnnnnnnnnnnnnnnnnnnnnnnnnnnnnnnnnnnnnnggaaacgcggccgcgggctgcatgggcagcgcccgcgccccgccgctgagccgtcgcggagccgcgcagccctcggagcacgaatatatacagccctgctctgggacacacctccattggatttaaaagacagtcctcgtcagcactgactttcagctatggaatcgcagacggttgatgatgaagcgccggccgtgtaaatgaagatcgggtgaggagcaggacgatgcccaagggtgggtgccctaaagcaccacagcaggaagagcttcccctcagcagcgacatggtggagaagcagactgggaaaaaggataaagataaagtttctctaaccaagaccccaaaactggagcgtggcgatggcgggaaggaggtgagggagcgagccagcaagcggaagctgcccttcaccgcgggcgccaatggggagcagaaggactcggacacagagaagcagggccctgagcggaagaggattaagaaggagcctgtcaccccgaagg

SEQ ID NO: 360749 - DNA, 471 bp, Homo Sapiens
  misc_feature (24)..(24): n is a, c, g, or t
  misc_feature (77)..(77): n is a, c, g, or t
tgtgggtgggtgcaggattgtggnccctgtggaggtaatgtggcgggagtcgtgttaacagcaacacggaagttgtngcttgcttcagcgccaggacgtgacacctttctcctcctatattgcttctgtcctgggtaactccaggcaaaacagatttgtatgtgagctgtgaccaggtaggaaggccggcctcgggggtcggaacccaccatggttgctggtgtccacgttgcccattgctcgcacactcctcgtgctgtgttgtcatgcagatgccaccttcggaggtgccctccgctgtgtgagacacacgccggctgcctctcagccaccgtgtgtctgtggtgtgtgatcccgggcgtctgtccctcggcctcgtacatccatgtctctcgtgaagcccgtggccctgcctttctacttctgtaacctgatggctggtctggaggactcttttctttctgttctcta

SEQ ID NO: 360750 - DNA, 360 bp, Homo Sapiens
gggcacagggccgggcaggcagcctggtgccggagagacggtgcgtgctggtggtggttgagatgcacagaacagccccagacagcgcaggccgggcagggtggggggatgggagcagaggatcagagctttctttttctcaagtgcaataaatctatcagggagctggggcgggagcagccggcactccgggaccctgctgtccaggccactggaggctgcgccctgagaggcactacagccctttgggggcgagtggcatgggtgtgggtgagggtgggcagagggctggggctactcctgtcggtgcaactctgttcacaccttttctaataaactggggctgggttcactttgccc

SEQ ID NO: 360751 - DNA, 348 bp, Homo Sapiens
cccaccattagccataacatagggaaggcccatcacttggctctaagccactattgtctataaaaggtataattccctgttgacactgtgcaggtctggcgcccaaagagaaagccaaagctgtccgtctttgcagacagacagagaggacccaggacacagctcaggccactcgtgcctagagagagagaaagagttaagctgctgaccctgaaggcagggaagagccggctgcacagctgtgtggggggctgccaggctaagcagccaagacaaggcagacagtgtagacagctagtgtgagaaagctgttaagagctggtgctgaataaaatcatattcacctgc

SEQ ID NO: 360752 - DNA, 929 bp, Homo Sapiens
ctggtcccctccttgctattcacagctacatacaacgtggccaaccccagtaggctgatcctatatatgatcagggctgggtgctgactctcaatagccccacccaagcgggctataggtttacagatacattaattaggcaacctataatatggatgctggtgtgggtgtgacataatgctatggccagaactgaaacttagagttataattcaggtattagggttctccagagggacagaattagtaggatatatgtatatatgaaagggaggttattagggagaacgggctcccacagttagaaggcgaagtcgcacaataggccgtctgcaagcggggttagagagaagccagtagtggctcagccggagttcaaaaacctcaaaacgggggaagcggacagtgcagccagccttcagtctgtggccaaaggcccaagagcccctggcaaccaacccactggtgcaagtcctagattccaaaggcggaagaacctggagtctgatgtccaagagcaggaagagtggaagaaagccagaagactcagcaaacaaggtagacagtgtctaccaccacagtggccataccaaagaggctaccgattccttcctgctacctggatccctgaagttgccctggtctctgcaccttctaaacctagttcttaagagctttccattacatgagctgtctcaaagccctccaataaattctcagtgtaagcttctgttgcttgtggacagaaaattctgacagacctaccctattagtgttactgtcaggataacatgagaacgcacaacagtaagtggtcactaagtgttagctacggttattttgcccaaggtagcatggctagttgatgccggttgatggggcttaaacccagctccctcatcttccaggcctctgtactcactattgca

SEQ ID NO: 360753 - DNA, 328 bp, Homo Sapiens
  misc_feature (20)..(20): n is a, c, g, or t
  misc_feature (30)..(30): n is a, c, g, or t
atacctttataagtacattncttattagcntcttatcccaggtagagattataaaaatttgctgcaagtatccagaccagaatttatgttttggaaattatcagtgttcacaatacctgcagggaagaaaaaaatacaaaaactcaaatatgaatactctttacacccaaaagaatatttttatcattcttttatttgtttttggctctgtcaaaaattaaagtgcttggaatgctgtagtctgtggtctcttgaaatttaatcaatgagaacttagcattttcacagtatgctgtcactttggacattcataataaaaattgaaact

SEQ ID NO: 360754 - DNA, 465 bp, Homo Sapiens
  misc_feature (22)..(22): n is a, c, g, or t
  misc_feature (300)..(318): n is a, c, g, or t
agcttaacatttaagtccctgnagaaagccatggccccattgtcttgcaaatcccagggaggaggacagaaggcccagctcacatgtgagtccctggcagaaagccatggcccatgtctgcacatccagggaggaggacagaaggcccagctcacatgtgagtccctggcagaagccatggcccatgtctgcacatccagggaggaggacagaaggcccagctcacatgtgagtcctggcagaagccatggcccatgtctgcacatccagggaggaggacagaaggcccagctcagtggnnnnnnnnnnnnnnnnnnnacgcccgaacagcaggggcagagcagccctccttcgaagtgtgtccaagtccgcatttgagccttgttctggggcccagcccaacacctggcttgggctcactgtcctgagttgcagtaaagctataaccttgaatcacaaaaaaaa

SEQ ID NO: 360755 - DNA, 614 bp, Homo Sapiens
  misc_feature (37)..(37): n is a, c, g, or t
  misc_feature (46)..(46): n is a, c, g, or t
  misc_feature (61)..(61): n is a, c, g, or t
  misc_feature (72)..(72): n is a, c, g, or t
  misc_feature (87)..(87): n is a, c, g, or t
ccacccaaaaaacacctgcctaattgggaaaaagccnggtgaaganttctgtttctcccancccaacctgtncaccctgtgggaaancagcgaatgggaaagggaaaaggggaagtccacatgtttctccacgcccgaagttccttcccagaatccccaaagaaggctcagaaggttgtgaaggaagaacaaagtcagctcaggtgagacaccccttccccaccctctacactggtgacacaccccaggatttcggggataaaatggggccatgagggatgtggccaagcctcccaggaaccagcaaagagcacgcctgagtccagcagatgctcgcagggctgtgacgtccggtgcaagggcacgtttcagcactttttctgagggccaaaggctgggcgatctgattagctgctcccaccctagagacagcccgacagcctcggcacaagagcagggctgtaggaaagccatcatcaacaaagccaggcccagagccatcccacctttccctgcaggcttagggttttgagctgagacaggggcagactgtagcccccagtgcctgaggttgctacttaaggagatgcctttgcagagaggggcggagacag

SEQ ID NO: 360756 - DNA, 390 bp, Homo Sapiens
  misc_feature (86)..(86): n is a, c, g, or t
tgttgagttactttaggtcaagatccgtgtctcagtgatggaaaaatgaatgacaaaatagaaattggataaatgggaaggaaggngtgatgatctaacatggctgggggtcagtggggaatcactttcattggccagaatagagagctaaataaagtggcttaaaggcattagaggttcatttgcatgtggaaaaagcctggaggtggatggttgagtgctggtgtgggtgccacaatgtcatcaggagcccgggctctgctgcgcagcttggccacctttaatgcaaagtttccctcttcagggtaatctcgtggctcaaaatggttgctggagctgcagccatcttatccatttcaggcaagaaggactagagaggtcagctggtac

SEQ ID NO: 360757 - DNA, 412 bp, Homo Sapiens
cacgccccacccccactcccccagagtactccccactgtgaaaagagctggaaactaaactggttagaatgaacctggctccctgagcatccctggatccttcaaataggccctgagatgtgaggtctgctgcttcactggggcccgatgactttggctgggggagggggcctagggcctcttctcattgaaagctctgctttatacagacccaagcatacacaccaggccgtcactttgggttctggcataagttcagaacaattcaagtccatgtgtcccatggctggtcagagccctgggtcaaaaccactcagcccaggggaggggatgaggcattgtcaccctagacccctcttcctctctcccccaccatagtgtgcaataaagtgtctgttcttaccaaaaaaaa

SEQ ID NO: 360758 - DNA, 437 bp, Homo Sapiens
gggaaacaggcagggaaaacaatgggtctagcaggacaaaagtgacatttcccagagtttcttgctgtttggatctggctgcagtttcagttttgccaagaagaggcatttccatgagctctggacagtggcagagaggcagaggtgctccactgcagtgtgcctggatggtccacgggctcctgccaatgtgaggatttgcagcaactggtatatccatggtcttgtcaccagcttcctgaattcggggcagctggagccacactagtggtccttccttgtaggggcagcagctgtctcctggtctcagaatcacagctgtggggatgcaaccttaagccaaaagcctagcggtgggtggtcctaaacttcttttgtctaggccctctgatccctctgtaagtcgctatttcccttattaaatctctttctgctgg

SEQ ID NO: 360759 - DNA, 1086 bp, Homo Sapiens
  misc_feature (559)..(567): n is a, c, g, or t
tcaaaaaagggaccccccaggtctttttggaaatttagaaaaggattccccctttaaaattaaaaaaggaggaaaattaagttccttaaaatttagggaaaaccgctggatctccttttgaaaaggaatcttcaaggtaccaattccgtatagagaaaatgctaatttgggttacagtgccctccttactgttaaatatacaaaactataatacctttcaaaataaaatacccacataagatagctttaataagaaatattcaagccagaacttggaaaaacattaagcaagaaatttactgggctgataatgtcttaatttgtgatcattcaaacatttgatgatgtgtctcctcttgtagaccccaggctctctcccttttggtccccacagttaagagacattcagttggttgtgcttgagacaacctgtgataatttcattcagaggaaaaatattttgcaatataatgacagaccaagaaggaagagaaggtgggtgctctggagaaaacttatatgagaaaaacacaaaattatcacttgaaaataaaaagannnnnnnnnccaaaggaatgctgcacccatttcacttaagattagaaatccaggttaaaggcactgggatgtactcctcaccatgaatagactctcaattacatttattcgcatgtctgagtctattgcaatcagcctgcttgctgagtgcttccatgacactcttacataaaaacctaatgtaaattaaacatgtttgaaaccgtttataatgtaactagttttataaaaatatccagagttgctaataaagcaccaagaaaaagagaacctcagggggaggactcagatccttcctacaaggtcacccttttataatattctctaataggacctccagaatgacaacagtcatctttgacatgtcctacctagataatcttagggatgtagaacattgctgtggtgactatacccaaatgccacttttcattataaatagttaagagacatgttacaagatttcatggcttactcttaaaaaggtaaaataggtgcaattttcctttaagaaagtctttattttat

SEQ ID NO: 360760 - DNA, 656 bp, Homo Sapiens
  misc_feature (50)..(50): n is a, c, g, or t
cagattgaccccaacaccaagaagaactggatgcctgcgagcaagcaggngtcaccgtttcctacttctatgatgtcacaaggaacagctatcggatcatcagtgtggacggagccaaggtgatcataaacagcacaatcacaccgaatatgaccttcaccaaaacgtcacagaagtttgggcagtgggccgacagcagagccaacacagtgtatggtttggggttttcctctgagcagcagctgacaaagtttgcagagaaattccaggaggtgaaagaagctgccaagatagccaaagacaagacgcaggagaaaatcgagacctcaagtaatcattcccaagcatccagtgtcaacgggacggacgatgaaaaggcctctcacgccggtccagccaacacacacctgaagtctgagaatgacaagctgaagattgccttgacgcagagcgcaccaacgtgaagaagtgggagatcgagctgcagacccttcgggagagcaatgcacggctgaccacagcactgcaggagtcggcagccagtgtggagcagtggaagaggcagttctccatctgccgtgatgagaatgaccggctccgcaacaagattgatgagctggaagaacaatgcagtgagatcaacagagagaaggaga

SEQ ID NO: 360761 - DNA, 430 bp, Homo Sapiens
  misc_feature (379)..(379): n is a, c, g, or t
  misc_feature (410)..(410): n is a, c, g, or t
cttgcaaatgaacccttaaagtacagtgttatttaagaatcttccagaggcagtcaacagacttatacactaagggcatttttggtttttagcttgttcaaaaacagaggccagcacagatgacattttagatacactctaaattgagaatggtgtctagtggaacatgtttatttaagccagtagattccttatctagaaagcaggtgagctagcccttagagaaggctgtcccggggcccgcagaggtgcccttactgaggtgacagcctcacagggtctggtaccaggggttgtgccctcagcagtgacagcagcttaggtgtcaggcagttgctgagtggctggtccatgtctataggaggtaacacaattggancccagggaaaaagtccagattttcatttttnttaccctgggatgttacttt

SEQ ID NO: 360762 - DNA, 509 bp, Homo Sapiens
  misc_feature (422)..(422): n is a, c, g, or t
  misc_feature (436)..(436): n is a, c, g, or t
  misc_feature (463)..(463): n is a, c, g, or t
  misc_feature (471)..(471): n is a, c, g, or t
  misc_feature (487)..(487): n is a, c, g, or t
  misc_feature (497)..(497): n is a, c, g, or t
ttactaatctaggcacagccagttggttactggactaggcacagcgaagttagttactaatctaggcacagcgaaattggttactaatctaggcacagcggaattagttactggtctaggtacagccggattagttactaatctaggtacagccgggttggttactaatctaggtacagccgggttagttactaatctaggtacagctggattagtaactaatgtaggtacagctggattagtaactggttgattgaccacactattaggtacaaacaaatgggctcaatatcataatataggggattcctgtggcatattgcaaggatattttcggccttatcttgggtcacaagtttttttcaaataactgggaattgaaaacatatttcattaggattttgcagatgacatgaggtccngattacctaggaanaagttgtttggaatggaagttattcgnaatttccnaaggacctttgaaagncttggatttntgggggtacatc

SEQ ID NO: 360763 - DNA, 1101 bp, Homo Sapiens
  misc_feature (831)..(975): n is a, c, g, or t
ggatcaggccaaatcggccgagctcgaattcgtcgagagcgggggcgtacgtgcgtcgtctctatggtggcggcggatttggagggaccctacgaaccaggagtcaggcgagccgatctggggctgcaggtgttacctctgatctaggccgggggcttcagggatccgagccgagggagaaagccttgggggcttcatcacacttatttggctcgcgggcttggggccatcgggtggtcctgtgtcatccccattcctcctctgcgattcccccgtcgccccaaaacagccctgggactcccctgtcttgctcctcgagaccctcccccatcaccgtcctctgggcaccccatcctatgacccagtctcaggcatcttccgaaatgctcgatgatagccgccctcgggcatctccgctgcgtctgtttgtagcgcgcctggtgattcggctgcacccccacacaggatgttccgctgggagcgctccattcccctgcgaggctcggccgccgccctgtgcaacaacctcagtgtgctgcagctgccggctcgcaacctcacgtattttggcgtggttcatggaccaagcgcccagcttctcagcgctgctcctgagggtgtgcccttggcccagcgccagctccacgctaaggagggtgctggagtgagtcccccacttatcactcaggtgaggcatggagctgggagtgatgttgctgaacccagtcctacccccagccttttctctccaaaccttcaggagcaggcatgtcctaacctcagaatctccccaggcatgtcctaacctcagaatctcccctctcctgccgnnnnnnnnnnnnnnnnnnnnnnnnnnnnnnnnnnnnnnnnnnnnnnnnnnnnnnnnnnnnnnnnnnnnnnnnnnnnnnnnnnnnnnnnnnnnnnnnnnnnnnnnnnnnnnnnnnnnnnnnnnnnnnnnnnnnnnnnnnnnnnnnnggggccttccccctgaaatcccccctaccttgggggggcttaagcaaggaaaaaattcttggacaccccagaagccctggggtttcatctgagccccaagaaagggtcccctgggcctcatagtcg

SEQ ID NO: 360764 - DNA, 1165 bp, Homo Sapiens
ggcctgggtggcgaattccgcacgagggtcgtctctatggtggcggcggatttggagggaccctacgaaccaggagtcaggcgagccgatctggggctgcaggatgttccgctgggagcgctccattcccctgcgaggctcggccgccgccctgtgcaacaacctcagtgtgctgcagctgccggctcgcaacctcacgtattttggcgtggttcatggaccaagcgcccagcttctcagcgctgctcctgagggtgtgcccttggcccagcgccagctccacgctaaggagggtgctggagtgagtcccccacttatcactcaggtccactggtgtgtcctccccttccgagtgctgctggtactcacctcacatcgaggaatacagatgtacgagtccaatggctacaccatggtctactggcatgcactggactctggagatgcctccccagtacaggctgtgtttgcccggggaattgctgccagtggccacttcatctgtgtgggaacgtggtcaggccgggtgctggtgtttgacatcccagcaaagggtcccaacattgtactgagcgaggagctggctgggcaccagatgccaatcacagacattgccaccgagcctgcccagggacaggattgtgtggctgacatggtgacggcagatgactcaggcttgctgtgtgtctggcggtcagggccagaattcacattattgacccgcattccaggatttggagttccgtgcccctctgtgcagctgtggcaggggatcatagcagcaggctatgggaacggacaagtgcatctatatgaggccactacaggaaatctacatgtccagatcaatgcccatgcccgggccatctgcgccctggacctggcttctgaggtgggcaagctactctctgcaggtgaggacacctttgtgcatatctggaagctgagcagaaacccagagagtggctacattgaggtggaacactgtcatggtgagtgtgtcgccgacacccagctgtgtggtgctcgattttgtgattcctcaggcaactcctttgctgtgactggctatgaccttgcggagatccggagattcagcagtgtgtgagaagagcagccttcctttgtccctgtggtattcataaagtacccgctccacccgaaa

SEQ ID NO: 360765 - DNA, 893 bp, Homo Sapiens
  misc_feature (434)..(466): n is a, c, g, or t
  misc_feature (851)..(851): n is a, c, g, or t
atacaagtgagtttaacaaagaaacatttagaatagatctgaatgtaagaactacagaactgtttcagaaataaaacatactaccttgatgtgacatttttttcttaaccttgttgagctggttttgttcagcttaatttactgttcaaaggcattatctgttggtcacaccagtgggtatatgattgaatttagggaacagggttgacacagcagggctagtcctgcatattttttcttaaatatttcccaattgtgtttttcattatttcttttcaatatataacttttataacaaattattagctttgatcttgtagtttaaaattgcagggaactggggtaatcttttactgagctggatcttagagaaaatgaatatttaaattttaaagtttgcacatttcatctttgtcctaacatgagtgcttgtnnnnnnnnnnnnnnnnnnnnnnnnnnnnnnnnntacctttatccatatgtgaaattatagatgaggcatacgaatttgtttaatgcttcccttcccttcccacatatcatctcactgcctattatctggtgtcacctcatgtatcgtaagttaatactaaaagaagagaaagcacttaagtttcacagaagccgttatgtttgtagtaatgggtcattgcctactaatgaactccatcactgtacacagaatgaagaataatgcatgttaattttcttgtattaaagatgccgtgatttgtaaaaagtctgtattttgcggaatgtctgggattaagaagcattaccaatagggaatgggatcgatagttgaataatgatttttttatacataggatatataaaatacagccgggggnaactttaaattacttttctttttaaaatattctcaccaattt

SEQ ID NO: 360766 - DNA, 993 bp, Homo Sapiens
  misc_feature (884)..(884): n is a, c, g, or t
  misc_feature (902)..(902): n is a, c, g, or t
agctggaccggtccggattcccgggatcggctggccaccatgcacggctcctgcagtttcctgatgcttctgctgccgctactgctactgctggtggccaccacaggccccgttggagccctcacagatgaggagaaacgtttgatggtggagctgcacaacctctaccgggcccaggtatccccgacggcctcagacatgctgcacatgagatgggacgaggagctggccgccttcgccaaggcctacgcacggcagtgcgtgtggggccacaacaaggagcgcgggcgccgcggcgagaatctgttcgccatcacagacgagggcatggacgtgccgctggccatggaggagtggcaccacgagcgtgagcactacaacctcagcgccgccacctgcagcccaggccagatgtgcggccactacacgcaggtggtatgggccaagacagagaggatcggctgtggttcccacttctgtgagaagctccagggtgttgaggagaccaacatcgaattactggtgtgcaactatgagcctccggggaacgtgaaggggaaacggccctaccaggaggggactccgtgctcccaatgtccctctggctaccactgcaagaactccctctgtgaacccatcggaagcccggaagatgctcaggatttgccttacctggtaactgaggccccatccttccgggcgactgaagcatcagactctaggaaaatgggtgcagagggccctgacaagcctagcgtcgtgtcagggctgaactcgggccctggtcatgtgtggggcccctctcctgggaatactgctcctgcctcctctgggtgttggctggaatcttctgagggggataccactcaaaggcaagccccggntgaagggggggccccggngcctcataccccaacctgggaattggccttccctcccaggtggaaaagacccaccggcttttccctgggggcagggggcctcgccctcctc

SEQ ID NO: 360767 - DNA, 1050 bp, Homo Sapiens
  misc_feature (74)..(74): n is a, c, g, or t
  misc_feature (868)..(868): n is a, c, g, or t
  misc_feature (962)..(962): n is a, c, g, or t
  misc_feature (967)..(967): n is a, c, g, or t
gctggaccggtccggaattcttcggatggctcctgcagtttcctgatgcttctgctgccgctactgctactgcntggtggccaccacaggccccgttggagccctcacagatgaggagaaacgtttgatggtggagctgcacaacctctaccgggcccaggtatccccgacggcctcagacatgctgcacatgagatgggacgaggagctggccgccttcgccaaggcctacgcacggcagtgcgtgtggggccacaacaaggagcgcgggcgccgcggcgagaatctgttcgccatcacagacgagggcatggacgtgccgctggccatggaggagtggcaccacgagcgtgagcactacaacctcagcgccgccacctgcagcccaggccagatgtgcggccactacacgcaggtggtatgggccaagacagagaggatcggctgtggttcccacttctgtgagaagctccagggtgttgaggagaccaacatcgaattactggtgtgcaactatgagcctccggggaacgtgaaggggaaacggccctaccaggaggggactccgtgctcccaatgtccctctggctaccactgcaagaactccctctgtgaacccatcggaagcccggaagatgctcaggatttgccttacctggtaactgaggccccatccttccgggcgactgaagcatcagactctaggaaaatgggtaccccttcttccctaacaacgggggattcccggctttcttggtaacagaggtctcaggctccctggcaaccaaggctctgcctgctgtggaaacccaggccccaacttccttagcaacgaaagacccgcctccatggcaacagaaggctccancttgcgtaacaactgaggtcccttccattttggcagctcacaacctgtcctccttggatgaggagcagttaccttccccaaatcgaccatgttnctatnccaaaatcagcagacaaagtgacagacaaaacaaaagtgcctctaggagccagagaactctctggacccaaaatgtcctgaca

SEQ ID NO: 360768 - DNA, 522 bp, Homo Sapiens
  misc_feature (410)..(466): n is a, c, g, or t
aatctggagtggggttgagccctctgccttcaaccttaagatttaggaagttctttccccaactgtctaacttggaaaggtagatgagtctgaattttgaagtaacgaatgcaaattccactcagcagaggcaatgttatttatgtacatagggatagtggaatgagttttaatagattctgtccaaaaggggtttgttcctcttatttcctctatgtaggaagttgtgtcttaggcaactttatcagtatcaatggaaaaatgataggcactacaatgaaatggcaggatgccaatatgagatatttcaggaataataagaaatacagtttgtttgtataaaataaactatctcaagaaagttttcaacgacagtgatagtgttcatttgtaagagagagttctagaannnnnnnnnnnnnnnnnnnnnnnnnnnnnnnnnnnnnnnnnnnnnnnnnnnnnnnnntggttagtccaaattgagatgtgctctaaaggacaataaaaggttaaatatctcct

SEQ ID NO: 360769 - DNA, 1316 bp, Homo Sapiens
  misc_feature (944)..(944): n is a, c, g, or t
  misc_feature (1258)..(1258): n is a, c, g, or t
  misc_feature (1293)..(1293): n is a, c, g, or t
ctataatgtactctttccctcctgccacatcctgcccccttcacattcacgagtcattaccagccagggaaggtcatccaagtttcctccagcatgggcgatatctttgggaccgagactttccttggagagctgctgagagcggacagtcccaaaaacaagtgtcaaagggcccaagggaaaggggactgtgccctggaggctcacttcacagggatcagtgtttgctccacagctgtagctctgggctgacgccccccagaccccttccttctcggagtgacccgcccccaggccacctgctccggggagttctgtgcactttactctttggacttctcctcacgtgtgccctggttttatggggagagggaatcgctgttgggaaggcagagcagttgcaaccctctctgcccttgcttcatgtggctggagcccaggcaaggagagcaggagccagcgtgagactgaggccccctggtgcctatcaaggaccagagtgaaggggactacatctcccagcccttcaccttttaaatatgagtggttttaaaaggaaaaaaatgaaaccaggcaacagcaacaatattctgtttttaaaatagggacaagactgttgtcactttttagacatgtatcccattccttttggctctgcaatatttggggctgtagctccttccaagcccatggtagtccctccccgagtctctcccagtagaatgcagcctcccttccctggccccttccctctcagtgacggtgactccctggggccttctcgtggaacccagaggggctgaggactgtggcctggctggcgggccagcgtggtgctcctcaggactgcagcactgagatggaacctggcctcagtttaggaacaggggccacaacagggcaggaacccaccaccctccacatagggaatacaaccagtgggngccacatcatgtgaggcatcagacccacactgtcagcccagcaggccgggctgtgtccttcagacccagtgctgccctagactctgactcgggactccagcttgccacgtgccctctcccctcttgaatgtactctggtcttgcagtgtgctgctgggactttcttgctcagacatcactctggtcaccttgtttgctctgggtctggctgaattttctgccctgagatctgggcataaagtggatgaaacttgaaagaccttcagtgtagatccagatggccaacctgtcctggttaagttacttgcttcttnggaatcagtgtcccctgctgagctgaaaaggaaanggattccaatctcttccaacctt

SEQ ID NO: 360770 - DNA, 393 bp, Homo Sapiens
agaaacggaagaggctttgcaaaaggctagataactaacaacacctgggttggggcggcggcctcttctcttcagctcccttagcttggctccgtaagtggatcacttgccaaatgctttagatgattgcctctcaataattgaaaggtggtggtagttgtattctaaatgatgtagaaggtttaaaaataattacattatgcttctattctatcatctaaaacaaatcattaaaactaatttctagctaattgttaattataattatgctcagaagtctatttaatgagctctgactgtacttacgctgcactgtcggtgttaaggagaaattactctcacaagagcagaggcctgaagattctttcttctgaaagccaagcaccacagggg

SEQ ID NO: 360771 - DNA, 427 bp, Homo Sapiens
agattgtaggatttttttgtgctagcaaaacactttgtgaacatgagttttagctagataatgctgatgtcttaagagcaagcatttggacatgtattgtcatatcttggttttgtagctggacgactatatttttattaggtgaaaaacaatgacttcatttcttgggtaatcattactgcagttgcagctagttaccttttaataaacaatcagtgcctttcttttgtggtcctgtgtttacttctaattttggtgctttctttcccagttcatggttaagtttgtgggaaagagttgccacactctccttaaatctgaattatccataaggctcctgttcatgctacccactggaaactgctccagcaatgggtcaatggagggatttgtactgtggaagcctaaaatggacacattttgggcc

SEQ ID NO: 360772 - DNA, 426 bp, Homo Sapiens
  misc_feature (333)..(333): n is a, c, g, or t
  misc_feature (354)..(354): n is a, c, g, or t
  misc_feature (362)..(362): n is a, c, g, or t
  misc_feature (384)..(384): n is a, c, g, or t
ccgatgccaggcaccctcaaggcacagaggctggggctcatgttgggggcacttggcctctccaggcctcgaagggcttctcctgggctgacgcgagctggggaacgggagggacggacgtgggagcgagaacgtcacactggaggcagctggtggcacgatgggggacagagtgaaaggtagcaagtcaaggcgccctgatctggttgtggaagtggcccatcccaaaataatccatgaatctggggcacaaatcctgcgccatgccaatctcctggtggggtccccctcagctctaagtgaccagaccacagagcggcagtctttggaggnctcacagcactgggaccacgncgtgtttntggcccgaggggccctgtgggncgcttgaggacatcaggagattggatgcagttgggggccttc

SEQ ID NO: 360773 - DNA, 849 bp, Homo Sapiens
agcgggctgccgcagcctgcgccatttccgatgccaggcaccctcaaggcacagaggctggggctcatgttgggggcacttggcctctccaggcctcgaaggcttctcctgggctgatgcgagctggggaacgggagggacggacgtgggagcgagaacgtcacactggaggcagctggtggcacgatgggggacagagtgaaaggtagcaagtcaaggcgccctgatctggttgtggaagtggcccatcccaaaataatccatgaatctggggcacaaatcctgcgccatgccaatctcctgagccttcgtgtcaccatggccacacaccccgatggcttccggcttgagggaccccctgctccagcccacagccctgggccttccactgtgctctacgaaggccctgtccctcgcctctgcccctttgccccgcgaaattccaacaccatggcggcggctgccctggctgcccccagcctgggcttcgatggggtgattggggtgctcgtggctgataccagcctcacggacatgcacgtggtggatgtagagctgagcggaccccgggccccacgggccgaagctttgctgtgcacacccgcagagagaaccctgccgagccaggcgcggtcaccggtccgccaccgtcacggccttctggcggagcctcctggcctgctgccagctcccctccaggccggggatccatctctgctgagaagcctcctccctcccgagacaagatcatctgcctggcctctcaccaccaccatcccacccctgccctgccccacttccccagggtctcccttctgactcagtaaagatcaccgctgcctcccccca

SEQ ID NO: 360774 - DNA, 541 bp, Homo Sapiens
  misc_feature (427)..(427): n is a, c, g, or t
  misc_feature (448)..(448): n is a, c, g, or t
  misc_feature (466)..(466): n is a, c, g, or t
  misc_feature (471)..(471): n is a, c, g, or t
  misc_feature (487)..(487): n is a, c, g, or t
  misc_feature (515)..(515): n is a, c, g, or t
  misc_feature (526)..(526): n is a, c, g, or t
ctggtgaatgataccaagaaatggggggctagggttgtatatggcgatactgacagtatgtttgtgctactgaaaggagccactaaggagcagtcttttaagattggtcaggaaattgccgaagctgtaactgctaccaatcctaaaccagtgaaattgaagtttgaaaaggtatatttgccctgtgttttacaaacaaaaaagaggtatgtgggttacatgtatgaaacactgggatcagaaggacccagtatttgatgcaaaaggaataggaaacagtcaggaagagattcctgccctgctgtttctaaggatacttgaggcgttcttcttaaagctgctattttgaaacgagagatataagtctaatttaaacagtatgtttcagccgaccattgtatggaagcttcttggggaggggaaaggncccgccttaccaggctttttncttttgccccaggggttnccagngggagttttttccttnttaaccggggggcctttttttgccccgnccccttggacntttcccaggggaatg

SEQ ID NO: 360775 - DNA, 410 bp, Homo Sapiens
  misc_feature (313)..(313): n is a, c, g, or t
tgaaacactggatcagaaggacccagtatttgatgcaaaaggaatagaaacagtcagaagagattcctgccctgctgtttctaagatacttgagcgttctctaaagctgctatttgaaacgagagatataagtctaattaaacagtatgttcagcgacaatgtatgaagcttctggaaggaaaggccagcatacaagactttatctttgccaaggaatacagaggaagtttttcttattaaaccagggagcttgtgtgccagcccttggaacttacaagggaaaatgctgacttatgaccgggcgctctgagncttcaggtttggggagcgagtgccatacgtcatcatttatggggacccccggagttacccctttttcccgctttgttaagggcgcccatggggagtt

SEQ ID NO: 360776 - DNA, 780 bp, Homo Sapiens
gagacctttccctgctggccagagagaggctgccttgctggttttggagatggaaggaggtaccactagtcaaggattgcaagcagtctctagaacagggattccaacactccggacacagaccagtagtggtccatggcctattaggaagtggggtgcacagcaggttaggggccggcaagccagcgaagcttcatctgtatttatagccactccccgtcgctggcgttaccacccgagctccgcctcctgtcacatcagcggtgggcattagattctcatagcagcacgagccctattgtgaactgcacacacgagggatgtaggttgcacgctccttatgaaaatctgatgcctgatgatctgtcactgtctcccgtcacccccagatggggctgtctagttgcaggaaaacaagctcagggctcccactgagtctctgtgatggtgagttgtagaattatttaattatatgttacaatgtaataatagtagaaataaagtgcacaataaatgcaatgcacttgaatcgtcctgaaaccatccctccccgaccccaatccatggaaaaattgtgttccgcgaaaccggtctctggtgccaaaaaggttggggaccgcttctggaaaagctggaaaaggcaagaaaacgcattctctccctcagcctctggaaggaaccagcactgtgggactaatttacatactgtagggtaataaatttgtgttgcttcgaaccactaaatttatggtaatttgtttgcggcagcaatggaagaat

SEQ ID NO: 360777 - DNA, 543 bp, Homo Sapiens
ttagagaaccactgttcttagacattgtgcaatgttatacaacaacttcctcaaagtgctaagtgaaaaggacattggcctggcgttagtcagggaaggcgtcctggagggaggggaatttgaagcagagctttgaaaaacaaaggcagtgaggtgaaccagcaagtgcactggctgaggggactggagttctagcctctgaaccagtttcctcctgtgccaaaggaggataataattatctattattgattatctcctagacttgtggagttccaagtgtgtaatgcccttaaaagatgtggaggctgttgctgtgtttggtaccacattgcccaccctcacgtggcgctcttcagcttaggttcctctagcagtgtcaagtttgtgaaccaaccccactggccttctgcattctgagggcacgtgtgttaaagtctctactgatgtccttttggaaatgcctctgcatgaatttatggtagctctgactcatctttaaacaattttaatttatttagaaaataaaggcttatctctccagg

SEQ ID NO: 360778 - DNA, 428 bp, Homo Sapiens
  misc_feature (59)..(59): n is a, c, g, or t
  misc_feature (62)..(62): n is a, c, g, or t
tgttcagggaccctgactgccaagagatttacctcccagctaggcaaacatgattttgnccncccttatttctttggcatcagaaaggtctgctacccctgtaagtttcctgctctgtcctctctaagataagaacacagcatggctgggctacccatcacccatcaatcgctgcagctcatgcttgccccaagtggtgttggccctttcccctacattgtctcttttaatagctgtaagtaaaggagactgttgttgttgccgttgtcgttttgggaaggaagggatgccttcatgacaatcttcctccaaggaaaaaaagtgatgaccatttgagagaaatatccttactcagagtagtttttttcaacataatacacatacactatgatttatcttcgtttattaattacaccaagtaaaaatgt

SEQ ID NO: 360779 - DNA, 612 bp, Homo Sapiens
tgaagcctgagcatgaccttgacctaactcataactcaagagctgttgtttagggacctctggaggactttgtgccaagggaggagagattccagtgagagccatttgactacgtggactgtggcctgggcaggctgtgggcatttcttctggctttttccatattccctttgcctgaaaactgtgggaatcatgaggtctttggtcagcattagatgagctactgagattctgttgcttgaaaatgacaccatggctcactggcttacaagactcccttgggaaattttgggatgggccttgcttggcctggaatgggttgccagcaatggaggtgcccgagctagtcctctgatgctgttctgccaataacttctcagctctgcgggccagagccttttgtcgattctcttcaatctttttcctctgctcctctgtaagaggcaaggacattttcacagagaaatgcttatgcaggaatgtcaacccttaattggaaagttggcaaaagcatggcgtgacacttgctaacatagtctttttccaacccagcctcaaggtaagcgggcgcccctcgtgccgtattgagcatcccggcctcgtacctaagcc

SEQ ID NO: 360780 - DNA, 885 bp, Homo Sapiens
gtggatgtttgtggatagcatgtaatcaaaactttaaaagattttcttgtcagctatgtgtttagtaacattgttctgtctagttaatccttcccgttgatgtattactgatcctgaaccagttatgagtcagacaatgaagccctctcgacagggaatcatgaatagacgcaagctgaaatgtgcatgacgggtgtgttttgtgtacctctatatgtgagagcatgtcttcaggtgtgacttcaaaatctgtgatgatttacaattatactgagggatgaagctgactgggcagaaaattacatcagagtgttttccactagtgtattttgcagccagttgacaagagcagcagtgtagacacattccaggcaacagatgtgaccttcttctttgaggtaacagccctgtcatatgaccttgtaattcctcaggcttcagtctcacccccatgttcaccttcatcccgagggaaagtaaggtgtgtcactgtggtagttgtagtcagggcacactttcttgtacccagtttataatctgttactataaaaggaaatgtaaatacagatcaccttaaagggcttggagcagagccaggatacatgactttgggtttgctcctggtaacaggtttttgaagggtcatagttgcagagtgtgttcttggtagccttgtcaaccttttcatattcaatgcgacaattaaaagacttggaatctttggcatcaatcacggtttgttgtgccaagtcaaattccacgatttttgtagggggtaccaagctgacagatacattcccttgaccagttgaattatgcctgaaataaacactaaatgtccccttgccatgatctacaattttcccagttatcaacaggttcagc

SEQ ID NO: 360781 - DNA, 1290 bp, Homo Sapiens
  misc_feature (33)..(33): n is a, c, g, or t
  misc_feature (1223)..(1223): n is a, c, g, or t
tgctgttgttgctcgacaggccgatgttgagantccccgggggcgcgcgccactgatctgggctggaggcaggcctccgcgcggcaggtcaacgtgaagtttcctcctgggcgcacgcctccagggggcgaggcagcaagttcggccaccactggccggtattccacgcccacagtgacggtccgggagtccgtgccatgcgcattggtggccacacagtggtaagtgcccgcgtcctctcgggacacgcgctgctgctcaggccatgggatgccttcccgagagcagcgcactcctggggaagggcgaccccgggcggcgcaggccagcgcggaagcctcagccccttccagccacgtctggtgacttgggcaggtagattcatccatctccggtggcgactccgcgctcacgacgactgttttggaccacggagccgtggcggttggtggcgttgcagacgtagataccgggtgccaggactctagggattctgggagctctgggactagggtctgggggtgccagcggcagcagcaccccctcagtggcgcccccggagcccacgcacttcacgcttggctgtggcttcccatcgacctcacaggaaaacaggcgcccagatccttccacccatgtccaattgctggggcagctcggctcctcaaacctggggccatattccaccgtgacggccacatttttggccgcagagccccgagggttggtggcttcgcagcggtaagtgcccgcatgctcccgggccacacgcaacagcccctcgatgacggccccgagttctccagagcgcacgcagatcacatcaggcggcggtaccccgtgcgccacacagctcagcgaggcttctgttccctccagccaagtaatgcgttctgggcagcccacgctgtccagcgctggtgcgtactccaccgttagcgttacgtccttgaccgcctcgccttgatcattggccgccttgcagcggtaagtgcctgagagcgcccgagtgactggacccagcaggcccagagccagcacggccccgccgtcggagcgcgcacagtgcactgagggttctgggttcccgcgggcctcgcagcgcagcgtctgctctgggccctcgggccacgtccaactcctggggcagtccgaatcgtctagccggggagcgtataggacacgaagctctgcgctcctgttcttgatcagggtctccccgntccacatcgagggtgagtcgaagaaaaagctgagtctgtcgtcgttctcggcggcatccggagaatc

SEQ ID NO: 360782 - DNA, 493 bp, Homo Sapiens
  misc_feature (405)..(405): n is a, c, g, or t
  misc_feature (426)..(426): n is a, c, g, or t
  misc_feature (451)..(451): n is a, c, g, or t
  misc_feature (459)..(459): n is a, c, g, or t
  misc_feature (481)..(481): n is a, c, g, or t
ttcagcacaagcacgagaatttgggaatcttcacaatacagtggcgttacttgttttgcattcagatgtctcatcccaaaggaatgttgctcctggcatatttaagcaacgaccacccattagcattgctccctcaagccctctgttgcccctccatgaggaggtagaagccttgttgttcatgtctgaagggaaaccttacctgttagaggtaatgtttgctttgcgggactgaacaggctcgctcttggcactcattgagatggtagtgtactgctgtttctgtaatgagcatttttccttcacaatgctgcatttcattaagaaccaactaggaaacggctccacctcatgagtttaaaggaatacgtttccaactactttcatggaaatattgggtatttnaaggtcccccttacaagcagngggggggttcaaatttgtgtttttngggcaggnaaaggggttactcggcttttgngggacccccagt

SEQ ID NO: 360783 - DNA, 813 bp, Homo Sapiens
  misc_feature (285)..(524): n is a, c, g, or t
  misc_feature (537)..(545): n is a, c, g, or t
ataccagtaaataagaagtttaaagtgaaaatttttccaaaggccactaaaaaagaaaaccatactctttatatttgccttttgtaacattgttttatctggttttccatatcaaaagtctgtaaactttgcattaacactataatctacaatagtagctttataagcatttgaaatagaatgaaatagtaattcgagtctgatattactgggttgttccacacatagttaaataagatcgatccttccaaaaatctaagggtaggctagttgtggtgattcatnnnnnnnnnnnnnnnnnnnnnnnnnnnnnnnnnnnnnnnnnnnnnnnnnnnnnnnnnnnnnnnnnnnnnnnnnnnnnnnnnnnnnnnnnnnnnnnnnnnnnnnnnnnnnnnnnnnnnnnnnnnnnnnnnnnnnnnnnnnnnnnnnnnnnnnnnnnnnnnnnnnnnnnnnnnnnnnnnnnnnnnnnnnnnnnnnnnnnnnnnnnnnnnnnnnnnnnnnnnnnnnnnnnnnnnnnnnnnnnntgactctgtctcnnnnnnnnnttaagagtaaagaagagggcttaaccatttgagaaataaacatcaaggtctgccattctaaaaaagcattaatggattacaatagtttcaatagtttacatggttttcactctttaagttcaatgaaaattgcatatattgtttttactcttgaacacagtggttaatactatatcagggtggttagtcacaagaaagacgcaaatacagaaaggataaccttatccaacttcagtattattttagtagtaatgtgtataaaatccaa

SEQ ID NO: 360784 - DNA, 625 bp, Homo Sapiens
  misc_feature (498)..(498): n is a, c, g, or t
  misc_feature (527)..(527): n is a, c, g, or t
  misc_feature (588)..(588): n is a, c, g, or t
ctccttgaaatggttcaatctagaaattctgtgccaatggcacaagtccccatgaatgacagctaacataccccaacacctccagccttatcggtccctcaccaattaaggaaaaaaagctgttgagacaatcccaaaattattagagaaattttctactgtgatattaatggattaataatgcttatctttcaacccaactagaaacactgcattccaaaattatttttccaactcaatgtttagaacaaacattcttttgaagtttgcctgagatttcgacttgccatgctatgagagtaaatgacccttgaggaaaggcagtctttatatgatgatgtgataacattattaggttttgaagtataaaaatgctagagacagcatcaacacaacctcttaaaggttgtaacaactgctccaacatgccagtacacctgcacggataaggcaagattaattttaaacactatttattggaaacatactggaattggntcttttcctcttccaacagtcagggtttnaaacgtttctgttcttcagcccaaagcctttgcttcctaatgtgtaccttcttctctcttncattcttcatttcttccacctgtcaccagggtcactt

SEQ ID NO: 360785 - DNA, 457 bp, Homo Sapiens
  misc_feature (388)..(388): n is a, c, g, or t
  misc_feature (429)..(429): n is a, c, g, or t
  misc_feature (440)..(440): n is a, c, g, or t
cagatcagagtgtatcagagaaagctgcacaaaagaggcaggcagcccaggaccctgagtactctggagaaactaggttccttccccaccctttaagaagacattccgtgcattagatgtactagagtggatgtattttgttgttttttaaattaactatttagcctcctcatcccccaccaaaaaagccatttagttattttttggttatattgatccatttgcaaatgagaagccagaaaagggagcagtcagggagggacttacaagttcctttcaagtttgagtacttgatgctcagcaaagatttcaagcttctgcagtagctctgggccaatgctttgactctttcatgaccacaagaaatgcagtttttctggcaaagggnttccaaggtgaggtgtgtgtagggtttggaagttatacttntggggaagtgnaaaagtcttgttccctt

SEQ ID NO: 360786 - DNA, 419 bp, Homo Sapiens
  misc_feature (244)..(244): n is a, c, g, or t
  misc_feature (287)..(287): n is a, c, g, or t
aattcagcccatattgaggcccttctcattcctgcaggtgttaccagcaactcagaggtttatggagtaacgaaattggggagggcctcacatccggctgctgtttttccccctaacgtgtatggtgcttattctgagccagacacttttaagaactgcacattattaaccattttaaatcgtccccaccacctgatgaaataggtactgttatccccactttatggggtgggggaaaaccganggcccagggaggtcaagtaactgcgcaaagcaccaaaaactgnttgagtagtagtgttaccagggcagtcctgggagaaaatcgctcagagggcaaaacttgagagctcattattttcttaaacagtagacagctgaaaatgctcattgttttttaaaccgttttgtttgtttga

SEQ ID NO: 360787 - DNA, 1399 bp, Homo Sapiens
  misc_feature (176)..(233): n is a, c, g, or t
gggtggtacggcccggagtacgggattgacctaagtcactctcttcaatcccacacccatggacattctgtcaactcaataccatagcactttgcataggcaaaatacttttcaggcctttttaaaaaattcattacagcaaacagctggggaaggacatgcagtcctcccccagnnnnnnnnnnnnnnnnnnnnnnnnnnnnnnnnnnnnnnnnnnnnnnnnnnnnnnnnnnagcactgaatcagaggccacacagcccaaagattagcttcatgtccattatagcatgagggagcagagatacccatacacagaagcacctggcatagagcacccaggcatcgacctcttccaggagaactgattctgtggatggatgtgatttcaggagattgtgcagtgccagcatcagtgcataaagggtcctgtatgtcctttggctgcaaatcacccacttccctgtgtttcagtgggagaatttcctctcccacctcctcacatcctcttttgccaggctggatgctgtcgtctctgtacacaaatactttctgcattcccccctccacaccatcctagcgaggcaccagcacagcctaatcacagcaaagcccagatccccccattcagttgcttttactcagtgttttcaaataggagtaaaggcccttgcaatttttaattaacaagcaaggcccaagggaacacatgtcctcaaaagtttttctgatccctcgccttgcacacctggcatgcatcaggcacatctgtcctacagctggcagagacagatgcctcggttctttgtcattcagattgcatttgacctcttctcatctatttatttctttatacatccagacttcatcacatgaagcctattggggttaagtttgtaagtgtttaattgtgcaaattgccaccctgtgtacctcctccatgtctgtctgcgtgttttccaccaaagaatgcaaagcagacttccaggtgtttaaattctgttcactcaacaatgccagatgaatggaagagggaacacactgagatgacttagactctggtccaccaaccagacccttggaaaggaatactaaaatcattacaaggtatggattttaaatggatgaaacttcaaattatcttatttggatagaagtctatattctagcctcatttgcatgaagtcagatagccagaagaaattccattgctggttttcacgaaattcacttgtcttttgctaataaacacatggccctttcccagattattctctagccaagccccacctttgttacgttgaaatccctcatttatttcctacaaagcacatattacactttctaagaatgtatttattgggtgcctccttgtttattggtttctgcatcagactatggc

SEQ ID NO: 360788 - DNA, 208 bp, Homo Sapiens
cagcgccctagcctcatgaagtttatagtctgatgcagaaccaataaacaaggaggcacccaataaatacattcttagaaagtgtaatatgtgctttgtaggaaagcaatgggggtagtgtaattgagattcatgggggagagctgtttagataggatgatcagagaaggggtctttaatgccgcaaaggatgaggctagtggcgctg

SEQ ID NO: 360789 - DNA, 913 bp, Homo Sapiens
  misc_feature (885)..(885): n is a, c, g, or t
agcgggcgtgtttgttatttttaccactgttgaacaggcaaactgttgaggctagggtgattatgataatttttatgtgtttagtaataaccacagcatcatacgtacaactgctttaataaatcaaagttaaggacttgaggagagcatgtagcaagtattcattttaacaaataatcacagacagtttccctgttcaaagctccaccaaaaagcaagcatgcagcaaaggcatagactgtatttagagatgtggtttcatttattcttgaagtcctataaccttgcattatttaaacacaaaatcccacctaacatttgccaaatccaagttaatctcaaaaacctccgaggacattgagcacaagcagattactgtaagggcactggtggcagatagtggtggagagagggctgagtgacccagagcaaagcctgcccgggttactcgctgacacttcaggagagggatagtatcagctctcattaccttttgtcatgaggcagttcataaattaaatatgatatcatgcattatctcaaaatatttctatattaattagataattcacgatgtaaaacgtgttcatgcagaagcaaaggcggatgtaatagtcaagtatcagggaaaaacccctttaggatacccagacattaaaaatgtaaaaagtagcttataagaaatgtggattatcagatttttactatatataggttgtgtttaatagtaatttctgacacctgcacatagatgaagaaaaggcagttgttaccacttttcaccattcaaaaaatgggcttgtctcttaggagtattgggttaatgctttgctttatttgttaatggaaggacagcctttttaattttaaagcctccctttggtnggggccgatgggcccgggccggattccc

SEQ ID NO: 360790 - DNA, 583 bp, Homo Sapiens
cctaagtggaactgctccggtcagttgtttccgttcgcaacggttagttttcctttgtaaggccagggctcggggcatgctaggaagtgctccgagacgcagggttttatgtctcttatgtcgatcacacagcaggctgtagattgcactatagtgatcataggcatctgatcttaatgactgcagtgtctgttctttgtccagtcccatgtcctccatggccaagaggacatcctcattcacgggggtccacctgtctttcttcctttagttgttggcattcagctattaacctgtcaaagttgggatcggcgtcccctagcttcatccacttgtgcttgcagatctgctccatggagaggcgcttattgggatctaacaccaacatatggcggatcaaatgctcacattctgtggacataaaaaatgggatgcggaactttccactcagcacgcgggcccgcagattctgcagtgtgctaccatcaaatggcagggcaccgcacacaagcacgtagaggacaactccaaggctccagatgtccaatttggcccatccccacgcactccgaaaaaggctcgt

SEQ ID NO: 360791 - DNA, 443 bp, Homo Sapiens
  misc_feature (12)..(12): n is a, c, g, or t
cccaagcagtcnatttggtgacttaggctaagtgcctttcctatgggagtccaaaataacccccattcccctcaagcaagacagagtacagagaagggcctcagaggacaccctgcagtacagctatcccagagagactgggcttcaaggtaacagcctaatggcttgccccactcaaaaccatcccagctcttcaccccaggtctcctcttcctctccctgaagaaaccatcatgagagagatactctggtggagggactctagctaccatgcacatgtacatatccacagaatatgggaagtgggaatggctatatacatggctttagtagtctggagaaatctactccccttggccaggacatgctgctgctactgctaacagccaattttatagacagagaaagtattttgtgttcaaataaactttaattaccaaatc

SEQ ID NO: 360792 - DNA, 1085 bp, Homo Sapiens
ccacaaaattactttctcggtccttaaaaatggctgttaggcagtagcagcagcatgtcctgcccaagggggagtagtttcctccaggcttctaaaggccatgtatatagcccttcccacttccccatattctgtggatatgtacatgtgcatggtagctagagtccctccaccagagtatctctctcatgatgtttcttcagggagaggaagaggagacctgggtgaagagctgggatggttttgagtggggcaagccattaggctgtaccttgaagcccagtctctctggatagctgtactgcaggtgtcctctgaggcccttctctgtactctgtctgctgagggaatggggtattttgactcccatagaaagcactagcctaagtcaccaaatgactgcttggtccccactgaagcagtgtagctctccatagtatttttggtggttatggattacatgtgtggccagctcatgctttttcttgagcaggggctgtccatgacctgtgctcataccatgctttctaagttctctttggacagggcctcagctgctgcctcagcctgagtttcagagagtgtgtaggagtcctggtaatcttgaagcagtttgaccacctccagatggttgaactgcacagcatcatccaggggaatgttgccccacctgtccttggcaaaaggattcactttgcaagcctcgatcaggaatttaacaacttcgatgtgtccttcagctgcagcaacatgcagagctgtgcgcgagtcatagtctttctgttcccatatccatggctgacaaggcaaacctgagggtagtgggaaagcagctagagttgcctagatcagactggaatcacaggtgttctttgtgaactggtgtcagactggatgagtttcagagaaagtgaaacagcctatagccagatttgttggctctgaataatcttttttccatatccagatgagactgttatactcatattagagagatgggaatgtgatccttccagaaatatcactcactgcctacctgggtaagtcccatttgaggcagggtcctacttcctagacactgctct

SEQ ID NO: 360793 - DNA, 1476 bp, Homo Sapiens
  misc_feature (745)..(767): n is a, c, g, or t
  misc_feature (814)..(833): n is a, c, g, or t
gtttgcttgaaggaacagctcaaagcaccttcacaagttgccttgacttaccctaggtgggtgtgaaagagcacccgtagcaaggaaaattttctctattagtgtgttcttctgcctcttcccccttgattcagctttcagaggtactatggcagttttgcctcaggtgctgaacatttctcagccctggctaaaagggagcagcacagggagagaaacaggatagggaaagcagaatggcgagcagcctatggcccagggcctgtaatcccttcccaagactagctgctcagggtggtgcagggacaggaccagaccctgcgcctatttcctgccttctttcccctatagggaactctgtaggctgagccactgtcctgctcttatgacattatatcttgtgcctttctcctcagcagtgagcagtgagctactcctggcccaggccctaggggaaatggatcagtctttgaggtttctatttggggaggggagtacttaagatgagtcaaaagacactttcctctgttccattccccatctcagggactcctgaatattcagcctctccaggctggtgtcttctagtttcccccactgggaatgctggctgggagagccatgactaccagacttttcctcaggctccttggcatgttagtctgaattgttcttgagcactgtactactgacccaacaactgtgactagctggccacgccattcagggctggtgtggcatttannnnnnnnnnnnnnnnnnnnnnnttttcctgtttgcccagcagtgcattgtgggttccaagagtgggtannnnnnnnnnnnnnnnnnnncagagggagacctggcaggcacctctttgagagtagctgtggtcagagctgtttggtcagtgcattatgttgaatgaggtccaggaacccagagccacccaacagacaccactgtgggcttgccagctgccaagatggagaagcatgtgcccctgtagagcgtctccccagaaccagaccccgagccactcgcttcctctgtgctgtgacaacattggtgccaggggagatggtgtttttcaaagggacctactgtagccactttaatttacaattaagagccttagtttgacttaacacttttgtaggcttttcattgtgtatttttgtgtatgtgtgcatatagcagctactctgtagcagaggtgggtagagacacttaatagtatcatgtcgcatgcagatgtcacatcggcctctgcaaaaactgtactgtcttgtttctgcattagacttaagtagtcatgtgaatatactgctatgtcacttttaatattacgagttttatacttggaaaatggtacttgcttcttttaaatctctgtcttctctaacctcccccttcccatttcaatgctcccttcctaatttcagcaataatctcaaaaagcaattaaatagttaaatgaccctaattgtaaaa

SEQ ID NO: 360794 - DNA, 480 bp, Homo Sapiens
tagactacgtctgccagctgaaattcccttctggcaattaccctccatgtataggtgataatcgagatctgcttgtccattggtgccatggcgcccctggggtaatctacatgctcatccaggcctataaggtattcagagaggaaaagtatctctgtgatgcctatcagtgtgctgatgtgatctggcaatatgggttgctgaagaagggatatgggctgtgccacggttctgcagggaatgcctatgccttcctgacactctacaacctcacacaggacatgaagtacctgtatagggcctgtaagtttgctgaatggtgcttagagtatggagaacatggatgcagaacaccagacacccctttctctctctttgaaggaatggctgggaacaatatatttcctgggctgacctgctagtcccccacaaaagccagggttccctgcattttgaactctggaaagggataggcatgcc

SEQ ID NO: 360795 - DNA, 669 bp, Homo Sapiens
  misc_feature (15)..(15): n is a, c, g, or t
  misc_feature (25)..(25): n is a, c, g, or t
  misc_feature (90)..(90): n is a, c, g, or t
  misc_feature (104)..(104): n is a, c, g, or t
  misc_feature (143)..(143): n is a, c, g, or t
catcatcagtgctgnttgtctccancatgtcaccttcttctgttgagatccacatgctgttgctttcgaggctttttccttggggaggcnccaggtggtaggtnacttgtaggcatggacaagttgtttgccagcaatgcaanagatggagacacagtgttggtagccagtggaggaactgcagaaactggcctcatggatatccattggttctacttcttctttcactttaatttcaggaacgggagggcccaagacggaggaaagaactgccacccacagtgactgatggaggtggtgcagctgcaatggtggtgatgggtggagtgatggggaccgctccaggaatgttgaaagggcaacggctgcttgtgacgggggactggctgctgcaatcatagttggaatggtcggtgggggctgctgggcagttggagggacggcaatggtaggctgatcattattttgattggatacagtctccatggacacagtgaccggagtggccatagacacgtggatttcagacttgggtttggcactaaaacacaaaagaaaagcacatgtagcaaataagaaaaaaactgccttcatctacaacatctcagaggatgagtatttgtccaattatttctgtccagcacactgcacaatttatactctatttcc

SEQ ID NO: 360796 - DNA, 880 bp, Homo Sapiens
  misc_feature (39)..(39): n is a, c, g, or t
  misc_feature (55)..(55): n is a, c, g, or t
  misc_feature (269)..(269): n is a, c, g, or t
caatatgaaaatctttccaaaaaggtaaaggtcatttgnccaagattagaggaanaaatataaaatctgttctttgcagcagcaagagattctttcggcctttagttctttatgtcataaaagccagctgtgcttgaatgtaaaggtccaccttgctggtcagtctgcccagggctggagggaggccagactcttgggattggcgagtggatggaggagcagtggaatggcagagcagacaaggttaccagaccaagcccgcccacagntggtagaaggaagccctggttaggttctagaggtgcatatggtcaacgtgcccccagaagcatcacaatgagggaaatcatccaagaacgagattgatgggcaagtgagaatctggccagacctgctgtttcctgctggtcaaaaaaggaagcaatgttagtgagagtggggaatctgaatgagcgccatggtggcagtaggaggtaatcacaggggcgcctggagcccccagccacagctaggagcccccaccaagaagagtggcagtaattcagcagatagctaactctctacgcctatgattttaaaagtcctctgatggtgggtgagaagacaaaccccatgagcaccttactacaggcccagtcaagagtgcactgattccacacacactggggctcagagggaacccccagctcaatgcgaggcctcaggaccctgggatccgaatgtggggtggataccgcccttctccagttagacgattttccatttaaacatagatttgccgttagtgtcttttatgcttttttcttcttgcaaaatttgttcacataaaaaaattatttttctttccagtttctttccctcgtgccgaattcgccaccca

SEQ ID NO: 360797 - DNA, 494 bp, Homo Sapiens
  misc_feature (379)..(379): n is a, c, g, or t
  misc_feature (384)..(384): n is a, c, g, or t
  misc_feature (405)..(405): n is a, c, g, or t
  misc_feature (419)..(419): n is a, c, g, or t
  misc_feature (442)..(442): n is a, c, g, or t
  misc_feature (479)..(479): n is a, c, g, or t
accccacattcggatcccagggtcctgaggcctcgcattgagctgggggttccctctgagccccagtgtgtgtggaatcagtgcactcttgactgggcctgtagtaaggtgctcatggggtttgtcttctcacccaccatcagaggacttttaaaatcataggcgtagagagttagctatctgctgaattactgccactcttcttggtgggggctcctagctgtggctgggggctccagggcgcccctgtgattacctcctactgccaccatgggcgctcattcagattccccactctcacttaacattgcttcctttttttgaccagcagggaaacagcaggtctgggccagatttttcactttgcccatcaatttcngttcnttgggatggattttccctcanttgtggatggttcntggggggcacgtttgaaccatantggcaacctttagaaacctaaaccagggggttttccnttttaaccagttttg

SEQ ID NO: 360798 - DNA, 393 bp, Homo Sapiens
acaagactagggttaggctatacttgcccacagcagacctggcttctttggacagcctattaaaattcctactgttcattcctttaacactgttttgagctttttttatatagttgacatttataaactctagggataggaagtctatataatccttcttttccctgtgaagtgacacttgctctgactctaactgatgcaggccagtgtcttccagaggctggaagggggtttcagattagttctacccttgaagatgtcattgtttaagctcagggttgccctatcatatgggcctattctgggtgcagatgtgcttatatctcctgatttacagggttttttgcttttgttctaagagctgaatgaggatgggcaattttatttaaaaat

SEQ ID NO: 360799 - DNA, 1519 bp, Homo Sapiens
  misc_feature (1491)..(1491): n is a, c, g, or t
gcctgggtggcgaattcggcacgaggcaaccctgatggttttttctacgcctacgtggcccgcctggatgctatgcctgtctgcctgctgctgcttggcacccaacgtgaagccttccatgccatggccgcctgccggcgcctggtcgaagatgggatgcatgcccttggtgccatgcgtgcccttggggaggctgccagcttctctaatgcctcatcagccagtgctcctgcctacagcgtgcaggctgtcggggcgccgggcctccggcacttcctgtataagcctgctggacatccctgaccaccaccgccaactgccccagtttaccagccctgagctagaggccccctacagcagagaggaggagctggcagcgtgctgtcggacctgtaccaccgcctgcatgctcgtctccacagcacctcccgacccctgcgcctcatttaccacgtggctgagaagtgagacactactggcctgggtgacctccaaattcgagctctatacctgcctcagccctctggtgaccaaggcaggtgcaatcttggtagtgaccaaactcctgcgctgggtgaagaaagaggaggaccggctcttcattcgttacccacccaagtactccacaccaccagccacctctacggaccaagctgcccataatggcttgttcactggactctgatagttggagctcccagaccaggcagtgctgggagcaaccacctttgttttttaccttctgtctaccctggaaatgtgtgtgggggtgtgtctgtggccagtcattgtctccctaagcaatggggcaaggtctgagggcccaccgatgagagagatggtggcagccgccaggcgagcaggctgctttccctgcccagtcatgcacctccccctctggggaaatccttaggcctccctctcccttccctctgtctcatctcctccacttggatgatgctctagcctctgtcagggactgtcccctccaaacttgcttccgtggtctgcctcctagttgaatctcagccctgagtgtccagatctggccaaggtgtctagggtggcccacgggggtgctggaattggcacttcagggccaggctatgcttgggactggcctgagggtattttaaagaaaaaaactacataaaaggcctaaaagtaagacccacaaggatattcctttgcccttcttgtacttttttcatctttaccctgccagaaatgacccgccctcaatgctggctgctgctaacattaatgagaaggtggccttcagtgtccacctgtggaacccaggacacagcacctgactgcacacagtgggctgaaatccagcatttttacataggagatgcacttagcctctaagcctcgttttactcatctgtgaaacagagataagtaaccctctctcatgaactctttgatgaggatttgtaaacgaaaacagactcgaactatttgtaccaccacatagcacatgcnacgctgtcccagactttgacaacctgca

SEQ ID NO: 360800 - DNA, 696 bp, Homo Sapiens
cagacctgagccaccacaccaggctgccccacacattgtaaagttttcgcttccctctaatgtcagattccaaagacagcagccttcatgagtcagaaagaaacatcggtcattttgaaatcaacatccaactgaagtgtagaaaggcctctggatttttgaaacggcaacaacagatgatgtaatacaaagacgcccccaccccactgctttcccactgcatgctttacatgacatggcacagcttccacgccagcagcttcaatcatgtaaagcgaatgcagtcccatcaagaccacagcattggctgagcagctactccatgctgggcaccgtcctgggcactggaagtacagcagagaacgaaaccaagaccacaccctccagaagcctgcattccagcaggacagacagacttccatacacagagcaggaaaatgcacagcgtgtcagatgatgatgattactatgagaaaaataaagcaggcaaagagaacaggactatttggatgagggtggtgcaaattcaaataatcagacagcctttgctgggaaggtgatatctgagcaaagattcgagaaggtggggagagccccggagccttccccgcagagcagaggaggcccgggaagctctggactcatagcggttcagcacggcacgacacggcactttcagacagagccctggtgctg

SEQ ID NO: 360801 - DNA, 716 bp, Homo Sapiens
  misc_feature (406)..(406): n is a, c, g, or t
agaatagaataattatagtcatttgagaatgcagtcaagcccaacagtgaggacccaggatccttccatcttgttgctccattggctccctgaagattgaggctagatgacctcaatggttgttctgctcatggaagggaaaagagaagacgcatgggggaaagacccattttaattgaatgacatgggagctgcacacagtccttccatgtgtatttcatgaggaagaacacagtcagcgctggccaccaaacagacttacgtcacttacaccaaccatgcaatctagcgagtccatggagctgagcagcaggaggaggagccgtgaccctgtggaaggtgcgtcggggcccagggccacacccaagggcccagctgtcttgcctgcccgtgggcacccacggangtggttggtgctgaggatagcagagcccccagccatcactgctggcagcctgggcaaaccgggtgagcaacaggaggacgaggggccggggcggtgccaggctaccacaagaacctgcgtcttggaccattgcccctcccggccccaaaccacaggggctcaggtcgtgtgggccccagtgctagatctctccctcccttcgtctctgtctgtgctcgctggcgacccctctgtctgtctccagccctgtctttctgttctcttatctctttgtttcaccttttccctctctggcgtcttgcgggggctg

SEQ ID NO: 360802 - DNA, 432 bp, Homo Sapiens
  misc_feature (31)..(31): n is a, c, g, or t
  misc_feature (366)..(374): n is a, c, g, or t
agagcagggcaggcaggtcgctggggcaagncgggggcctccccccgtgctgttccccagcctgccaggtaatcacgagagtgcatcccaggcaggtggcaggagacattgcacatcgatgtgaagcgtgacccagtcacttggaacagctggacctgttgcatcttcctccttagcaataagcctcgtgagcatcggatccttccagaaaagccattgtgcgatcgggccacacccagattagcgggcacagcacagcggggcagtagacaccctcagaaaaggtcccagggggcggctggggctggacgggcttgtgcactcatcagtcacactacttttaagagctgttaccagattaccttnnnnnnnnngctgtaacaggctgaggaggcaggaggattgctcgaggcccaggagtttgagactagc

SEQ ID NO: 360803 - DNA, 229 bp, Homo Sapiens
gtgtaagccatggcacccagcctgaacagatacattttctcctaccactcagatgtgagtttctatcctcataggctgcctctaacctgatcttcctgtccccaactgacagggcagttttgacaccatgaataataattataaatatttgttatgaatcttcggacctggagaaagtttaagcttagctggcataagccttgatgcacagtcagctataaactgggga

SEQ ID NO: 360804 - DNA, 1527 bp, Homo Sapiens
ctgcgtggctgtttggctgtcacttgtagcaataacgacattagttctagtcagtgctgttttacatttttcttttgatgggtttagtcttgccctggagtgccgatgatgattctccctccagagccacgcttgggaacatgaagcaagtctggcgtgtgggctgcgtgccggccttagtgggacccgtggggttggagcatgcctttaggggcagtgtctgggccgaagcacgtcccaccacacagtgccagagccagagaaggggccccaccaccaaggccaagcttgaccaggtcagcattgccatggcccagtgtgccccgtggcctctgaagatccctctgtgcagggtctgcagggatctggattgcaagggcccaagtctgcaggtctggaagcatcttcctataagagcactttcgccttctgggtcaggactccaaggtgcagcgggcttcacagccctacaattgggttctcagctaagccccagagttctggtagaaccatcccggggcgggtggagggtgggatttaagggagacgggaacacatggggcaggtcctggaacttggtggcctgaggactgaggccattgccctggtggaaaggcctggcctggttcctgtggcttgggacctgaataggcaggtgctgctggctccgtagaaacccttttcccatcttttgctctttgccaaacctaccttgctttgggagctgcctgcaccaccccagagaaggccccaccttcttcatccctcagacccgaggaggcctcccagtaaggagtttcccaagaggggactcacaggaaacaagtcttagtgcttgggagggaggccccgctgcgtgctcagactcacagccaacctggaaggtagacgagatagcgccacccacgcccctccacaccccagactccgagtaaagcgggcggtagggccggagtcacctcccctatggcagtggccgccgctgtactccatcctcccgtcaggaagatcagctgtaaataaacgctgggctccccagagcacctgtccgcccactgcccttgctgttctgggatcttcgctgcagttcacgggaaacaagcctgagtccgctcgcacccgcggctgctctcccggctcggcccggccgcctctgtctccggccaccgggtggcgctgccgagccagagccgccgcgtcccggcgctttccaggagccccaggcccggaggaggcgaagcccgcagagcaaaggtggaaacacgtgcctacgctgtaaagaaatcctgttccagagcatacctgttgtacaaacagacactgttcctaacgagaggagtgacgtattttcatcaccgtttttaatttgttttcttacgggtttacgattttgaatttttcttatttggttgaaagaattttgattctatcagcctgagtgagttcagcctgtaaaaaggatgttaagctgtgggtaaaatatgcaaacgaaaagaaatatattgtacaaattctatataataaggt

SEQ ID NO: 360805 - DNA, 1379 bp, Homo Sapiens
  misc_feature (1259)..(1259): n is a, c, g, or t
  misc_feature (1274)..(1274): n is a, c, g, or t
  misc_feature (1296)..(1296): n is a, c, g, or t
  misc_feature (1316)..(1316): n is a, c, g, or t
  misc_feature (1324)..(1324): n is a, c, g, or t
  misc_feature (1337)..(1337): n is a, c, g, or t
  misc_feature (1342)..(1342): n is a, c, g, or t
  misc_feature (1349)..(1349): n is a, c, g, or t
  misc_feature (1360)..(1360): n is a, c, g, or t
agcggggggagcgtcgcacagcgactgcatcaccatggagccgagggcaggtgtctccaaacaggacatacgtgaacaaatttggggctacatggaatcacaaaatttagctgactttccccgacctgttcatcacaggatacccaactttaaggggtcttatctggcttgccaaaacatcaaagacctagacgtttttgccagaacacaggaagttaaagtggaccctgataaaccactggaaggcgttcggctgctggtgctgcagagcaaaaaaacattgttggttccaacaccacgactgagaacgggattgtttaataagatcacaccaccccctggggcaactaaagacatcttgagaaaatgtgccacctctcagggtgtgaggaactacagtgtccccataggcttggactccagagtcctcgtggatttagttgtggtgggatccgtcgccgtttctgaaaaaggctggagaatcgggaagggagaaggctacgccgatctggaatatgccatgatggtatccatgggcgccgtcagcaaggagacgccggtggtcaccatcgtccacgactgccaggtcgtggacatccctgaagagcttgttgaggagcacgacatcactgtggactacatcctcactccaaccagagtcatcgccacaggctgcaagcgcccaaagccaatgggaatcacctggttcaagatcagcctggagatgatggagaaaatccccatactgaggagcctccgcgcccgagagcagcaggctgggaaggatgtcaccctccagggtgagcaccagcaccttccggaaccaggctgccagcagacagtgcccctgagtgttggcaggaggcccccggacacacccggaccagaaaccaattccatggaggcagcccctggctccccaccaggggagggtgccccgcttgcagccgatgtttacgttgggaacctcccccgggacgcccgtgtgagtgacctgaagagagccctgcgggaactcggctccgtgcccctgcggctcacctggcagggcccgcggcgcagagccttcctccattacccggactctgccgcagcccagcaggccgtctcctgcttgcagggcctgcgcctgggcaccgacaccctgagggtggcgctggccaggcagcagagggacaagtgacctcgtggacagccacggagctcactgcagacttcgccatccccgtccccttgccgctccggttccgatggcactngagaggccttgcgtngcaagacgtttttggaagccancgccttgagttgttcgggtnttcaattnttttttaagaaantcaancgttcanttggaaacggnccaagggctttcttgttga

SEQ ID NO: 360806 - DNA, 1370 bp, Homo Sapiens
  misc_feature (373)..(471): n is a, c, g, or t
gcggagtatgtggctttccccaggtctctggaggttgcaggctcaggctctgctcagcgggtcatcacccgtagcatccggttaagaggctctccacctcgctcattttggtctaactggatttacacaaactcactgtgcacgtgcctggggcgggcaaacccggaaacgacgccgagtcccgcgggatccaggaggagccaactgcgccggaggaggggtttcggccgacacgtcgggattggcggctgcagccagggtcctccgacgctgggcttccgtgagcggcgctctgccagatctctggaccggattcgtcccattctcgtcctcatggtggacaagaaactggtggtggttttcggaggcacannnnnnnnnnnnnnnnnnnnnnnnnnnnnnnnnnnnnnnnnnnnnnnnnnnnnnnnnnnnnnnnnnnnnnnnnnnnnnnnnnnnnnnnnnnnnnnnnnntacctgaatgagaatcgtcgttgagaaggtttcctggatgctccttgctgtggtggagcactcccttcggggtttcgcccttcagtgggactttcaggggaagctgctcgctgatctggccaggcgcctgggcctccactatgtggtctacagcggcctggagaacatcaagaagctgacggcagggagattggccgcgcgcacttttgacggccaaggggaggtggaggaatatttccgggacattggcgttcccatgaccagtgtgcggttgcctgctattttgagaacctcctctcccacttcttgccccaaaaagccccagacggaaagagcctacttgctgagcttgcccacaggtgacgttcccatggatggcatgtcccggtctgaacctgggtcctgtgggtgctcagccttttgaagatgccaagaaaaatacgtcggccagaacatcgggctgagcacttgcaggcacacggccgaggagtacgctgccctgctcaccaagcacacccgcaaggtcgtgcacgatgccaaggagctaactggccacagagtgaaatttctggcttagatgttttgaccaaatagagagaaaagcttccaggaggagagggccataggagccaagatgactcctgaggactacgaaaagcttggctttcccggtgcccgggacctggccaacatgttccgtttctatgccctgagacccgaccgtgacatcgagctgaccctgagactcaaccccaaggccctgacgctggaccagtggctggaacagcacaaaggggacttcaacctgctgtgacctgcccgcctcgcggccccttgtggggatcgggggcaccagaggggcagaggcaccaacatctgaataaagccattgttctccc

SEQ ID NO: 360807 - DNA, 1084 bp, Homo Sapiens
cgtgagcggcgctctgccaggtggggccggagctgcggggagggagttggctgcctagcgcacagctccatccccgactctgcagtggactcggccgcagaatcggggtcccgggctcctggaacttgtcccccccaggcctgcggcgaggaggtcactccagccggtgggacccgggccggggggcgggtgactggaaccgggagaggcgggaaggaggaggggatcgggcccaagggacacgaggtgggtcgcgggaccccgatatctcgggacaggcgtcttgccgcttccgggcccatgccgccccctttcgacacatacttcgatgcatgagacaatgggggtgtcctttgtcgctcctggcgggaaccccggacccaaccccaactccaagcctcccattagcccccagatctctggaccaggattcgtcccattactcgtcctcatggtggacaagaaacctggtggtggttttcggaggcacaggtgcccagaggtggctccgttggccctgtacactcctggaaagatgggacattcaacggttacgcagtggatgacccgaaagccctagggaagaaacggcaggcaaaaggagctgaggctgcaagcgtgcagaagtagtgcagggaggaccaaggatgaccaggttcatcaatggacgctggccctgaaatgggggcttacgccaccttcatcgtgaccaattacttgggagaagctgcaggccagggagaaggagcgtcagcaggggaaagctgctcggtgaatgtggcccgatcgcctgacggctccacataatgtggactacaagcgggcctggagaagcatcaagaaagctgacggcaggggtagaatgggccgaacggtgtcgactttgaatgggcaaggggcgagggtgggaagagaatcattccggggaacatatggacgttgcacaatggaccgagtgtgatcgatgttgacgtggctattgatggggacgactactgatctacaaataataggtcactcgagaaatgcccacacagtgaatagagcttctgtcgtgtatattggccgactagtgtacgttcca

SEQ ID NO: 360808 - DNA, 1130 bp, Homo Sapiens
tggtacggtcggaatccttagatggggtttcggccgtacgtcgggattggcggctgcagccaggggtcctccgacgctgggcttccgtgagcggcgctctgccagatctctggaccggattcgtcccattctcgtcctcatggtggacaagaaactggtggtggttttcggaggcacaggtgcccagggtggctccgtggcccgcacactcctggaagatgggacattcaaggttcgagtggtgacccgaaaccctaggaagaaggcagcaaaggagctgaggctgcaaggtgcagaagtagtgcagggagaccaagatgaccaggtcatcatggagctggccctgaatggggcttacgccaccttcatcgtgaccaattactgggagagctgcagccaggagcaggaggtcaagcaggggaagctgctcgctgatctggccaggcgcctgggcctccactatgtggtctacagcggcctggagaacatcaagaagctgacggcagggagattggccgccgcgcactttgacggcaaaggggaggtggaggaatatttccgggacattggcgttcccatgaccagtgtgcggctgccctgctattttgagaacctcctctcccacttcttgccccagaaagccccagacggaaagagctacttgctgagcttgcccacaggtgacgttcccatggatggcatgtccgtgtctgacctgggtcctgtggtgctcagccttttgaagatgccagaaaaatacgtcggccagaacatcgggctgagcacttgcaggcacacggccgaggagtacgctgccctgctcaccaagcacacccgcaaggtcgtgcacgatgccaagatgactcctgaggactacgaaaagcttggctttcccggtgcccgggacctggccaacatgttccgtttctatgccctgagacccgaccgtgacatcgagctgaccctgagactcaaccccaaggccctgacgctggaccagtggctggaacagcacaaaggggacttcaacctgctgtgacctgcccgcctcgcggccccttgtggggatcgggggcaccagaggggcagaggcaccaacatctgaataaagccattgttctcccagatgg

SEQ ID NO: 360809 - DNA, 687 bp, Homo Sapiens
ggggggattggcggctgcagccaggggtcctccgacgctgggcttccgtgagcggcgctctgccaggtggggccggagctgcggggagggagttggcgcctagcgcgcagctccatccccgcctctgcagtggactcggccgcagaatcggggtcccgggctcctggaacttgtcccgcccaggccgcggcgaggaggtcactccagccgatctctggaccggattcgtcccattctcgtcctcatggtggacaagaaactggtggtggttttcggaggcacaggtgcccagggtggctccgtggcccgcacactcctggaagatgggacattcaaggttcgagtggtgacccgaaaccctaggaagaaggcagcaaaggagctgaggctgcaaggtgcagaagtagtgcagggagaccaagatgaccaggtcatcatggagctggccctgaatggggcttacgccaccttcatcgtgaccaattactgggagagctgcagccaggagcaggaggtcaagcaggggaagctgctcgctgatctggccaggcgcctgggcctccactatgtggtctacagcggcctggagaacatcaagaagctgacggcagggagattggccgccgcgcactttgacggcaaaggggaggtggaggaatatttccgggacattggcgttcccatgac

SEQ ID NO: 360810 - DNA, 844 bp, Homo Sapiens
  misc_feature (151)..(160): n is a, c, g, or t
  misc_feature (673)..(684): n is a, c, g, or t
accggaagggagacgtccctctacataaaaagctcccatgtgaaaagctactccccagtttttaacatttgcagtcccttgtgtcactgttcttctggtcctgatgtagtccccactgtttctagaagtctcttttaagcattatttttgnnnnnnnnnntatttttatagatgaatactcaggctaacctagtggatgtgatcttggaacttccatgattatccacttaaagatcaaagtattatatgctgtgtgctttttaggtgtttgttagtactgtgaaggcaaaaatgctttctacattgacattcattcctattttactgggcacctatgaatgtatgctgtgtgctagaaatagactaaaacatattcctatagcatgttagtgtgtttgcatgtttgctgaaaatcctttgtgtataaaccagtttgtaaggttctctgggttaggtagggactctgcagtttcttcctgtcaaaatctctcctaccaagatggtgttccactgtccagcccagcatgagtagcaggtagagcacagctttactggctgtttgtatgctttggtttagtgcaatgtgtggtagattacttatcagaaaacatatatgtcatctctagaacgaagaaaaagcatagtagttcaattcccagtgtgtccctttgannnnnnnnnnnnaatagtaaaaataagaatctgtactgacttttcacttggccattctggttttaaaggacaagctacaagctctgtgtttctgtactgatgtgtcacttattaaatacttttgtaccatgagtaaaacttcaggtgtttcgcaagaaccaccattctcaac

SEQ ID NO: 360811 - DNA, 1059 bp, Homo Sapiens
  misc_feature (78)..(114): n is a, c, g, or t
  misc_feature (525)..(542): n is a, c, g, or t
caccacaaccccacacccaccgcctccgcatgatagactcactataggggatccgccgctgatcgcggtggcggccgnnnnnnnnnnnnnnnnnnnnnnnnnnnnnnnnnnnnnatcaggccaaatcggccgagctcgaattcgtcgagagcggagacgcgcgaagcaccgggaacctgagccgtgaccgcgggctctggcgcctttaagggggtcaacacgccccacccccagttccgcagaggcagcgtcccgcgactgggcggtgcccgagaccacagacgccgccagccaatcacgctttcgatcctgccgtgcgagcccgaggcgctgcgaacggtgcctaacgtcagacgtctcgaggctcgcgttccatggaggaagccctcccaatccgaaagcgcccgggcgcaaagccctgcagccggaagctcggcgtcccatgggagcgacctccgcatggctggaccaatggaaacggaggaaaggcgggacgtcacttgctgactggctggttgggcactnnnnnnnnnnnnnnnnnngagttccgccgctgggactacagcgtttggctgcacggggagttctcgtatgtctagaacgatggcctttctgcggtgtctgcgaccgggaccaaggcggagcaaagtcgccgggggtgtggggtgttccacgctatgacgggagtgttcgctttcagacgtacatgactacgttctaaatttttactttggagacagtttcattctgtgtggcccaggcttgaagtgcaatgggtgcagtactacactcaaccagaaacctccgacgaccgggttccaaggcaatggtcccgtactcagcctcccaaagtagctggaatacaggcatgcgccaacacgcccgggcttatacggattgacgtagagacggggttccgccatgttgcgtcaggctggtctggaacctcctgacctcaagtgaatcaacgtggctagctttacgaaggggcggagattccgggtgtgaagccacagggcctagccctcttaactttgaaatatatcgtgaacatgtatg

SEQ ID NO: 360812 - DNA, 323 bp, Homo Sapiens
  misc_feature (143)..(257): n is a, c, g, or t
gataggctgggtcaaatgctttcccttactccttctttgggagataggatccctctttattatagaaaatgtgttgttgttattattattattattgagatggaatctcactctgtcacccaggctagagtgcaatggcaaannnnnnnnnnnnnnnnnnnnnnnnnnnnnnnnnnnnnnnnnnnnnnnnnnnnnnnnnnnnnnnnnnnnnnnnnnnnnnnnnnnnnnnnnnnnnnnnnnnnnnnnnnnnnnnnnnngttgtcttagaaatcaagggaaaagagcatttcatcaagtatgtacaggatcggctatgtaggagt

SEQ ID NO: 360813 - DNA, 534 bp, Homo Sapiens
  misc_feature (19)..(19): n is a, c, g, or t
  misc_feature (68)..(68): n is a, c, g, or t
  misc_feature (128)..(128): n is a, c, g, or t
  misc_feature (168)..(168): n is a, c, g, or t
  misc_feature (197)..(197): n is a, c, g, or t
gcgtgtgcaggttgtgcangtggggcacgagctccagccagaaggccaccttgttggcgcggtagttntcacgcacgcgtggcttcaggcctatgtgcagatactgcttctccttgctgttgaatttnatccacaccacctcctcgaagcgattgggcttggtgtggntgaacttggtatcctgcggcaccggctgnttggggtccccagtcttggcgaagttggtccagtaggtcatgaccacggcactgagcatgacgtcattcttggagaagttacaggggaagaggtcggtggcacccaccatgggcacgccaaagacatagggcagttcatccccgtgcgccgcatctgcccactcaggccggccctccgcctggcagtggtggtagaaggtgtaaaagtagacgggagactggtagtcggcgtgcagcttggcagtggccacagctggtgccacccattggtggtcagtaaagagcgccagcaggttttgcggcgcatttcgccattgtcccggtcagcttagatctt

SEQ ID NO: 360814 - DNA, 277 bp, Homo Sapiens
caaacttagacgtgggtgatgtagatgggtaggatggctggactgcagtctgacttcacgttgaatcattctggatggggcctttttctgattttacctcataaagctactattgtagaaacttggctttgctcctgtgacgaagccagacagaggaatggcttttgggaccagagtgagtcaagcatgtatgtgtatgtcacacggccaaatttgagggcattctcacatgtgctcttctctcaaaaccactggggttgacagatccagggaggct

SEQ ID NO: 360815 - DNA, 891 bp, Homo Sapiens
  misc_feature (13)..(13): n is a, c, g, or t
acttccggcacgnggggctgaacccaaggtcttgcctcaaaatcaattcccccttccccctccaacacatacaccgcaacagaatgatacagctattgtgattgctaggagaagggctttgggcagtgcagtctcctgtttgcagtaacacctgctctttctgaagagctacatcagtaacatggtgggttttcctcacaacttaaaagtctgatcgtaacacattcatgggaaactagaaccagcacacgaaaccattggcttgtggccctaaagaaataactctgtgtccagaaaatgccatgttaccaggttgcctacagctttgcctgtaacatgggcacaggctgggacatcagatagaagctggttcccatggtggctgggttgggatgggctaagttatgttgcagtaacgtacaacctcatcattttagtggctagcatgacgaagttttatttctcatgctacatgtctactgtggctttcccggtggctcagggttctcagagcccctggcagatggaggctccaccctgtggacgtcaccagttgttatggctggggaaggacacactggaggctcttgctgctctgagccacaggagacatttgtcatatctgcacacagcccactggccctgcggcatcctaccacctgcccagaaggaggagaaccagaattacttgctgagcagcttcctcttgcatgtggggtgcaatggcgtcttattgactctcaggaaagctactcttagtggccatcttaccagtgtcacacagtgttcacgctcggtcatggcctgggaagatccagagtcacagagggataggacctgggagtgtctctgaaaataagctgcctgggttttcactccccggtttttacg

SEQ ID NO: 360816 - DNA, 420 bp, Homo Sapiens
  misc_feature (365)..(365): n is a, c, g, or t
  misc_feature (376)..(376): n is a, c, g, or t
  misc_feature (391)..(391): n is a, c, g, or t
gaaaatcagcagattgggagggtagaatttcttccagtcaactggcacagtcctttgcattctactggtgtggatgtagatctgcagcgaataaccctgcccagcattaaccgcctcaggcacttcaccaatgacacaattctggatgtcttcttctacaatagtcccacctactgtcagactattgtggacacagttgcttctgaaatgaaccgaatatacacactttttctacagaggaaccctgatttcaaagggggtgtatccattgctggtcatagtttaggttcgcttatattgtttgatatcctaacaaatcagaaaggattctttgggggatattgacagtgaaaaaggattcgctnaatattgttantgggatccaaggagntacacctaccactaggaggaagatttgaa

SEQ ID NO: 360817 - DNA, 599 bp, Homo Sapiens
ccttatactgttctagcttatatgcacacaagttatctactatcttctttggttaggttaaaaattccttcagaacataaatgctcttatattccctctatcacgtctttaagcacatagaaggaactcaaatatttgcctaattgacaagttgtttatgactggagattcccccattcattctttaggttaacaacccaaataaatgacgggtgatcctggaaacagtccagtagaaagtacttaaaaggtacagtcagagattgttggatagataatgttggcaattgtagagtctaggtgctgggtttatgggagtttatgcttctttcagttccatttgaaataatttttaaaacgttggaggaaaggtaatcagtaggaaaaagtcacaaaaattggactagaattcctgagtacccatagaggtatgcagaaacatggtacaatttaaaattaactacaaatatgggtacagtattaactaaaatacaaatgaagaaaaaacttgagctttcaaatttctgttttgtttagagcaaccaccaaaattttcttttgctattctatccagggttaaacaaaatagactagacgct

SEQ ID NO: 360818 - DNA, 392 bp, Homo Sapiens
tgaggtgctgccccggacacgtcctgctcaaaggcggctctggtgcccgggctgaggaagatgcaggagccgtcggggagcccacccgcagtacgggtcctgactgccgatacagttcttcatacaccccgagtactgctggcagcgagccacaggcactcggaccacgcagcgggggaaggcagccagcaggccccccgaagctgcgtccagctccaagctcagcagccgctgccctgtctcgccaccgccgggccgtccacacctgtccggccggtaggtctcaaactcctccaggaagacactgagcccagacgtccctgaggtgctggcattgggccggacgaggaacttgcggaccgtccccgcctcagaaccaggaagaacagggg

SEQ ID NO: 360819 - DNA, 486 bp, Homo Sapiens
  misc_feature (426)..(426): n is a, c, g, or t
  misc_feature (449)..(449): n is a, c, g, or t
  misc_feature (476)..(476): n is a, c, g, or t
ctgcaaagatcatagaaaattctgtcaaacaactcaacgtccaaaaacatgattccggtgatttgtcacttaggtcacctagtttaaaaggagagtttgacacgacttcccctttgggacacccacaccagccctttccccatcccatgtagaagcttgcctttgcccagtgtgaggtgcacgggtcacatttaaggatttcagctcctccctcctttaagaacaccagactaacattcttagcaatgcacattaggatagaggcatctgagcatataaatatttttttctagctagctcccttcttagtttttgtttttggttttagagacagggtctcgctctgtcaccgaggctagagtgcagcggcatgatcatgggctcactgttaactttggaactccccggttttcaaggcgattcctncttcccttcagccctcccggatnctcttggggttttcttaacatgagttnactcttgtat

SEQ ID NO: 360820 - DNA, 1019 bp, Homo Sapiens
caacgagaacacgcggcgctcccagctgctcatgctgtttgacaagttccgcagcgtgctggtggtgaccacccacgaggaccctgtcattgccgtcttccaggctctgctcccctgagcccaggcggagggcggaaggctgctggggtgcgcaggtgggcgctcgcgtctccccaccccagggctccccccgtgctgaggctgagccctcttggccctgaggcctggcattgggtggatgcgggctggccgtggcccagtgaagcctgcagagccccgctgtccttgcccctggtggttccgctgtggggctgctgccctctgtgttcctaacgcttccctccagtccttgccgcacgcgtaggcatctccacgctggaggggggcctgccaggactcctgtctctgggtgaggccgcatccttcaaggcccatgtgggctgtgcgtttctcagaccctccttctgtccctacacctgctccttggacccaccagtctgtggccaccctgaaagaatgtgcagaaacacttgtgtggcctgcccctgtctctctgacagccttccatttgtgaagggccctgtggctccctccacagcacctctgtctgccatgcgcttcttcctcccaggctaccctgagcctttcctggcccagtcctcaccacagtccacagaagccacaaacaggctcatagccaagcttgtgacctggtcctgaccatctggggcacgagggcctgggctggccctgctaggctggagaagccctgtcacctgtgcacatcttgctggtggaggcatggcccactgtgcaggaccccaccctcgggggctttcggctcccacactgatgattctccccagcatccacaccgggcctggcgctacgtactcaggcccccagctctcgtgtcctggaggaagagctagctccagacatgggttgatcacctagaggagctctggctaaggcacagttttctagaaataaaacatttattcggtttttaaacaatt

SEQ ID NO: 360821 - DNA, 495 bp, Homo Sapiens
caacgagaacacgcggcgctcccagctgctcatgctgtttgacaagttccgcagcgtgctggtggtgaccacccacgaggaccctgtcattgccgtcttccaggctctgctcccctgagcccaggcggagggcggaaggctgctggggtgcgcaggtttggaaaggccccttggattcctggctggggacaatgatgacctggaccctggccagaagagccctggccctccagcaaggcagcacctgctctgatgcacctgtgcacccctggccctcccagccacctgggagcccgaagcttagcctgtaggtggccaagccagtccctactcttgggctgcggccacgtgaggctccgcatcagcagccaggggcaagcactagtggacaaagccagcaaatgcggcgttcctgtgagcagataccctcaaccagccagctgtcaaaagtatttcaagataaaatccaggccaagcaaagcctttaagttcccg

SEQ ID NO: 360822 - DNA, 502 bp, Homo Sapiens
ccaatccaaatatgtaccatgacacaaattaccccttaaacataattgccttatgttaaattaaatgatgtcagtattattcccagtgtttagctctgggtataggaaatgctgtagcctaaagtcacccataaaaataaaatccaaggcattccacatttgaggttgtttgttacacatcacactatccctaaaggcttgaaaagactgcaaattaagtttcccatgccaattatatacgttgaattttaaagctacagctatagagacagtacgaaaatcctattagcttaaatgtttcttttatgatttaccaagctgttgcattctcgtcataagaggcagaccttgttaggttaaaaacctatttctatatatttaatacctttttctctccaatattcttttcctaaaatgttcaaatgactttcagggtcttcctttccttttgatcttaaagtcaactgtcataatatttcccaaggacatatataattttatt

SEQ ID NO: 360823 - DNA, 835 bp, Homo Sapiens
gagggacttctggttctggaagttggagcttacggaggcgacagtgcaggcagctggctgctgtcgggctcctggaggtttgcagggttgagcccagagtgagagccacaggtgcgggcgggagcagagaggagtggggttactacccaggatgggccctgagattgccaagggtgaagggcatcgtggagcgcaggcctggggggcaaggactcaccaaccaaaggcaaggtttggctctgaaacctcgaccagttggttcctcccccactgcccacacccaaggaccaggactagtctgtaccgaggaatggccaccccgcgcatttcaacagagcacgtagcaggcatctgtgccaagtcagccactgcctcctctgctgcttccctcaacaggcacaataacatcacaggcaaacaggaagcttggaagtgactgggagcagggcagaaggcccagaggagggcgtgcatggggcgagcgtctttctccaaatcatgaaggtgtacctgtgggctgggggctctgtgcgcagaggagcgggactagagtccggaggagggggttagagctgtgcccagtgacatatacccaggctggtggcattggttctgtccctctgggcacggcatcaatgtggaggcagccctttggtgagattctatttgtgcatttacccccatcatttagaaatagtctccagtgactcctggcccctgtggcttctctgcctgagcctgacgggcccggtgactgccgggcctctgccctgccggctgcactgttcattgctaggctgcccagggaggaaaccttgggtgggtaggctgtttg

SEQ ID NO: 360824 - DNA, 326 bp, Homo Sapiens
  misc_feature (85)..(85): n is a, c, g, or t
  misc_feature (246)..(246): n is a, c, g, or t
  misc_feature (295)..(295): n is a, c, g, or t
atggatccatgcgagccaggtgcacccggatcctggcatccatcctggcaaacacctggagggctgccttggacacaggccaggngcagacccttgggccgcccttccaaggcctgagcagccaggttaagggaggacggttcttcaggctgcgacactggctgtcccatgtcctgtaggtgctcagggccctcgccaggcctggaggtggctcaggggtggggaagagctgtccccagccaggtnagcagggccatgaccgcgctcctgctgctctgggaggctgggccctgtnaagcctgtaagtcttcttggtagggccaggt

SEQ ID NO: 360825 - DNA, 344 bp, Homo Sapiens
  misc_feature (57)..(57): n is a, c, g, or t
actacagcacagtagacgacaaccccgacttcgacaacctcgacatcgtggcacggnatgaggaggagaggtactttaatgaggaagaacctgaggatgcgcccagcccagagctggatggggactgatggccgccacccttcccaccgcctgccccatccccatccccaacaaggcagctgattccaggcctgctcagtgaccctttctctagggggacatcagggcagtgccccacaacccacacacaccaccatctcactgggtctagtctcatctcagacaacccacccccacctgtttctggggttccctttctatctctcccacctgtcggctatcga

SEQ ID NO: 360826 - DNA, 447 bp, Homo Sapiens
  misc_feature (33)..(33): n is a, c, g, or t
  misc_feature (68)..(68): n is a, c, g, or t
acaaaccaaacctctaagtatgaaccttggttncccagggcttttactgatggcatgttcaccaaccnactggcacttcctaagttctaatcaatttctcctttgtactgcaaaatgcaaaacaaaacaaaaaccctacttattatcttctcaaattagcttttcaggctcctgccctatgcagcatgagacatctggaaatttcttgagaaattatatgtgtttgaagctcctaatgtatccatttttttcattgcagtcttgattgttcttctggtttctggtcccccccatgccttcccctgacccccaggttatggtcctctgcctgaatcaagttcagtattcaggttcttccctatagccagaagtggaaagggcccccagagctgcattttatgcttgtgctttctgagatttaccactctctagaattttgccctttag

SEQ ID NO: 360827 - DNA, 531 bp, Homo Sapiens
  misc_feature (123)..(123): n is a, c, g, or t
tcttgcagggaatcaaatgtcacctccccttgtgggttgtcatccaagtccaccatagtgaaggaccttgtggttcagtgccaaccggcagtaccagaaccgttcctttcttcggcggttccnaatctttcggaagctgctgccctcacagagccggttcaggcgctgctgcttgatcagctcaaggatctcgggctggatcttctccctcagctccacaattggcggggactggaagtcatcctgactcatcctctcagactggcgcagtcgtagaatctcagagtaactcagctacgcaatttgctcttgaactgatccaaagagttgggtttggagggcaaagctcgagtgatttgctctcggacgacttgcataaccttgttgaagtcctctgctgttgccctcatctccttccaggtcttgttcaacagctggatgcagattccaaagagcccttcaaaggctcggtcatgggtaaagacatcgggtggtagtcattgcgtccttcatttggtagttcccaaccta

SEQ ID NO: 360828 - DNA, 1024 bp, Homo Sapiens
  misc_feature (30)..(30): n is a, c, g, or t
ctggaagaactccggccgcccaggctccgnctccgcgacgggccgtcgggaggaggcgaccggaagccacttaaagcagagatcgaggtgacaggcgagctggctggactcggagcgcggtcgaggctttctgcgttcgcggcggcggaatggcccgtgcgcggctcgccgcgtcgcggctgctgtggtccctagacgtcggctcccgccctcggcgctgatctccggcgcgggcactgctttccactcggctcctgtcgtccgttctctcaggctcccgttcaggatttttagactctgaggagcagttggagctaatccacattatggaaatggaaaccaccgaacctgagccagactgtgtagtgcagcctccctctcctcctgatgacttttcatgccaaatgagactctctgagaagatcactccattgaagacttgttttaagaaaacaggatcagaaaagattgggaactggaaccctgaggtctttgaggccaatattaaacactcttctagaatctggctcacttgatggggtttatagatctaggaaccagagtacagatgagaacagcttacatgaacctatgatgaagaaagccatggaaatcaattcatcatgcccaccagcagaaaataatatgtctgttctgattcctgataggacaaatgtaggggaccagataccggaagcccatccttccactgaagctccagaacgagtggtcccaatccaagatcacagctatccatcagaaaccctcagtgggacggtggcagattccacaccagctcacttccagactgatcttttgcacccagtttcaagtgatgttcctactagtcctgactgcttagacaaagtcatagattatgttccaggcattttccaagaaaacagttttacaatccaatacattctggacaccagtgataagctgagtactgagctctttcaggacaaaagtgaagaggcttcccttgacctcgtgtttgagctggtgaaccagttgcagtacc

SEQ ID NO: 360829 - DNA, 776 bp, Homo Sapiens
tgaggcccggtggctaatcggcacgagggtgtggtctctcccttgttgcccggagaaagcaaggacagaagcccacacaggggtcttttgggtcatgaggcccagctgtgcaggcaggcaggccagggaaattgggcagcatggatggagaggctgaaggctgggaagagggaaggggagaggggcagcctgcaggggtagctgaagaacaggaaggaggtgagaagcccggtgacctgtcagagatgccaagcccagggtggcactgggttgggtggggacggatggtgtcttggcagcaaaggatgggtaatttgcaaatgaacatggatagaagagcagcaaagcaccaaaagaacaaggtctcttacccaggacacagtcccttccacactttaccagccccagggtctgagcccgacgctgcctcttccggtcctgtgcctgtgggtgcccacattcttagcaagaggctgcagagggatctttaggggaagattcgggcgtagtttattaaacagactccacttctatttggccatgtgtcaggctgagacctcttctctcgggcattaatggaacagctagtgccctgtccctgccgacaggaccactgaaggacgggtagccacacacatccctgagtagtcacagactcatttgtcattttggactcctgcttctcaaggtattgctccggcaaacagcacatggtggttggaaaaaaggacttccttctggaacaaaaggccaaataaaggcaactcacctatacc

SEQ ID NO: 360830 - DNA, 556 bp, Homo Sapiens
  misc_feature (365)..(365): n is a, c, g, or t
  misc_feature (418)..(418): n is a, c, g, or t
  misc_feature (450)..(450): n is a, c, g, or t
  misc_feature (490)..(490): n is a, c, g, or t
  misc_feature (510)..(510): n is a, c, g, or t
  misc_feature (518)..(518): n is a, c, g, or t
  misc_feature (542)..(542): n is a, c, g, or t
caaccggctggggtccttgcgcgccgcggctcagggaggagcaccgactgcgccgcaccctgagagatggttggtgccatgtggaaggtgattgtttcgctggtcctgttgatgcctggcccctgtgatgggctgtttcgctccctatacagaagtgtttccatgccacctaagggagactcaggacagccattatttctcaccccagctcagatacagccagaagatgccccagtagttctctggctacagggtgggccgggaggttcatccatgtttggactctttgtggaacatggggccttatgtttgtcacaagtaacatgaccttgcgtgacagagacttcccctgggaccacaacgcntctccatgctttacattggacaatccagtggggcacaggctttcagttttaantgatggattacccacggattatggcagttcantgagggacgatgttaggcacggggttttttacagtggcantatttcagttttttcccggnattttccnggattttaaaattattgatctttnttgttcatcggggg

SEQ ID NO: 360831 - DNA, 1676 bp, Homo Sapiens
cctgcgataaacttctgcctgatttgggtgcgctgcaggacaaccggctggggtccttgcgcgccgcggctcagggaggagcaccgactgcgccgcaccctgagagatggttggtgccatgtggaaggtgattgtttcgctggtcctgttgatgcctggcccctgtgatgggctgtttcgctccctatacagaagtgtttccatgccacctaagggagactcaggacagccattatttctcaccccttacattgaagctgggaagatccaaaaaggaagagaattgagtttggtcggccctttcccaggactgaacatgaagagttatgccggcttcctcaccgtgaataagacttacaacagcaacctcttcttctggttcttcccagctcagatacagccagaagatgccccagtagttctctggctacagggtgggccgggaggttcatccatgtttggactctttgtggaacatgggccttatgttgtcacaagtaacatgaccttgcgtgacagagacttcccctggaccacaacgctctccatgctttacattgacaatccagtgggcacaggcttcagttttactgatgatacccacggatatgcagtcaatgaggacgatgtagcacgggatttatacagtgcactaattcagtttttccagatatttcctgaatataaaaataatgacttttatgtcactggggagtcttatgcagggaaatatgtgccagccattgcacacctcatccattccctcaaccctgtgagagaggtgaagatcaacctgaacggaattgctattggagatggatattctgatcccgaatcaattatagggggctatgcagaattcctgtaccaaattggcttgttggatgagaagcaaaaaaagtacttccagaagcagtgccatgaatgcatagaacacatcaggaagcagaactggtttgaggcctttgaaatactggataaactactagatggcgacttaacaagtgatccttcttacttccagaatgttacaggatgtagtaataactataactttttgcggtgcacggaacctgaggatcagctttactatgtgaaatttttgtcactcccagaggtgagacaagccatccacgtggggaatcagacttttaatgatggaactatagttgaaaagtacttgcgagaagatacagtacagtcagttaagccatggttaactgaaatcatgaataattataaggttctgatctacaatggccaactggacatcatcgtggcagctgccctgacagagcactccttgatgggcatggactggaaaggatcccaggaatacaagaaggcagaaaaaaaagtttggaagatctttaaatctgacagtgaagtggctggttacatccggcaagcgggtgacttccatcaggtaattattcgaggtggaggacatattttaccctatgaccagcctctgagagcttttgacatgattaatcgattcatttatggaaaaggatgggatccttatgttggataaactaccttcccaaaagagaacatcagaggttttcattgctgaaaagaaaatcgtaaaaacagaaaatgtcataggaataaaaaaattatcttttcatatctgcaagatttttttcatcaataaaaattatccttgaaac

SEQ ID NO: 360832 - DNA, 816 bp, Homo Sapiens
ggggactgggtggggctgcctcacttctgcctgatttgggaagcgctgcaaggacaaccggctggggtccttgcgcgccgcggctcagggaggagcaccgactgcgccgcaccctgagagatggttggtgccatgtggaaggtgattgtttcgctggtcctgttgatgcctggcccctgtgatgggctgtttcgctccctatacagaagtgtttccatgccacctaagggagactcaggacagccattatttctcaccccttacattgaagctgggaagatccaaaaaggaagagaattgagtttggtcggccctttcccaggactgaacatgaagagttatgccggcttcctcaccgtgaataagacttacaacagcaacctcttcttctggttcttcccagctcagatacagccagaagatgccccagtagttctctggctacagggtgggccgggaggttcatccatgtttggactctttgtgggaacatgggccttatgttgtcacaagtaacatgaccttgcgtgacagagacttcccctggaccaaaacgctctccatgctttacattgacaatccagtgggcacaggcttcagttttactgatgaatacccaccggatatgcagtcaatgaaggacgaagtaccaccgggatttattcaggggcactaattccagtttttcccgaaaatttcctggaatcctaaaattatggacttttattgtcactggggggagtccttatgccccggaaaatatgtggcccagcccttttgaacacccttcatccatttcccccttaaacccttgtg

SEQ ID NO: 360833 - DNA, 476 bp, Homo Sapiens
  misc_feature (17)..(17): n is a, c, g, or t
  misc_feature (34)..(34): n is a, c, g, or t
  misc_feature (40)..(40): n is a, c, g, or t
  misc_feature (153)..(153): n is a, c, g, or t
aataaactgaaacctgnaataattataaggttcngaattnacaaaggccccaactggacatccatccgtggcaagctgcccctgacagagcgctccctgatgggccatggactggaaaggatcccccggaatacaagaaggcagaaaaaaaangtttggaagatctttaaatctgacagtgaagtggctggttacatccggcaagcgggtgacttccatcaggtaattattcgaggtggaggacatattttaccctatgaccagcctctgagagcttttgacatgattaatcgattcatttatggaaaaggatgggatccttatgttggataaactaccttcccaaaagagaacatcagaggttttcattgctgaaaagaaaatcgtaaaaacagaaaatgtcataggaataaaaaaattatcttttcatatctgcaagatttttttcatcaataaaaattatccttgaaaaaaaa

SEQ ID NO: 360834 - DNA, 2041 bp, Homo Sapiens
ccttatgagttcaccccaggggctggtggttttgtcattggcaggttcctcaccggcatcaaccctcctgagttcttctcccactgcatggcagaacgagagggcctggtggacactgctgtgaaaaccagccgttcaggctatctccaaaggtgcatcatcaagcacctagaggggctggtcgtgcagtatgatctcacggtccgtgacagtgacggcagtgtggtgcagttcctgtatggggaggatggcctggacatccccaagacacagttcctgcagcccaagcagttccccttcctggccagcaactacgaggtgataatgaaatcacagcatctccatgaagttttatccagagcagatcccaaaaaagctctccaccacttcagagctatcaaaaaatggcaaagcaagcaccccaacaccctgctgagaagaggcgccttcttgagttattcccagaaaattcaggaagctgtgaaagccctgaaacttgagagtgaaaaccgcaatggccgcagccctgggactcaggagatgctgaggatgtggtatgagttggatgaggaaagccgaaggaaataccagaagaaggcggccgcttgtcctgaccccagtctgtctgtctggcgtcctgacatctactttgcatcagtgtcagaaacatttgaaacaaaggttgatgactacagtcaagagtgggcagctcaaacagagaagagttatgagaaatcagagctttctctcgacaggttgaggaccttgctgcagctgaagtggcagcgctcactgtgtgagccgggcgaggctgtgggcctgctggctgcccagagcatcggagagccctccacccagatgaccctcaacaccttccactttgcaggcagaggcgagatgaacgtcaccctgggcattccaaggttgcgggagattctcatggtggccagcgccaacatcaagacacccatgatgagcgtgcccgtgctcaacaccaagaaagccctgaagagagtgaaaagcctgaagaagcaactcaccagggtgtgcttgggggaggtgttgcagaaaattgacgtccaggagtccttctgtatggaagaaaaacagaacaaattccaggtgtaccagctgcggtttcagttcctgccacatgcatattaccagcaggagaagtgcctgagacccgaggacatcctgcgcttcatggaaacaagattctttaaacttctgatggaatccatcaaaaagaaagaataataaagcatcagctttcaggaacgtaaacactcgaagagctacacagcgggatctggacaacgctggggaagttggggaggagtccgggagaagcaggagggtgatgaaggaagaagaggggcacatttgtggatgctgaagctgaggagggagacgccgatgcctctgatgccaaacgcaaggagaagcaggaggaggaggttgattatgagagtgaggaaaaggaggagagggagggcgaggagaacgacgatgaagacatgcaggaggaacgaaatccccacagggaaagtgctcgaaagacccaagagcaagatgaagaggtgggcttaggcactgaggaggaccccgtcccttccccccctcctgacgcagcccccggaaacccacccacagccaggaagccccaggggtcccgaggccatgtgagcgccgggtccaggcctggtgcgtgagaaccacccgtttcatagatgactaccagtacgacacccagggaaagcctgtggtgcccaggtgacagtgaagcttccctctgatgaaggatcaactttgacatgagctccctggtagtatctttggcccatggtgccgtcatctatgcgaccaagggcatcactcggtgcctcctggaatgaaacaaccaacaattaagaacgagaaggagcttgtgctaaacacagaaggaatcaacctcccagagctattcaagtatgcagaggtcctggatctgcgccgcctctactccaacgacatccacgccatagccaacacgtatggc

SEQ ID NO: 360835 - DNA, 814 bp, Homo Sapiens
  misc_feature (739)..(739): n is a, c, g, or t
tgacgagctcttctcccatcacagccccatgaagaagggggagtcccagatcacaccccctttctctccatttgttggagcaggaaattggcaagaagtagaaaccagtgagcgagcgcactcagggccaagcaatgtgcggctctcccagctgacgccactcgggactgcccaagaccactgagcaataaccacgcctggtctggggtgtccagctcctgggatgcagatggctgaggttggggcacccttgggacagtgctctccagtccaacttgggccaagaaggtggcctggggtcttgctctgcctgcccccacctctactctctactagtcctgtggttgcgcctgtaccatctctgtcccccctcaagtgtgtgtactcactgcacccctattctgtccccctccctttcagaacctgtcttgtgtgtgagggcctcactcctctctcggaggtgcccagaggactgtgggaagaagggcaaagtctctttccagaggagcgtgcacagaccctcatctcccacgaccacacttttggggtgaacagggtgactttgttaggtcgattcttctgcagagatggtgaagtactctatctgcccacccacccactaaaagccatagctccgtccgcctgggcctccccccagctctatagcaatagcccccttcccccttccctcctggggcatccaggggtgtccagctaggggcccccaccgcactctggntcccaggggatctttccagtgggccttgcctgctttttcccgaagttgaccccatcagcttccacccaattccca

SEQ ID NO: 360836 - DNA, 523 bp, Homo Sapiens
  misc_feature (225)..(225): n is a, c, g, or t
  misc_feature (251)..(251): n is a, c, g, or t
  misc_feature (421)..(421): n is a, c, g, or t
tgctacttagacgatcccttagggccttaacctcacgggctctgaaatgtgtgaccagactgaaaaggaggtccgttcagctccgcctgccctagtccctgcttggttcttgaagtttttacaatatattccttgtaggttcttcactcactcactcaacaaatacccgttggaagagtcttaaactggggcttcatgtgtggcctgcagtcatgtttcggcttngtccaacagtgtttttattatatttnaagaatctgaatgcctttgcgtgaggcatgcactctcaggttccccatagtgtctcccccgctgccacccacaaacagacacacatgccgttgtgttatgcccagccactctgatatactggcttctgacttatgggctgcttactagtctcaagagatacagtggtggnaaaatatatccctatactcatgaagcttaccgactagtaggggaagatagactcttaatgcaataatcacattaaattttagcgggctctactaagtacagg

SEQ ID NO: 360837 - DNA, 756 bp, Homo Sapiens
ggccctcagcactcattgccacagggggtcatgcacagcaccaagccacatcagagcctcgaaggtcctccgtggcttttccctggccctttgccatccgttgcctctgaggacttatttccttttcctatacatggccacagtggtggttatcctagaaaaaagatttcaagtctgaaccctgcttatagccaatactcccagaaaagtattgaacaggcagaagaggctcacaagaaagagcacaaacccaaaaagcctggcaagtacatttgcccttactgcagcagagcgtgtgccaaacctagtgtactgaaaaaacacatcaggtcccatactggggagcggccatatccatgtataccttgtggtttctctttcaagacaaagagcaatttgtacaagcacaggaagtcacatgcccatgcaattaaggcaggattagtacctttcacagagtcagctgtatctaaattggacctagaggctggttttattgatgtagaagcagaaatacattcagatggggaacagagtacagacacagatgaggagagttcttttatttgccgaggcttctgacaaaatgagtcctggtcccacccatcccacctggacatggcccagcagagggcggctatcaatggggtcattgggaaggaatcattgggggaggtcccaatgtgaaaggtggcccgaatttttgaattattccccctaaaaaggtggggatttcccttcctcccccaaaatgga

SEQ ID NO: 360838 - DNA, 1206 bp, Homo Sapiens
gggacgagcagaatgaggagaagaggaggcaactggcagagacagcttcacgagtatgagacggaactggaagacgagcgaaagcaacgtgccctggcagctgcagcaaagaagaagctggaaggggacctgaaagacctggagcttcaggccgactctgccatcaaggggagggaggaagccatcaagcagctacgcaaactgcaggctcagatgaaggactttcaaagagagctggaagatgcccgtgcctccagagatgagatctttgccacagccaaagagaatgagaagaaagccaagagcttggaagcagacctcatgcagctacaagaggacctcgccgccgctgagagggctcgcaaacaagcggacctcgagaaggaggaactggcagaggagctggccagtagcctgtcgggaaggaacgcactccaggacgagaagcgccgcctggaggcccggatcgcccagctggaggaggagctggaggaggagcagggcaacatggaggccatgagcgaccgggtccgcaaagccacacagcaggccgagcagctcagcaacgagctggccacagagcgcagcacggcccagcaagaatgagagtgcccggcagcagctcgagcggcagaacaaggagctccggagcaacctccacaagatggaggggcccgttcaaagtccaagttcaaatccaccatcgcggcgcttggaggccaagattgcacagcctagaaggagcaggtcgagcaggaggccagagagaaacaggcggccaccaagtcgctgaagcagaaagacaagaagctgaaggaaatcttgctgcaggtggaggacgagcgcaagatggccgagcagtacaaggagcaggcagagaaaggcaatgccagggtcaagcagctcaagaggcagctggaggaggcagaggaggagtcccagcgcatcaacgccaaccgcaggaagctgcagcgggagctggatgaggccacggagagcaacgaggccatgggccgcgaggtgaacgcactcaagagcaagctcaggcgaggaaacgagacctctttcgttccttctagaaggtctggaggacgtagagttattgaaaatgcagatggttctgaggaggaaacggacactcgagacgcagacttcaatggaaccaaggccagtgaataagcaactttctacagttttgcaccacgt

SEQ ID NO: 360839 - DNA, 983 bp, Homo Sapiens
  misc_feature (85)..(85): n is a, c, g, or t
  misc_feature (916)..(927): n is a, c, g, or t
agggtggcgagggccctgcagccctaggggcgcactttggggaatctgcctcagcccatctgtctgacctggctcctctcctgcnacatcctgaggaggaagtagctgaagctgctgcctctctcctggccatttgtccctttccttctgaagccttatccccctcccagctcctgggactggtaagggctggggtgcaccgcttctttgcctctctaaggctgcatggacccccaggtgtggcctcagcctgtcagcttctcacccgcctgtctcagacatccccagctgggctcaaggctgtcctgcagctgctggttgaaggagccttacatcgaggcaacacagaactgtttggtgggcaagtagatggggacaatgagactctctcagttgtttcagcttctttggcttctgcctccctgttggacactaaccggaggcacactgcagctgtgccaggtcctggagggatttggtcagttttccatgctggagtcatcggccgtggcttaaagccacccaagtttgtccagtcacgaaatcagcaggaagtgatctataacacccagagcctcctcagcctcctggttcactgctgcagtgccccagggggcactgaatgtggggaatgctggggggcacccatcttgagtccagaggcagccaaagcagtggcagtgaccttggtggagagtgtgtgtcccgatgcaactgggtgcaaagctggcctggcccccccgaggaaaacgcccgggccacccttggaagcggggatctcccgcattggccgggggctttccgcgaaaaagcccctgcttctttgaaactggttaaaacctggttaaccaactggcaccccccaagcccgtgggctaactggttccctggcctgcttccggggggctgtctgggnnnnnnnnnnnnttgggggccattgggggaaaaccttttggtgccaacccttggaaaacgaaccccat

SEQ ID NO: 360840 - DNA, 456 bp, Homo Sapiens
  misc_feature (21)..(21): n is a, c, g, or t
aacctgaacttgcaatccccnagaaatttaaagggtcctggttgtttgggaaattcccagacatagaaaattgtccctgacccaagcgcattccgcaatccgaggaaggtaattccataaaagggtaccccatgccctggggctgcctgacgcggcccccaccagctccctgccatgggctgcggccaaacgccctgctgcaggagggagctgggagccgctctgctgaccattagcacaccagagcactcggctgcttcattcaaagtgttttttaagggactaaaatgagactttaaaaattttaaatcataccctttccaggcaacacatgtaatttctcgttggcaattttgaataagccaattcaaaaattttctgcatagagaaacaatctaatgaccatctcttcaaacaagctgtcccaaaatgtagtggactttagtggctagcaat

SEQ ID NO: 360841 - DNA, 505 bp, Homo Sapiens
  misc_feature (321)..(350): n is a, c, g, or t
  misc_feature (365)..(365): n is a, c, g, or t
  misc_feature (376)..(376): n is a, c, g, or t
  misc_feature (404)..(404): n is a, c, g, or t
  misc_feature (453)..(453): n is a, c, g, or t
  misc_feature (461)..(461): n is a, c, g, or t
  misc_feature (466)..(466): n is a, c, g, or t
  misc_feature (482)..(482): n is a, c, g, or t
tggcacgaggaaaatataacatacaaaggagaaaaacacactttttacattcatggtaaaatcaactatacattaaaatgaatcactgtggaaaacatcagtaattcaacaaccttgctgctgacctcttattcagttaaatgagagcaagtgttgaaacagctggtggtggttcacatcaaaatcaagaggaaggtgctgttgtatgcagattactcttctcaaatgtcatagatttcttctgtacttgcttaattagtagttgaaatgatagtaattgtactttttgttatttccatttcaaatcataaataggaatgnnnnnnnnnnnnnnnnnnnnnnnnnnnnnngaggcggggcccatntctgtcgcccngggctgggagtgcagtgggccgcgatcntcgggcttcactggcagggctcccgcctcccgggggggttccaggcccnttctgccnagccntcagccctcccggggnagccggggactacagggcgcccc

SEQ ID NO: 360842 - DNA, 516 bp, Homo Sapiens
  misc_feature (471)..(471): n is a, c, g, or t
tacttttcacagggacagcatgaccacagagaacggcaagatcagcaccacggatgtacccatgggtcagcataattttcaaaatcgcaccttaagaaccaagtcacaaaagaagagatttgaagaagaattgaatgaaaggatgattcaagcaattgatgggattaatgcacagaagcaatggctcaagtctgaagacattcagagaatctcactgcttttctataacaaagtactagaaaaagagtaccgggccacggcactgccagcgttcaagtattatgtgacttgtgcctgtctcatattcttctgcatcttcattgtgcagattctcgtgctgccaaaaacgtccgtcctgggcatctcctttggggctgcgtttctcttgctggccttcatcctcttcgtctgctttgctggacagctctgcaatgcagcaaaaaagcctctcccctgctcatgtggcttttnaagtcctcgggcatcattgccaaccggccctgggcacggatctct

SEQ ID NO: 360843 - DNA, 850 bp, Homo Sapiens
agcggtcgagtcggcggcgctaccgaggggctgtgggcgcgcagctggaacctccggctgtcagtgcgcttacagttcctaaccccgaccctgcgcgcagcccgcactatggcagccccgccgcagctaagggctctgctcgtagtcgtcaacgcactgctgcgcaagcgccgctaccacgctgcgttggccgtgcttaagggcttccggaacggggctgtctatggagccaaaatccgggcccctcacgcgctggtcatgacctttctcttccggaatggcagcctccaggagaagctgtgggccatactgcaggccacatatatccactcctggaacctggcacggtttgtgttcacctacaagggtctccgtgccctgcagtcctacatacaaggcaagacctacccagcacacgcattcctggcggccttcctcgggggtatcctggtgtttggagaaaacaataacatcaacagccagatcaacatgtacctgttgtcacgcgtcctgtttgccctgagccgcctggctgtagagaagggctacatccctgaacccaggtgggacccgttcccgctgctcactgcggtggtgtgggggctggtgctgtggctctttgagtatcaccgatccaccctgcagccctcgctgcagtcctccatgacctacctctatgaggacagcaatgtatggcacgacatctcagacttcctcatctataacaagagccgtccctccaattaatgcagccctgaagtgtctgggctgtggctccaagatttggcccccatgcagacccttcccaaaggatactgccccttctccaagatcataaggccctcaaaaa

SEQ ID NO: 360844 - DNA, 462 bp, Homo Sapiens
  misc_feature (98)..(98): n is a, c, g, or t
  misc_feature (445)..(445): n is a, c, g, or t
cttacagttcctaaccccgaccctgcgcgcaccgcactatggcagccccgccgcagctaagggctctgctcgtagtcgtcaacgcactgctgcgcaangccgctaccacgctgcgttggccgtgcttaagggcttccggaacgggctgtctatggagccaaaatccgggcccctcacgcgctggtcatgacctttctcttccggaatggcagcctccaggagaagctgtgggccatactgcaggccacatatatccactcctgggaacctgggcacggtttgtgttcacctacaagggtcttccgttgccctgcagttcctaacattacaagggcaagaccttacccagcacacgcatttcctgggcggctttccttcgggggtattctgggtgttttggagaaaacaataaacattcaacaggccagattcaaacattgttacntgtttgttcacgggttc

SEQ ID NO: 360845 - DNA, 428 bp, Homo Sapiens
  misc_feature (68)..(68): n is a, c, g, or t
caccagagggaaaccccccaaaaaaggatttaaaggataccccaatcctccctagaaagaagtgggantggtttccccagggggacattttatgtgactcctatgttgaaatgcagatccagaaaagggaaaaccttttaaaaggcactgaaggagaggcaagacagaaattcagtagtttgtcaagactggacaagctactccaacccaggtacattttacaagatacatattccctggaccatgaagatgccttttcataaaatggaatttaaaaaagataaagagtttcccaaaataagcatggtgattggcataatggttagctgtgttgtatgactttcaaaaagtcactgaacctctccagttctcagattcctcatcactaaaatgaggaggtagggctatattgctaaagttctttccca

SEQ ID NO: 360846 - DNA, 835 bp, Homo Sapiens
  misc_feature (328)..(401): n is a, c, g, or t
  misc_feature (748)..(748): n is a, c, g, or t
ggtccggaattcctgggatggctcattgaacacaatgtgtcctggggggaggcacagctggggcctggggctagaaggaccaggtgaccatacagccggctgggcatgcaccagggctctcaggcacagaggccaccgttactcctgatgattctgtctcagacccaacaacctggccttcccaggaggtctccatgtgtcaccccctccctgggtctcacccttctcacctgctcaaggaagggatgacctcagtgaggcccagggccctgcagcaaggccctccctggcaattgcagaccaaggattctgctcctccaccttgaannnnnnnnnnnnnnnnnnnnnnnnnnnnnnnnnnnnnnnnnnnnnnnnnnnnnnnnnnnnnnnnnnnnnnnnnntccgggttcaagggccaagcgtctgcctaggctgagacacgtgctgagctccctgaagatggaccagctgccccctagaagggagactttcaggggcatcagggcccttgggatgctccgccctgaccagctttttggtggcagagggaggcacggggagagggagaggccatgtcgcagtccccctgccgtgggagaggcaacgcggaaatgtatagacccagtgctcagccagaaacagggccagcaagcggcagtgaacggaggcagcccggggctcgtcagggtgggcagagccatggcccaggggttgaaaacccccggagttccccatgagacttggctgngccctttcccacccctggggccttcagtctccccatcttgtgtgatgaggagagaccctgaggacagaggtcttcaggctgtgagtc

SEQ ID NO: 360847 - DNA, 1461 bp, Homo Sapiens
ccatgcaaaactggggcccgggggattcacctttgggtaatattccccttggagaggtgcaagatatttaaatcttttcccaaccaaaaaaagttctgaaaaactaaggggggtaatatttattttaaaaaagccagggagattttttaaaagttaaaagtgagaaaaggcccggaactaaaaattttccaaattaaatgagagggtggagaggtgaaagggtaaatcagcccatattgaaaaacaaactgtctgtgaacagaaattgacacttaaaaaggagaatctgataccagcagcagccacctgtgcagtgggtttggcgggcaggagcttctctgctttcctgcctgccaccagtggaatcagctttgagggagcagcagagagcttcgtccttcattaaagtgtccttcacagacattttcctccctgcaggcatcgggagacagcaggcgctgcttgcatgctgacttctgagtaggagggggtctggaaggtcatccagttccaccctacctgatgcccaccccctctgtgttcctgccaataagcagtcctccccatgcctcagcacccctggcccaagtttgttacatgtttctaaaggaaccagaagaatctctagggcttttaagacaaaagaattttctaagaggttcacaaatcattaggatcagcatcattaatatgtgccatatgtatttcttttacaacctttcaaagaacatgtaaacatcgtaaacagaatcaataaaacatataaactcctaagaaacaaactctgctatgtgcagataagactcatcatcatcttataaaagatgaccagacaaaattttctatgaaattcctaagttttatggcccataaatccctttcaaaatctcatttgaggagaataaatttcaactgtttctcaatagtcatcttacataagaatgagaataagaaagtaacaattattgcaaacctaaaaataagacactttcatcagacattcaaacatgattgtactgtcttttcaaagataaattggaaatcctgcaaaaaaaattttttttctgaaaatatttaggtttctactatctctatggtcataaattccccatgggagtgttgacatgccacatctgaggccctacattaacatctagagaagaaggggagatgtgtcctctgggcgtgagggagcctcggcagggagcttcagagaacaggagacaggctaaagggaccttactgctggctttgtgtctccagcagactccctgttctgtaactcataagggacagaaaaaagagtggccccaactatgtggggtaccttgcaggtgttaccttctaataaagtcttatctcccgttgatttatcaatctttctttcaacttcttcaggtggtagtgtagataggataattcactagaacccgttattctcactgcatgagatagtgctag

SEQ ID NO: 360848 - DNA, 2558 bp, Homo Sapiens
ggcctgggtggcgaattcggcacgaggcttcttccggaaaaaggtgatggggaaccggcggtcggacgagcctgccaagaccaagaaggggctgagcagcatcctggatgccgcccgctggaaccggggagagccccaggccgagaagccaggtgctacagaccggaagggaggcgtggggatgccctctcgggaccggaatatcggggctcctgggcaggacacccctggagtctctctgcaccctctgtccctggacagcccagaccgggaaccaggtgctgacgcccccctggagctgggggactcatccccgcagggcccaatgagcctggagtccttggcgcccccagagcagtaccgacgagggggccgaaaccgagagaacggtggaacgaggctatcagggccgtctggggcgctcagagagcctggcgggtgagtgaccgccgccggccttcccggggcagcctcggggctaagggccggcggtgcgcggccgctcccggacgcgacgctggacatggaccccagttccgccacggcagctgcttggccctacccgacgagccacccccgagcctggagatgagggggagccggggcggtcgggactggagcttgaaccagaagagcctcccggctggcgggaactcgtccccccagacaccctgcacagcctgcccaagagccaggtgaagcggcaggaggtcatcagcgagctgctggtgacagaggcggcccacgtgcgcatgctgcgggtgctgcacgacctcttcttccagcccatggcagaatgcctgttcttccccttggaggagctgcagaacatcttccccagcctggacgagctcatcgaggtgcattccctgttcctcgatcgcctgatgaagcggaggcaggagagtggctacctcatcgaggagatcggagacgtgctgctggcccggtttgatggtgctgagggctcctggttccagaaaatctcctcccgcttctgcagccgccagtcatttgccttagagcagctcaaagccaagcaacgcaaggaccctcggttctgtgccttcgtgcaggaagctgagagccgcccgcggtgccgccgcctgcagctgaaggacatgatccccacggagatgcagcggctgaccaagtaccccctgctcctgcagagcatcgggcagaacacagaagagcccacagaacgggagaaagtggagctggcagccgagtgctgccgggaaattctacaccacgtcaaccaagccgtgcgtgacatggaggacctgctgaggctcaaggactatcagcggcgcctggacttgtcccaccttcggcagagcagcgaccctatgctgagcgagttcaagaacctggacatcaccaagaaagaattggtccacgagggcccactgacgtggcgggtgactaaggacaaggcagtggaggtgcatgtgctgctgctggacgacctgctgctgctgctccagcgccaggacgagcggctgctgctcaagtcccatagccggacactgacgcccacgcccgatggcaagaccatgctgcggcccgtgctgcggctcacctccgccatgacccgcgaggtggccaccgatcacaaagccttctacgtcctttttacctgggaccaggaggcccagatatacgagctggtggcacagactgtgtcggagcggaaaaactggtgtgctctcatcactgagactgccggatccctgaaagtccctgcccctgcctctcgccctaagccccggcccagcccgagcagcacccgagaacccctcctcagcagctctgagaacggcaatggtggccgagagacgtctccagctgatgcccggaccgagagaatcctcagtgacctcctgcccttctgcagaccaggccccgagggccagctcgctgccacggcccttcggaaagtgctgtccctgaagcagcttctgtttccggcggaggaagacaatggggcggggcctcctcgagatggggatggggtcccagggggcggccccctgagcccagcacggacccaggaaatccaggagaacctgctcagcttggaggagaccatgaagcagctggaggagttggaggaggaattttgccgcctgagacccctcctgtctcagcttggggggaactctgtcccccagcctggctgcacttgaggttcccgcccaggaaggccttttgcaagaaggagaggaatgggggagaggacgtgagggaccaaccccaaccacacagctgccgcagcatctcacaccccgagggcctgaggagagggagctgtgggccacgcctgggaggggcccagctggggttactggccccgcatgagcctcggccatctctccctcctgccctctgcttgggggactcagggctccattctggagggcaccacggtgacccgggccatctcagtattgcctgtggggggccaccccttccacccccaaccccaagtgccttcgctctgtttttataccctgaattggaggtttattttttaatatatattatctaagaag

SEQ ID NO: 360849 - DNA, 349 bp, Homo Sapiens
taaagtcgaggcccgggtaccaggtgctgacgcccccctggagctgggggactcatccccgcagggcccaatgagcctggagtccttggcgcccccagagagtaccgacgagggggccgaaaccgagaggtgccaaggctggggtcaaggggcgggaggtgtggcttactgggcgctggtgggtgggtgcagggtcaccgctgccatctgtgcctgcctgtcccaggctcttgctccccatgctcctctgctgctctctgggtctggccattcctctcccttcttctttccttttctcatctccctcctgcttcctcattgcccccctttccttttatccttccttctc

SEQ ID NO: 360850 - DNA, 541 bp, Homo Sapiens
  misc_feature (446)..(446): n is a, c, g, or t
  misc_feature (503)..(503): n is a, c, g, or t
gatggaagctgggggaagatgggagctaggggcagtggctctgacttaacaccagcattggtttcccaatattgaataaagagggctgagctggacagcaggtgtccttaggggcttgacctcaccacccccagacggggcctgtctgcccaatttcaggggcttctcctcaatttcctggcttcagggcgaggctgctcagcccagggacaagaaggaaagatgggtatttgttaaaggcctactccacactgagcagcgctgtttacccatttaatcctcccagcctccttaggggagtgctatgaggacttctcttttatttctctcatcttgaagctcagatgagagaggtacccagttcacatgtgtgttcagtgggcagagttggggtttttgaacccattaggccgccttgccttccatggcaaggcctcttgaccttnccttttgtccagggttgcgttttgggagcccagggaacagatttccaagggttgggncccgcagggggaaaaaaacaaagcacgattcgtttttt

SEQ ID NO: 360851 - DNA, 432 bp, Homo Sapiens
  misc_feature (405)..(405): n is a, c, g, or t
  misc_feature (421)..(421): n is a, c, g, or t
aaggttagaggatttgccctctgaccttggcccagccacttcccccctgtggagcggggttctcaccctgctttttccctggctctgatggagcctttgggctgcagtcgtgcttgaaatgaatggccctgcccccgtatcccttcctccatgagctgctgcggcccacctagttgtgacacctggtggtggtcttgtaattgcccacggcttttccctctcctctggactctggcctcctccctccctctgtggccctagcacctgggcagatgcattggatgggcagcaggcactcagaacatgtttttataatgaattcctcaaccaagggaactaagggacttgctgtttccttactgtcaccggggattctttttggtgttttctactttcttgattggnttttcttcccggtaanttcagttttca

SEQ ID NO: 360852 - DNA, 1570 bp, Homo Sapiens
  misc_feature (25)..(25): n is a, c, g, or t
ttaccccatggtgcagcagtggcgngtccggagcaacctctaccgtgtgaagctcagcaccatcacccttcgcagcaggcttcactaatgttctcaagatcctgaccaaggagagcagtcgggaggagctgctgtccttcatccagcactatggctcccactacatcgcagagcccctctatggctcagagctcacctgcatcatccactttcccagcaagaaggtccagcagcagctgtggctccagtatcagaaagagaccacagagctgggcagcaagaaggagctcaagtccatgcccttcatcacctacctctcaggtttgctgacagcccagatgctgtcagatgaccagctcatttcaggtgtggagattcgctgtgaggagaaggggcgctgtccatctacctgtcacctttgccgccggccaggcaaggagcagctgagccccacaccagtgctgctggaaatcaaccgtgtggtgccactttataccctcatccaagacaatggcacaaaggaggccttcaagagtgcactgatgagttcctactggtgctcagggaaaggggatgtgatcgatgactggtgcaggtgtgacctcagcgcctttgatgccaatgggctccccaactgcagcccccttctgcagccggtgctgcggctgtccccaacagtggagccctccagtactgtggtctccttggagtgggtggatgttcagccagctattgggaccaaggtctccgactatattctgcagcataagaaagtggatgaatacacagacactgacctgtacacaggagaattcctgagttttgctgatgacttactctctggcctgggcacatcttgtgtagcagctggtcgaagccatggagaggtccctgaagtcagtatctactcagtcatcttcaagtgtctggagcccgacggtctctacaagttcactctgtatgctgtggatacacgagggaggcactcagagctaagcacggtgaccctgaggacggcctgtccactggtagatgacaacaaggcagaagaaatagctgacaagatctacaatctgtacaatgggtacacaagtggaaaggagcagcagatggcctacaacacactgatggaggtctcagcctcgatgctgttccgagtccagcaccactacaactctcactatgaaaagtttggcgacttcgtctggagaagtgaggatgagctggggcccaggaaggcccacctgattctacggcgactggagagggtgagtagccactgctccagcctcctgcggagtgcctacatccagagccgcgtggaaacagtgccctatcttttctgccgcagcgaggaggtccggcctgcaggcatggtgtggtatagcatcctcaaggacaccaaaatcacgtgtgaggagaagatggtgtcaatggcccgaaacacgagccagtgtcctgggctaaacacaagagtgctgattcccactgtaagttacagtgaagaacttctgctatctgagggcatgtgttttcatcttcaaaaaaggatggacagtccccatgaacc

SEQ ID NO: 360853 - DNA, 440 bp, Homo Sapiens
  misc_feature (412)..(412): n is a, c, g, or t
  misc_feature (424)..(424): n is a, c, g, or t
gcaggacccagtgctgaacacacacagggtaaatggtggtgtgtgaaagaccgagaaagaagctgttaattctgggcttccaatggtcagaaatgcagagatgaagggaatttgagctgagtcttgaagggtttagtaaaagggtcactgtcaaggtgaagaaaagccagttttgagggtgctgtatttgggtgagccatgcagagttagaggtgggctgaggcagagtggcctccaggagaaggtgagaggcgtgcccaggtgccaggcttgatcggcaggctgtgctcaggcccatttttctgattcattttttcttttccgcccaccctactgctgctgcttttgcaaacaacacataaatctccttaggttagctgggatcccctgaaggcagtgcccacttgcgggnattagagaattnaagccggtgggccttt

SEQ ID NO: 360854 - DNA, 407 bp, Homo Sapiens
  misc_feature (353)..(353): n is a, c, g, or t
  misc_feature (360)..(360): n is a, c, g, or t
gggagactaggaagtctctaagcttcatagagagcctggcttggggggacacaggagccaaagcagatggaagaagtggcagctttgtgcccccagaaacacgtgctcctgacctcacagttggccacagccagccaactctcccatccttctcccaccactttcccgtggggctaacttcaccctgtccacacggagtaacttaacagtttaagccccagagtcgggggccggggtacctgggacaagagtcctgagggaaatggggtgaggaactggaagtgccacagggctagagttctgcccctagcctactgggagctgtgccccacaggctggccccactggacttncgcttgnctccaagccatcctggggcatcttccatgtgttagctgttcaaggtt

SEQ ID NO: 360855 - DNA, 426 bp, Homo Sapiens
  misc_feature (307)..(317): n is a, c, g, or t
  misc_feature (409)..(409): n is a, c, g, or t
cagattcttggattcacttggtcactgggctgctgatggtcagctctgagacagtggtttgagagcaggcagaacggtcttgggacttgtttgactttcccctccctggtggccactctttgctctgaagcccagattggcaagaggagctggtccattccccattcatggcacagagcagtggcagggcccagctagcaggctcttctggcctccttggcctcattctctgcttagccctctggggatcctgccacctgccctcttaccccgccgtggcttatggggaggaatgcatcatctcacnnnnnnnnnnnaagcagatgatggggataacatggactgctcagtggccagggtatcagtggggggacttaattctaatctcattcaaatgggagacggcctnttgcaaagggccttggc

SEQ ID NO: 360856 - DNA, 1343 bp, Homo Sapiens
ccgatcttgcttgcccgcaggggatgagggttcttgcgctggcctgccgacgaggatgttcctgcttgttacttgccctcctccgttggtgccgtccggggaaggtcatgcagccgtagccatggcgccggttgctggcccactcgccctcgtacttgagcccgtccgagcgctggctcacgccgaagccggagcgtttgtcgttcttccactcgcccacgtaggtctcggtggtgtggcgtcgatgtcgtcctcgatgaccgccagctcggcctcagcctcgcccaggctgatggtggagtggatgtcgctggccgtggagctgacggtgctcatgcccgcctcgctgcgaaaggagctctgcttgctgcgttggctggccaggctgctcttggactccgacttgcgcagcttcagcccgctcagcagcgagcgccgaaacagccccttcttcttgctcttgaggatctcggagtcactgtgggccacgagcacgaagcccccgcgggacacggccgggctgccggccaccgccggagaggcgtcgggatgcagcgccgtgccgttggtgtgctcgctgcgcagggagttgatggacgtcctcaggggtgagcggatgaccgcggccatgccatacgggacgctctgccggacgccgtagccctggcgcatgccaccgacccactggccctggtaggtccctccgtccgagtaggtctcggtcccgtagccgtcctgcagcccgttgctccaggtcccttcgtatttggccccgttgcccgcgcactcccgcaccccgtagcgccccttgaatccgtgcgtccactcgcccttgtacacccacttccccttgctctccaggccgatgccgtggcgcttgccctgcgcccaggtgccctggtacgtgttgccgctgggccaggtgtagacgcccagcacctcgaagccgtggctccacgagccggtgtattcgccttggcccttggggccggtgcagacgccatggccgtgcgccttgccgtcctcccagcctccacagtaggaccctccgtcgtcaaaattaaacctgcccccactggacatgcatgtaactcggttccagatcccgcaaaacggtgaaaacggactcaggcgatcgacacagcagagtcgcggccgccggcggccctgggtcgcgagcgttttccggaggagaggaggacgcggccccggagcgcggtctcgggcgcgggcggccgcggcgccggctccggaggaatttcagtcaatcgggggcgattattccttttcgagctgcgccgcggagcctgaccagcgtctcgcgctcccgctggagacccgct

SEQ ID NO: 360857 - DNA, 1066 bp, Homo Sapiens
aggacttcctgctggagatgttctagagccagtacaaaagcctcatgaaggtcctggagaaatggggaaaccagtcgtcattcctaaagaggatcaagaaaagatgaaagagatgtttaaaatcaatcagttcaatttaatggcaagtgagatgattgcactcaacagatctttaccagatgttaggttagaagggtgtaaaacaaaggtgtatccagataatcttcctacaacaagtgtggtgattgttttccacaatgaggcttggagcacacttctgcgaactgtccatagtgtcattaatcgctcaccaagacacatgatagaagaaattgttctagtagatgatgccagtgaaagagactttttgaaaaggcctttagagagttatgtgaaaaaactaaaagtaccagttcatgtaattcgaatggaacaacgttctggattgatcagagctagattaaaaggagctgctgtgtctaaaggccaagtgatcaccttcctggatgcccattgtgagtgtacagtgggatggctggagcctctcttggccaggatcaaacatgacaggagaacagtggtgtgtcccatcatcgatgtgatcagtgatgatacttttgagtacatggcaggctctgatatgacctatggtgggttcaactggaagctcaattttcgctggtatcctgttccccaaagagaaatggacagaaggaaaggtgatcggactcttcctgtcaggacacctaccatggcaggaggccttttttcaatagacagagattactttcaggaaattggaacatatgatgctggaatggatatttggggaggagaaaacctagaaatttcctttaggatttggcagtgtggaggaacttttggaaattgttacatgctcacatgttggacatgtgtttcggaaagctacaccttacacgtttccaggaggcacagggcagattatcaataaaaataacagacgacttgcagaagtgtggatggatgaattcaagaattcttctatattattctccaggtgttacaaaggtagattatggagata

SEQ ID NO: 360858 - DNA, 382 bp, Homo Sapiens
  misc_feature (295)..(295): n is a, c, g, or t
  misc_feature (331)..(331): n is a, c, g, or t
ggaaactaggttcccaggggttgagaccagaaaggtgaccaagacagattttttaaggtgcagaaactgcaggggggcctcagtgacatccatgaggccttattagcaaaggacacccagacctccaaggtttgtgggccccttccacaaagctgtaaggtcccagcccacctactcagggccttgctcagtgctgtggccccgtggggacacagtttgctcgtggccactcagtggagctgggcctgcagcagactcaaggctccgagtgccctgggggttcacccctcccctnccctccttcagagcccaccctgagagggcagcagtnacccccattggcacacacctgccaacagcatttgggggttttttcccaggg

SEQ ID NO: 360859 - DNA, 343 bp, Homo Sapiens
tgctgtattttctttggctttaggatgaattgaattggaagctacttattaccatgcttaatgttatagaaataatcattaggtagagcgtcctggagaaaaccattcagtagcagcccaggtggctagaagacctctttctctgaaaaggtgaactgctgcccatctactctgcccccaagaaggcagaatggccatgtggagaaatcagatcactgcttaatgaaaggaattgaccaccgtcagctcgaaaatccacccacagtctagaattgggtgtttatcaggcagaagttctctccaaagacatttttagcatgtgtcaacaaactataagagagaa

SEQ ID NO: 360860 - DNA, 493 bp, Homo Sapiens
  misc_feature (59)..(59): n is a, c, g, or t
cctacccgtaccaattaataaaacctcccataataacctcagtcattttaggcaaattncccattaactagtttatgcccttatttccacagtcatttaaagtttaatcctgaaatttactcagcttttataattcaacagcaacacaagcatttccctaaaactgacttacttaaacaatatttggctatatgatttagtacaaaagaaaatcaatgtttaaagcagtaggaaaaggacagaaaagcaggccatcagaacagtttcttcatcatttctgctaaataagtaggaaatacaaaacataaaactatatagatttaaacagatttttgaaagattttagagtttttacggataaaaattgtatttactttttgctcttattttgataaaaacatctctagataaaaataaattaagtattctcagtatgaataataaactactcaatcctttcatattttagtgaattttggaaaatctacaggtt

SEQ ID NO: 360861 - DNA, 351 bp, Homo Sapiens
  misc_feature (236)..(236): n is a, c, g, or t
  misc_feature (244)..(244): n is a, c, g, or t
  misc_feature (274)..(274): n is a, c, g, or t
  misc_feature (287)..(287): n is a, c, g, or t
  misc_feature (301)..(301): n is a, c, g, or t
  misc_feature (306)..(306): n is a, c, g, or t
  misc_feature (316)..(316): n is a, c, g, or t
  misc_feature (335)..(335): n is a, c, g, or t
gggcttgcttgcatggttatggttgagactacagatattcttcaacacgctcaaatgaggaagatgagggttgaaaacccattgtaggatgctgtggatctaggattcgccacagttccagggagagcttacgctcttgatctaaaccacagttgttcttcaacactgactgtgtatccagagtaatgataggaaagcgttggaaaaatatagatttccagggactgcaccaaggncctgctgnatccaggggttaggggccaggatctgtatnttttccaaatttncctttcagcgtttnccttnttttggcccngggtttttcaaaattgccntttttaaagttagggg

SEQ ID NO: 360862 - DNA, 458 bp, Homo Sapiens
  misc_feature (380)..(380): n is a, c, g, or t
  misc_feature (392)..(392): n is a, c, g, or t
acaccatcttcaaccacgatttccgccgcgccttcaagaagatcctctgtcggggggacaggaagcggatcgtgtgaggtttccgctggcgcccgcgtagactcacgctgactgcaggcagcggggggcatcgaggggtgcttagccccagggcactcagaaacccgggcgctgcctgctctgcgtttcctcgtctggggtggctctgcagcctcctgcgggcgggcgtctgctgctcctacaagggaagcttcttgctgccaggcccacacatccccagttgttggtttggccactcttgacctggagccatcttcctagtgggccacccctaattcactatttgcttcctaaaggtatttttcaaccctctttcggcngggtacaagccntcacaagtttttcagagcaaagcattgggattaacaaaggggcatgggttcaaaaaaaggtttaat

SEQ ID NO: 360863 - DNA, 541 bp, Homo Sapiens
  misc_feature (474)..(474): n is a, c, g, or t
  misc_feature (493)..(493): n is a, c, g, or t
  misc_feature (509)..(509): n is a, c, g, or t
  misc_feature (526)..(526): n is a, c, g, or t
gctgttctgtagtcggggaggccagaatggacacagggaggtcatgcacaggctgggcctccaccccactaggtgccgtgatcagagttacctgggtgggctgggacacgggctgcatggtgatggttggggttgtgagcccgcctgccgctgtcagcgtggtctgtgcggccgacacagtgatggcagtggggttgatcacctggcttgagagggtggcaatggtgcccaaggtggtgatgggcgtggccagggaagcactagtgctgtggccccccgccccggcaaggctggtggagacggtgcctgtcactgtgcctagggtcgtgacacctgtggtgcctttcacaaccaacgtggtgacggctggcttgacggcggagacggagaacgggtgtgaccagggcgaacaccccccatgggcacagtgcggaagatggttgcctgggttttccccgggccccctttaagcancaacttggttcattccttnttgcccttgccaattngaattttttggggacancattgatgatttttg

SEQ ID NO: 360864 - DNA, 512 bp, Homo Sapiens
  misc_feature (381)..(381): n is a, c, g, or t
cgtggaaactgtagaatataaaaatctaaaattcactatttgggatctaggtggaaaacacaaagtaagaccatggtggaaacattattacctcaatactcaagctgttgtgtttgttgtagatagcagtcatagagacagaattagtgaagcacacagcgaacttgcaaagttgttaacggaaaaagaactccgagatgctctgctcctgatttttgctaacaaacaggatgttgctggagcactgtcagtagaagaaatcactgaactactcagtctccataaattatgctgtggccgtagctggtatattcagggctgtgatgctcgaagtggtatgggactgtatgaagggttggactggctctcacggcaacttgntagctgctggagtattggatgttgcttgattttaaaggcagcagttgtttgaagttttgtggttaaaagtaactttgcacatagtatgttttaagaaattatacatctcaaaagatggtaatttaggatgc

SEQ ID NO: 360865 - DNA, 810 bp, Homo Sapiens
ccacagataagaatagcgattatctgctgttaccacaaaacaatgtgcattgatttgtatactctggtcaacgaggtctgtgatctgccgtttgtttacacctgaattattggctattaatggatccatttcaatgggaagatggtgggcttgacccaaggagtaccctggagctcctctgagccctactgtgttgtgccatctattcactgcaaagagtcggctgcaagtcactgtcaccactgcggggatggtcaagtggggcagagtgttggctgcccacatgggttactggaagaatttgaaggaaacttcaagcaccattatcacatcctgttgcatctgatctttaaacatgagcggactctgtggaaggaaacacaggtgcatggcagagctccgaggcggatgtggctcaataagcaactgagatggcgtctgtccaaagttctgtatctgtgcctccatggcctccctgagcacaggatcagtgatactatccaggttcacagagccttcataagtcaagtagtgaaaaacattcagagcacgaactgcttctggtcctcgctgcttatagccaaatataaggtcgatccactgatgaagttggcaagaaacaaattcactttctagggccatcctgttgatccgcacaaagtcttcaggtttttttgcccaagggggaagatcaacatcatttaccactacttcatcttctctgactccaagattatatccattactgttgacaaacatctctggtaggtagtagaactctggaattagttcctttacatcagaagtatc

SEQ ID NO: 360866 - DNA, 494 bp, Homo Sapiens
  misc_feature (13)..(13): n is a, c, g, or t
  misc_feature (23)..(23): n is a, c, g, or t
  misc_feature (51)..(51): n is a, c, g, or t
aacattcaacccngaaacatccnccccggaggtgttttggtttccagatanccacaaccttaagggtgattttgtttcctgtttttcctcccataaacaagtaagacaaacagatttaaggatttaagtttgggaatgctagctcttgcctgtgtttcttggccaactcctttaaaccaccaaacaaattattgtattaggctagagctagaaagtcattgttctaagaaagacagaccaggatgaggtgggtaactccaggacaggcactggatcagcacgttggcagggaggcttgcaaaccctgacaagaatgcaggttgatccacactatgacaaatctataacaaaagtgaccctgatgataaaaatgcaaaaacaacatgaacaacaaggccaggatatttcaaagggtttgccttcagttaacaagtgaagaaaagatgatttcacctcgaacttcaacagcctagcaaaagagtctctgatctttc

SEQ ID NO: 360867 - DNA, 492 bp, Homo Sapiens
  misc_feature (442)..(442): n is a, c, g, or t
  misc_feature (467)..(467): n is a, c, g, or t
atgcaaacttcctgcctcctccttcccccttccatttcaagaatatgtttgtgtgtagggtgggggtgggggttggaaggggttgcttgttactccccaaacttccattaaccagggcacccttgggttggagaggtagttccaaactctccattgatctatactacattctgggctgaaggttttcttattctggactatgaagaaaggactttcaaggagatatagtgtgaacaggcatcaggcaaggtagagggattatatttacttaagagaacaagctctatattaggatattgttttgaagcagatgggatgccgttcaattgctaataagtcttagttattaacgcaggctcatcagggcccccccttgggaaatatttgatcagtgggtctttttacaagtgatgggtatatatttctttctagggtggtgttntaatccaaggactccccatccattncccatctcatacttccccgtttaat

SEQ ID NO: 360868 - DNA, 891 bp, Homo Sapiens
atgcagctgagggcagagtcatggagggcctggctgcgggggaatgaagcctccgccttcgcaggcaaaagcctttaaatacgggctcaggcccgggactcagagtgtaacgcgtggcagcctgagggaggggcgtgcgccgagagggagctcagatcgagcggggcgcgggtggagaagctgcggcagcgcggcccgtaggaaggtgctgtccgaacgatcgggataggagcggtccctgcgcttgctgctgggaagtggtacaatcatgtttgaaattaagaagatctgttgcatcggtgcaggctatgttggaggacccacatgtagtgtcattgctcatatgtgtcctgaaatcagggtaacggttgttgatgtcaatgaatcaagaatcaatgcgtggaattctcctacacttcctatttatgagccaggactaaaagaagtggtagaatcctgtcgaggaaaaaatcttttgttatctaccaatattgatgatgccatcaaagaagctgatcttgtatttatttctgtgaatactccaacaaaaacctatggaatggggaaaggccgggcagcagatctgaagtatattgaagcttgtgctagacgcattgtgcaaaactcaaatgggtacaaaattgtgactgagaaaagcacagttccagtgcgggcagcagaaagtatccgtcgcatatttgatgcaaacacaaaacccaacttgaatttacaggtgctgtccaaccctgagtttctggcagagggaacaggccatcaaggacctaaaagaacccagacagagtactgattggaaggggatgaaactcccagaggggccagagagctgtgccaggcctgtgtgctgtatatgagcccctgggttcccagaga

SEQ ID NO: 360869 - DNA, 400 bp, Homo Sapiens
  misc_feature (39)..(39): n is a, c, g, or t
  misc_feature (62)..(62): n is a, c, g, or t
cccccttgcagagcaccctcaagcaggcacgccgctgtnaagggctggacgagtccttgggntataggatgtcactcttcaccacccagttcccttggaccaacatcgccaccttctggatgccccgcagaacagccacggaatcgatggaggggcccaggaggctcatcaagttggcaaaaggcatgaccttcacattcttcatcaggatcttgatctgatcggccaggggcagcgtgcgcagctgggccatcgacagcacgttgctgggggccacaggcttgtctttctcctcctcctggctgggtggcaccagcatcatcaggtactcactgggtgacttgacgagctccgtgttctccaccccgcttgagccggggcacagcaggtactgacgctc

SEQ ID NO: 360870 - DNA, 454 bp, Homo Sapiens
  misc_feature (342)..(342): n is a, c, g, or t
  misc_feature (352)..(352): n is a, c, g, or t
tggcagcctcaaaaagagcctgggtgcccagggggtccttcgtttctgtgtggctgcagaggccaggagtgcagtgactgtctcactgcctagtggttgtggctcacatcctgccctgatggagaggggggcctgtcgtccaaccctctctgaaaaactgcagtagactttaccatttcaggccccacctaatgttctttccttccttccccctacattcttcccgcccctttcatagttaagatgcataagctgagcaataaccccacttcctgatttccctgaaatatgagcccagaagcagcaggtgacagggagcttcccttaccctgggggtgggtnggcacacagnaccacctcctgtccttgtccccttgcaggtagtatttcacagtgttggtgttaactgggaggagggaggaaggagctgagatgaaggaggttcaggtaaaca

SEQ ID NO: 360871 - DNA, 470 bp, Homo Sapiens
  misc_feature (380)..(380): n is a, c, g, or t
  misc_feature (410)..(410): n is a, c, g, or t
  misc_feature (421)..(421): n is a, c, g, or t
  misc_feature (439)..(439): n is a, c, g, or t
  misc_feature (444)..(444): n is a, c, g, or t
  misc_feature (452)..(452): n is a, c, g, or t
cagttaaggcctgtgaattcgcaattgttcttcccgactgcctgtcctgtgaacctcacatactcacatcagatgcaaaaacaaccaccttgtagaagctgcttaaccagctcttactattgcaaaaggtcaatacctgaaataaattcatgtaaatgctgatagatatgtctgtactgtattaatccttgtgttctgcttcttcccttgagagctgatatgggtggttttcaagattatggttgtttgaaggattgctatctaccgaagaaggcccagtataagaaagagattccagtgattttgatccatgggaaaggcagagcttgacggctccccgtctctacccccacatccccagggggacacctgaggggggnacccttttggaaaatccttgggtaggatgnagtgagttttncaagtttgagtgggtaanggggnagggcccntaagggggattctccaaa

SEQ ID NO: 360872 - DNA, 600 bp, Homo Sapiens
  misc_feature (241)..(252): n is a, c, g, or t
acacccccccaaacaagggtaaccctgtgaagacccaaaaaacggtttccccaagcccaactcccctaatagccctatcagagcccttcattaatttatgttttaaaatccacaaagatgcaacatttttcctttttttgacatgacaatcaaactagaattttattaaagcagctctattactaaatgctgagatgtggcagctcttgtgaataaaaaaatttcactgtatttggagggnnnnnnnnnnnngccctacagtgctgcacattattatagtttggtataaaagtttccggtttccatttataaataaagatagtctcaaattcattgctggcatcttaagaaccagttttgtgcggtgggggaaagacaagcagtattagtccatttataaatgttcacatgtatcgtcattttatagggaaattaataatggcgggctcaggtttgtatatttaaatgtaaatgtgaagataactggaaatggaagaggagcattagaagagcaaaacagcattatatgtttttattgatttaatgacctaaagaagctaaccatcattaagaggctggtggtcttacaaagccaccaat

SEQ ID NO: 360873 - DNA, 884 bp, Homo Sapiens
cactgatttcagaagacgcgatggataatattgatgaaatcctagagaagactgagtcaagtgtctgcaaagagctggagatagctctggttgatcaaggtgatgcagacaaggagataatttcaaatacatatagtcaagtactgcaaaagattcattcagaggaaaggctcattgccacagtacaagctaagtacaaggacagtattgagtttaaaaagcagcttattgaatatttaaagaagagtcccagtgtggatcacttgctatccattaagaagacattgaaaagcttaaaagctctactcagatggaaattggttgaaaagagtaatttgggaagagtcagatgatcccgatggctctcaaattgagaaaataaaagaagaaataactcagctgcgcaataatgtctttcaggaaatttatcatgagagagaggaatatgagatgctaactagtttggcacagaaatggttccctgagctgcctctgcttcatcctgaaataggattactcaaatacatgaactctggtggtctccttacaatgagcttggaacgagatcttcttgatgctgagcccatgaaggaacttagcagcaagcgtcctttggtacgttctgaggttaatgggcagataattctgttaaagggctattctgtggatgttgacacagaagccaaggtgattgagagagcagccacctaccatagagcttggagagaagctgaaggagactcaggggttactgccattgatattcctgttttatgtaaagtctgatcctatggcttatctgatggtcccatactaccctagggcaaacctgaatgctgttcaagccaacatgcctttaattcgaagaactttaaaggtcctga

SEQ ID NO: 360874 - DNA, 903 bp, Homo Sapiens
  misc_feature (233)..(296): n is a, c, g, or t
  misc_feature (527)..(527): n is a, c, g, or t
gctgtcatccaatgtaactttatttatggacactgaaatttgattgccatataaggttcatgggtcactaaatattatccttcttttgattttttgtcaatcactcagaattgtaagacccatttttaagtcatgagtggtaccgaaaccggcagcgggctggatatggcccatgggccatactttgtggactcctgctctagattctcaagttcatgcttcaacatgtaaannnnnnnnnnnnnnnnnnnnnnnnnnnnnnnnnnnnnnnnnnnnnnnnnnnnnnnnnnnnnnnntttaaaactatcgcaggttttaaaactatcccaacaagaggaagagatcaggctcagctctgaatacaaccagaacatgtgggggtttataactaatgggcagagtgagggggtcagtgattaggaaattactaagaggagatatcaagagtagagttcttgcaaatgaacttaacaggcttctcgttgaagggaggccaaggacttacacatccaaaagttaggggatgnaggaaattccatagatatctggggatgtgggattctctctaaactagcttagcaggattcttgctaaagctgggctgtataggcccatcaagaatgggggccaaggtggaggcctggttaaaaagaggacttagggcctgactgaagtttggtcaaggagagagcctttgtcaaactacaccatgaagcctccttaatagtcatggatatgtggtgttcaacccaatatccacttagaaatcaggtgataaatagtcacgagcctgttttcattagctcaacttgaagaaaatgtaagatcctaaagatgtcaaactttcagcagaactcaccagtctaatccattaaaatcacgtcgcccatcgctcctttcctc

SEQ ID NO: 360875 - DNA, 772 bp, Homo Sapiens
gaccacgagacattcggacagtgctgaatggtcccttcagagaactaaaacatgactgcaacagaggactgcctgtcgtggacaatgatgtgccccagcccagacctggagagaggatggacacctccaccgagcagtgcggatcggagctcagctcagcgttcttgaagatctggccttattcccagagccacagccagttgagaacatgaaattgtaccacagctggctcctggttggctcccgtactgaggtgacacaagtgaatacaaccaactgtggccgtctccagagctgctcagagtgcatcctggcccaggacccagtctgtgcctggagcttccggctggatgagtgtgtggcccatgccggggagcaccgagggttggtccaagacatagagtcagcagatgtctcctctttgtgtcctaaagagcctggagaacgtccagtagtgtttgaagttcccgtggctacagctgcgcatgtggtcttgccatgttctccaagctcagcatgggcatcctgtgtgtggcaccagcccagtggagtgactgcactcaccccccggcgggatggactggaggtggtggtgaccccaggggccatgggcgcttatgcctgtgaatgtcaggagggtggggcagcccatgtggtagcagcttacagcttggtatggggcagccagcgagatgctccgagccgggcccacacagtgggggcgggactggctggcttcttcttggggattctcgcagcatccctgactctc

SEQ ID NO: 360876 - DNA, 523 bp, Homo Sapiens
  misc_feature (383)..(383): n is a, c, g, or t
  misc_feature (420)..(420): n is a, c, g, or t
  misc_feature (433)..(433): n is a, c, g, or t
  misc_feature (440)..(440): n is a, c, g, or t
  misc_feature (447)..(447): n is a, c, g, or t
  misc_feature (469)..(469): n is a, c, g, or t
  misc_feature (475)..(475): n is a, c, g, or t
  misc_feature (502)..(502): n is a, c, g, or t
cgaccacaagacattcggacagtgctgaatggtcccttcagagaactaaaacatgactgcaacagaggactgcctgtcgtggacaatgatgtgccccagcccagacctggagagtgcatcaccaacaacatgaagctccggcactttggctcatctctctccctgcctgaccgcgtactcaccttcatccgggaccacccactcatggacaggccagtgtttccagctgatggccaccccctgctggtcactacagatacagcctatctcagagtcgtggcccacagggtgaccagcctctcagggaaagagtatgatgtgctctacctgggggacagaggatgggacaacttccaccgaggcagtgcggattcgggagctcnagttaagcgtttctttgaagatcttgggctttatttnccagagtcacagncagtttnaggaacntgaaatttgttacccacagttnggttcnggggttggtttccgttattttagggtnacacaagtggattacaaccca

SEQ ID NO: 360877 - DNA, 468 bp, Homo Sapiens
  misc_feature (13)..(13): n is a, c, g, or t
  misc_feature (31)..(31): n is a, c, g, or t
  misc_feature (46)..(46): n is a, c, g, or t
  misc_feature (71)..(71): n is a, c, g, or t
aaattgcccctcnccctccggaaaacctacntcttaaatcccccantgatttaagcacctaaactgtggangctgcaaaatggggcaaggaggggaggaatcaaaagggaaatcccacagagaggggaggaaccagagcccggcctaaaggctggtccgccctggtccttgcccacactgggaactcttctcttcttgtccctgagaactcagactcccaagctgcaggctctgagacagtgaatttttagtcctgttctgttttcaggcattcacgtcacaaggcaagctgagcacatccacctgtgctttctgggagctctgcgtctgcatagaaagcaatgggcttcccaaaggtgctgggcagtcgtggggttcgatacaaactgcatttgattgggagttggggtttggctggactgccttgattttcccagggtgatcagtctttaacacgaaatgaaaaag

SEQ ID NO: 360878 - DNA, 1130 bp, Homo Sapiens
aggaagatggcgaacgtggggctgcagttccaggcgagcgcgggggactcggacccacagagccggcccctgctgctgctcgggcagctgcaccacctgcaccgcgtgccctggagccacgtccgcgggaagctgcagccccgggtcaccgaggagctctggcaggctgccctgagcacgctcaaccccaaccccacggacagctgtcccctctacctgaactacgccaccgtggctgccctgccctgcagggtgagccggcacaacagcccctcggccgcccacttcatcacgcggctggtgcggacctgcctgccgcccggagcgcatcgctgcattgtgatggtctgcgagcagccggaggtctttgcttccgcctgtgccctggcccgggccttcccgctgttcacccaccgctcaggtgcctctcggcgcttggagaagaagacggtcaccgtggagtttttcctggtgggacaagacaacgggccggtggaggtgtccacattgcagtgcttagcgaatgccacagacggcgtgcggctagcagcccgcatcgtggacacaccctgcaatgagatgaacaccgacaccttcctcgaggagattaacaaagttggaaaggagctggggatcatcccaaccatcatccgggatgaggaacttgaagacgagaggatttggaggaatctatggggttggcaaagccgccctgcatccccctagccctggccgtcctcagccacaccccagatggagccacgcagaccatcgcctgggtgggcaaaggcatcgtctatgacactggaggcctcagcatcaaagggaagactaccatgccggggatgaagcgagactgcgggggtgctgcggccgtcctgggggccttcagagccgcaatcaagcagggtttcaaagacaacctccacgctgtgttctgcttggctgagaactcggtggggcccaatgcgacaaggccagatgacatccacctgctgtactcagggaagacggtggaaatcaacaacacggatgccgagggcaggctggtgctggcagatggcgtgtcctatgcttgcaaggacctgggggccgacatcattctggacatgggcaccctgaccggggct

SEQ ID NO: 360879 - DNA, 1318 bp, Homo Sapiens
  misc_feature (87)..(87): n is a, c, g, or t
  misc_feature (1303)..(1303): n is a, c, g, or t
cactgaggcagcttagagggaatgccttagtaaactgaactggagcagaatctagtttgattaggagctagattataatctaggttncaagtacagaatttggagctaaggactgtgactgaaatcattttcccatatgagcagaccctgtgtgtcaggcctgtttcccatatgagcagagcctgtgtgcaagtctgtttctggcatgtccctcattgaggaagggaagcaaaagctggttattgccaggcctattaacacttaatatgcaaattctatcatcctgaaactggggcatctgaggaaaaggtgaccttgctggatggctttatttgcatggctctgcctgtctgcagtggttgagtcctcatcacctggtatgtgtatgagcaaatgtgtgctgatcgtgatgcccaggcagaaacctcttgaagactgctgcaggcatgctttaaaaatgaccagtcactcatcagagaagctgggtgatctgactccagaaggactgaagtcagagaagtcacaagagcacctaggattcaaataaatagcgtcagagtcctatagcaacctccaagtagcaccgtcttacttggctcttgtgagcaaagactgcagtaccttaaattaaggcctctctttaaacatatgtggaagactaggggatccttggccacctggtctcagagaaatcatatgagagtaacaggcatttccttattgtatttgtactacactccttcctacttttccattcctgaacaccctctaataccacctgttttgggggatgctcttttctctgaaaaacgggcgagtacagggcgccataaaggcgaggtccctctatataccgcgccaggctcgcccccgcgaccgcacgcccccaacagccggatctttaaccccccccacgatcataaaaaaatggagttacggggagatcacataaagaacggccaccacaccctcctaacccagagcacaaacaactccacctcattcacatacccacccgaagtatccagccctgaacccgccctacgcaagtagacacccaaacggtggcggccatttcactctatacaccaccagcaacctccacctagatacacctccagcacgaaaacacaacgtcgctagtcactggacgcactcacaccctcgacgccgaggatcgagtgaaaaactgtgacacttccaagacgcaccctcgcgatacaggatctatattcccacctccctaccccatcatcttccccatccaccacataattcacaaacgacatccccgtcgtcagcncctgtcggcacgtcc

SEQ ID NO: 360880 - DNA, 583 bp, Homo Sapiens
  misc_feature (300)..(387): n is a, c, g, or t
  misc_feature (419)..(419): n is a, c, g, or t
  misc_feature (560)..(560): n is a, c, g, or t
atgtaatctactatgctgtgagaaacattaaaattaggaagccaggggtatgggaaccactgattagcatcatatgccggatgtgcttccatccaaagcacatgaacagaatgatattaaattacaagcctatcaggaacagaccagctttctgcctccctttctatgaataccaagtcccatgaaccttgtattcatgtggagttttaagtgcatgcttggaagttatgaggagacagcctggtatgttcgggaaagaaaataaaggttaggtacatggtaggctttggctcagccatnnnnnnnnnnnnnnnnnnnnnnnnnnnnnnnnnnnnnnnnnnnnnnnnnnnnnnnnnnnnnnnnnnnnnnnnnnnnnnnnnnnnnnnngaggatttaaatggaggaagatggaatgttantacccttggaggcacacagcgtgggttacacccaccaaatgctccaacccaaccggcaggcggatggacagttttagggccaactacccaccaggaaaggattttggaacctgttccccaatttcggatttttggtttccntaatccaagttcttaggtggatt

SEQ ID NO: 360881 - DNA, 495 bp, Homo Sapiens
  misc_feature (383)..(383): n is a, c, g, or t
  misc_feature (437)..(437): n is a, c, g, or t
  misc_feature (459)..(459): n is a, c, g, or t
gagagcagccatctgtctggccattcagaggattctaaagacatggctggatgcgctgctgaccaacatcagcacttaaataaatgcaaatgcaacatttctccctctgggccttgaaaatccttgcccttatcatttggggtgaaggagacatttctgtccttggcttcccacagccccaacgcagtctgtgtatgattcctgggatccaacgagccctcctattttcacagtgttctgattgctctcacagcccaggcccatcgtctgttctctgaatgcagccctgttctcaacaacagggaggtcatggaacccctctgtgggaacccacaaggggagaaatggggtgataaagaatccagttcctcaaaacctttccngggcaggctggggtccctctcctgctgggtggtgcttttctcttggcacaccantcccaccacggggggggagagncagcaacccaaccagacagttcaggtttgtggcatc

SEQ ID NO: 360882 - DNA, 919 bp, Homo Sapiens
tgctgcaacctggcctattcagagaaagttttcaagcagaaagatgaactgatgttggccgtatggagagatttacaagatctcccacagctagagtgatataagcgcattgtagattgtacaataggcacagtatgagcagcaaattggggacatcttgactggggaacgcttgagggtactactcgtgactggaatggaggcctgccaccataatgtacatggccaatgaggcaaataaggttggattaggagcatagcatcaagggtgccagcttattaaatgccctcttccagtatgctagcactggcctgctgggaaaagtaatacatcacataatcagaactaaaggcaaaaagaggcgagctccaggaataggcactgtatacaggactcgccccagggtagccagatgcaggtctttagatttgttgatgcaggctgagcatctctaatccgagggggaatgtctcacatggtgtccaagaaatggtgacacatctcacagagggcctaggctcaggagggctagagtatgagacattccccctcccctgtgaacttaaaaacgtggccaaaaatttttgtaaaaaatggctaccctgtagttctttaactggacctatttagacaacaccttacacactggagaaggatgatactatgtgaatctagtaagtctacaagacaatacttctctcttttggctgtcttcttcctctccagggtgatgacaactccgtgagggtggagattatatgtctctcatcatttaagcaacaaggaaataaattagtggcagagtaaggggtgactcagtgagtacatccaattgttgacatagttttgggtgggagaaattttgctattatatcaacttaacttcttaaaatagtctagtgggattaacttggtttt

SEQ ID NO: 360883 - DNA, 509 bp, Homo Sapiens
atatgtgggaatcatattgacaggtcatgaaaatgagaccaaaagatctctggaagcgattaatgataaaatttcatggagaagaaggccttgactacggaggggttgccagggtgatgacaactccgtgagggtggagattatacatctctcatcatttcagcaacaaggaaataaattagtggcagagtaagggtgacttgagatctcttggaagcgaggatcctttaaaaatcctggaatatacactgcagtaaaagaacaaagcatacctcagccttaaacgactgaagaagaatgtcaagtggggaagtggctttggttttcagtttgtgggttctgaatccacacaaagacaggattgctttctgaaaacctgaattaattattgtccttacctcaataagacaaaaaattagaatcaaaatcgttagtattacagtcacagatatcaccaagattagtttgttgttatagccatatcctggaacttctttcgtgagctaaaa

SEQ ID NO: 360884 - DNA, 1929 bp, Homo Sapiens
  misc_feature (19)..(19): n is a, c, g, or t
  misc_feature (24)..(24): n is a, c, g, or t
  misc_feature (38)..(38): n is a, c, g, or t
attgaatttagggaccttnacccnggcttggtcccaantggtttgaacctgatgggttgagactccagaaggataagaatgtctgagaatcttctgcagccccccacgctgcaaagccccataacagaccactgcatgaaatcctattcacagccagagacgtggtcaacacacacagagggagtgaggctgggaatcccgagttctgactcctcgactgccaatgttatgtttcacacaacaggttagtaaggaatacagtgagcttttttaatccaatcatttgcaaattaataaggaagtaatataccaacataatattttgctgtacaagatgacaatcttaaaaagaatttgtacacatatcatgtggaacatttttattcctaatttatactttgaaagatatctgacaatgtacaaagaatacccagttctaggtggtgactgttttgtataatcatttatttacaaaatttcaccacataataggaactgcctttaaaaaaaatcagcattggtcctataaaggccattaggataaattcttaagcctacaaaagacgccttagtactactgctcccaggctcattattgttaactaaaatctgactccaaagccccaggtgtagtttcctagttccaattctacagtcattcagaagcacgtctaactagattgacagaggacagtggaggacccaagcagtcctatcaacctctataagaggtgtacataagcctactgctcatacccttctagccataccaccctttatttataatgggacaccaggtcatcccattatgctaaaacatggttgctctgggaaaaaacaaggctttctctagaccagctggactggtcaggagggagagtaaaaagttgctgtcgctagtgaaaaatggtttcatttcttcgaactttttccttttccttttctgggctccttatctttttctggttttgaaggctttgaagattttgtctttttcttgatcatggcatcagtttctatagcatcttggtctttctcatcagattgagagtcatcttcatttaattcttcattgtattccgaatccagggatgggcttgtgctgtgtctagatgcctttatagcttgaagtgagtatggagtaaggtgggcttccttattgtaagctcttgtgaaggctgctttcaccttgggatccagctttgaaaagggactaggtttgccaccccagctgctgatttccatgatattctcaaagtcttctttcatcaaataatatgtgtccataagtgcaacaacatcctgtactccgtctactccttgtgaggtcaagggctgtacaagtgcatcccttagaagcgacagataatccatgtttacagtccttttgctggagtaagttctgagactcatatgcaaggccaggtcctgaacaatacgatcatgtttgcctgtagacgagtgcttccccagccagcttgggaaggtgggaaactgggtcatgtaccccctcatcaactctccaggaagaacactggcataaatggcctgcgcaggcagaagactccagttttgcttactccggatctggctgtccactaggtcaccatcgcatatgctgtctgctgctctgcttaaaagcatcaggtgctttttcatgtcaccccctgctgctacaggcttcacgtgtatgtaattttcctggacgaagaggggtgctattgaataatcatgaaaaaagagatctgacttgtccacaagtgacatgtgagcagtctcctctccagctgcaaacactttccgggcaacatcaaacgggcccattttgatatcctttttggctctgtgagaatcagctttggcctggtcataggttaatgctttacttcgtgcacaccacatactcagattatgtaaaacctgtctgcc

SEQ ID NO: 360885 - DNA, 446 bp, Homo Sapiens
  misc_feature (67)..(67): n is a, c, g, or t
ccccactttatacggaaaccaaatttaacctcaatccccggcaaaaaataaatgttttaaataaaanaaataataatttttggtccttagtaatgatatacattaagccgcctaacatgtaatgataaggcaaaatcggataaagatctcagcaatctactaaatttagcattatgtgttataaacactttaaaatttcagaagttttttgtaagcttgatagtatgagttagatatgaagctattatatttcttttctctgattaagaaatgtactaatgaattttaaagtaaatatggtaataatgtattatacagcattatctctttcaataagaagatattggccttaactaccactttactgagccataaaacctaactctatgtgttcattcatttttttgttggttcactgttaaatccctaacactcaaaacattgcc

SEQ ID NO: 360886 - DNA, 439 bp, Homo Sapiens
tacgtataacagtttctttactattcccattattcagcgtttataatctggtttgacatatcagtgttggtgctgagagggaaaggtatttctaggtaggataaaatggtgaaaagtgatttaacactgttgtatgcttgcttttggccaggaactatagggcagtgtatcttaaactttgagtcttgagaccaacttacccagacttcatagcaccccactaacaagtcccccaatctccagcctctcacctttggtcattaaacctacatcatcagaataattttaaaaccgtatctctgcaatatctacctaaaaactttaaatgacttaccctctttacagggtcaattctgaactaattctaagacagactgtcagtcaataaacatatattagccatatattctgtgcaaaaacattcaatgacatctaaaat

SEQ ID NO: 360887 - DNA, 1109 bp, Homo Sapiens
gatttcttcatggaaattgatgatatgtgagagccagtgaatttctgagttttgcagatatcctcagtggtgactggaatacacgctctttactcagggaatatagcacatctatagctacgagaggtgtgatgcattccaacaaagcccgaggatatgctcattgccaaggaggaggatcaagttttcgacccttgcacaaacctcagtggtttctaataaataaaaagtatcgggaaaattgcctggcagcaaaagcactttttcctgacttctgcctaccagctttatgccgccaaactcagctattgccataccttgctctactaaccattccaatgagaaatcaagctcagatttcttttatccaagatattggaaggctccctctgaagcgacactttggaagattgaaaatgggaagccctgactgacagggaacatggaatgatagaccctgacagcggagatgaagcccagcttaatggaggacattctgcagaggaatctctgggtgaacccactcaagccactgtgccggaaacctggtctcttcctttgagtcagaatagtgccagtgaactgcctgctagccagccccagcccttttcagcccaaggagacatggaagaaaacataataatagaagactacgagagtgatgggacatagaagccagcctgctaatcagattgctacttcacagcttcatttttgtctcattcagtggtacttcagcaagagttaatatgcttttctgattggaattacaccaacagtttgttaaattccttccattccttgtaagtatcttcatcacaagaaaacctaatcttctgtcatcttgaagttaattagaagaatccaggccttcaagatctccttagattgattgcagcgaaatgtaattaagatctgtgtaactgggtttaaaggagcggggtaccgatgtggtcattcacgggcgctctgtctggaaccattattgctcacaatatttcacgatcgtgaacgaactatattcagggatgcacacaaggttattgcgagggggtgttcaaaattcgacgtgattatcacacagtttagggtagcaataagaactgtaa

SEQ ID NO: 360888 - DNA, 629 bp, Homo Sapiens
  misc_feature (37)..(37): n is a, c, g, or t
  misc_feature (121)..(121): n is a, c, g, or t
ccaccttagagacccactgtacaggctgctctggtgncaggggctatactttgtcaaagtcttacacaaaaataataatgaatggtactgaattcaggaacttgcctgagggagtcagacnagtactcagaggacatcagctgttgcaagtctgtgaacgtttcctaagaaagacagtttaacacttatcgctatgaagagaaaaagagcagccctcaaagctcgtagcatacctgggacccattcaccacacaccatttgtactcagagaagcgaggtagcccaacgtcacacagctagcaagaaaatgaacacggggttaagaccaaggtcttgctggcttctctacctccaccccacagctgcagctgcaccagggagcttccatttcccaaggcaccgaggcacacagtcctggcaccagggactgactgagcacttgtctctcacctgtggccacctcccatccctgcccagtcacctgtacacttagcaactactatggccgcctaagcaaatgccggcaagcatgctctgccaccgacaagcaagacaccagaaatgcagagacagagactgtcctcctctctgactgaaagaaatgaaaggtgtccatggagcctcagcta

SEQ ID NO: 360889 - DNA, 911 bp, Homo Sapiens
gtcgtggcgtgaggggcgccgagcgaggggaggcgcgggccacgggagttccgggagttccggcgttgcccggcagtccgcagtcctcggcgggaaggctgtcccggcgcctcaggcagctctgcgtgggccggggtgacttcctcgcgatcccctgcgcgaggtgaagggcagggacctttgccgcgccttccacgcgccgtgccccaccggcgagtggctccatcttcctcagacttatcgctcgcggacaggcgccgtgggtctcccgggcctccgtaccgtcctccttcccagcggctccgggaagcggttccctgtcttcggacgcatttcacccgcgcggggagagcttcccgggaaggttccacggcggccgagggtttccgcgcccgggacgcgtttcggctgaggccgtgggtccagtccacgggttctgcccgcacggtccaatggccggggaggcggaggacttgcaccttcgagatcccctgtgtttacccagctggaggatgatgaacagtcgtgggtgcccagctgggtggactgtgactccagtcagcagagcagaagccaggagaggttttggtcttgatggtttgtgtagagtggaggatgagagagcccatcctgagcatctaaaagagctacagaagtcatccagcaccaggacactcatagtgagggggaaaccaagaaaggcacactgagcatgggggcagctttcccacctggttccagttgtgggcaacagcaatgaagtccatgttggcagaagaagctgttcaaatgcagtgactgtgggaagggtgtctttaaaggctttgcctccttgaccatctgattacgcattctaaagagaccttcaaatgcccaaagggaatgctcaagagttcggtcatttaacccga

SEQ ID NO: 360890 - DNA, 795 bp, Homo Sapiens
ctaaaccacattcggcttaggtagcgaggctgggtggtgaattcggcacgagggtcgtggcgtgaggggcgccgagcgaggggaggcgcgggccacgggagttccgggagttccggcgttgcccggcagtccgcagtcctcggcgggaaggctgtcccggcgcctcaggcagctctgcgtgggccggggtgacttcctcgcgatcccctgcgcgaggtgaagggcagggacctttgccgcgccttccacgcgccgtgccccaccggcgagtggctccatcttcctcagacttatcgctcgcggacaggcgccgtgggtctcccgggcctccgtaccgtcctccttcccagcggctccgggaagcggttccctgtcttcggacgcatttcacccgcgcggggagagcttcccgggaaggttccacggcggccgagggtttccgcgcccgggacgcgtttcggctgaggccgtgggtccagtccacgggttctgcccgcacggtccaatggccggggaggcggaggctcagttggacccatcattgcagggcttggtgatgtttgaggatgtgacggtatatttctccagggaggagtgggggctccttaagtgtgacccagaagggcctataccgggatgtgatgctggagaactttgcactcgtttagctcactggggacttgcatcttcgagatccctgtgtttcccagctggacgatgatggaccgtcgtggtgccgctggtggtggtgcccgtcacgagcaaaccggagagttggctgaggtgtcacggcga

SEQ ID NO: 360891 - DNA, 370 bp, Homo Sapiens
ccatttcctgcttcatgctgtgcccatttagtaaaacagaattggtcaccatgttcttagcattgcttttcagagatgtcatacgcaccgctgaagagctgagtaggtagctggttcctctctcttgataggacttcctcccacagcagagttggctgttgaaatgcctcctgaagctttcactgagtaggtaaagagcaaatgggttgacacaagaattgccaaaactgagaacccgggcaactaaggtgacaatcatgtggcctagagatggatcaatctcattatagttgaaagaccgatacatgtaaaggatgtggtttggaaaccaacagaagatgaaacagcccacaaaaacaagcacaatttt

SEQ ID NO: 360892 - DNA, 420 bp, Homo Sapiens
  misc_feature (371)..(371): n is a, c, g, or t
  misc_feature (388)..(388): n is a, c, g, or t
  misc_feature (394)..(394): n is a, c, g, or t
tggtttccaaaccacatcctttacatgtatcggtctttcaactataatgagattgatccatctctaggccacatgattgtcaccttagttgcccgggttctcagttttggcaattcttgtgtcaacccatttgctctttacctactcagtgaaagcttcaggaggcatttcaacagccaactctgctgtggggaggaagtcctatcaagagagagggaaccagctacctacttcaggctcttcagcgggtgcgttatggacatctctggaaaaggcaatgctaaggaacatgggtgaccaatttctgtttttactaaaagggggcacagcatggaaggcagggaaatgggcactgtggattttggggcccnttccaacttcactaccngggggngaggaacttaggttaactgtttaaaa

SEQ ID NO: 360893 - DNA, 1052 bp, Homo Sapiens
  misc_feature (808)..(808): n is a, c, g, or t
gggtccggaattcccgggatcgcacgcataacagccgtggtggttatggctggcctgagcggcgcgcagatccccgacggggagttcaccgcgctagtgtaccgcctcatccgcaatgcacgctacgccgaggcggtgcagctgctgggccgagaactgcagcggagccccaggagccgcgccggcctgtcgctgctaggctactgctactaccgcctgcaggagttcgcgctggcggccgagtgctatgagcagctgggccagctgaacccggaactggagcagtaccgcctgtaccaggcccaggccctatacaaggcctgcctttatgcggaggccacccgggtcgccttccttctcctggataaccccgcctaccacagccgggtcctccacctgcaagctgctatcaagtacagcgagggcgatctgccagggtccaggagcctggtagagcagctgccgagtagggaagggggagaggaaagtgggggcgagaatgagaccgatggccagatcaacctgggttgtttgctctacaaggagggacagtatgaagctgcatgctccaagttttttgccgccctgcaggcctcgggctaccagcctgacctttcctacaacctggctttggcctattacagcagccgacagtatgcctcagcactgaagcatatcgctgagattattgagcgtggcatccgccagcaccctgagctaggtgtgggcatgaccaccgagggcattgatgttcgcagtgttggcaacaacttagtcctccatcagactgctctgggggaagccttcnaccttaagcagccataggataccaacctgagaaactatgaagtagcctccagaaaccctcaccgaacatgccaccccagggcagaaggaaaaagttgggacccctgtgtaccctggcacaaccaggggacctaatggaaacatgggatgcccaggcccctacagaaaagggtttgggaaaagcttaccggtttttttccttcccaacaaaaaatcccccctttccctccacgaagaacttttga

SEQ ID NO: 360894 - DNA, 494 bp, Homo Sapiens
  misc_feature (63)..(72): n is a, c, g, or t
  misc_feature (110)..(110): n is a, c, g, or t
ggggctaggactggcacccctggcactcccagcccgggcaacggaaacaagacgttgtccttnnnnnnnnnnggttttccagaaaagaaaaattgaagtcctttgagtgnaaaacaacagatataccctataaactgtcctacaacgcaataacaatcctttacattgataaaaatctttcatgcaaattttcttatctgattctcaataaccccatgagctgtgtaaagcaagtaatgataagcccattttaaaggtgagaaaacaaacatactttaactctcaaagcatggaagtaataatgtcaaacctgggactgaagtctcaatttttagttcaaaactctacaatatcacacctcctcttgccaatgaaactgaaccagactatgaaatcatacagccataatattatgctaacgttactaagctttcctaaaccatccagtgtctatgcagaatgagaacaaattcagtttacccaagtcacaattt

SEQ ID NO: 360895 - DNA, 2530 bp, Homo Sapiens
agcgaggcctgggtggcgattcggcacgaggaccactggacgaggaggagacgccgtacctggtcaagctgcccgtggcccccgagcgcgtcacgctggccgacttcaagaacgtgctcagcaaccggcccgtgcacgcctacaaattcttctttaagtccatggaccaggacttcggggtggtgaaggaggagatctttgatgacaatgccaagcttccctgcttcaacggccgcgtggtctcctggctggtcctggctgagggtgctcactcggatgcggggtcccagggcacggacagccacacagacctgcccccgcctcttgagcggacaggcggcatcggggactcccggcccccctccttccacccgaatgtggccagcagccgtgacgggatggacaacgagacaggcacggagtccatggtcagtcaccggcgggagcgtgcccgacgccggaaccgcgaggaggccgcccggaccaatgggcacccaaggggagaccgacggcgggatgtgggggctgccccccagacagcgcgtccaccgccctcagcagcgagcttgagtccagcagctttgtggactcggacgaggatggcagcacgagcaggctcagcagctccacggagcagagcacctcatccagactcatccggaagcacaaacgccggcggaggaagcagcgccttcggcaggcggaccgggcctcctccttcagcagcataaccgactccaccatgtccctcaacatcgtcactgtcacgctcaacatggaaagacatcactttctgggcatcagcatcgtggggcagagcaacgaccgtggagacggcggcatctacattggctccatcatgaagggcggggctgtggccgctgacggccgcatcgagcccggcgacatgttgctgcaggtgaatgacgtgaactttgagaacatgagcaatgacgatgccgtgcgggtgctgcgggagatcgtttcccagacggggcccatcagcctcactgtggccaagtgctgggacccaacgccccgaagctacttcaccgtcccacgggctgacccggtgcggcccatcgaccccgccgcctggctgtcccacacggcggcactgacaggagccctgccccgctacgagctggaagaggcgccgctgacggtgaagagtgacatgagcgccgtcgtccgggtcatgcagctgccagactcgggactggagatccgcgaccgcatgtggctcaagatcaccatcgccaatgccgtcatcggggcggacgtggtggactggctgtacacacacgtggagggcttcaaggagcggcgggaggcccggaagtacgccagcagcttgctgaagcacggcttcctgcggcacacggtcaacaagatcaccttctccgagcagtgctactacgtcttcggggatctctgcagcaatctcgccaccctgaacctcaacagtggctccagtgggacttcggatcaggacacgctggccccgctgccccacccgggctgccccctggccctctgggtcagggctacccctaccagtacccgggaccccaccctgcttcccgcctgcctaccaggacccgggctttagctatggcagcggcagcaccgggagtcagcagagtgaagggagcaaaagcagtgggtccacccggatgcagccgccgggccccgggccgtgagaaggagcgtcgggcggcgggagctgggggcagtggcagtgaatcggatcacacggcaccgatgtggtggtgtgtggatgcagcttggctgaagatgctgtcctgtgcctgtgccatgctcatgcctgtgtgcatgcatgcccactgacagtcatgtgcctctgtgctacctgctccctggtggcttcccccctgtctcccacaacccattgatccaatgtgcctatacaagttggtgtgtgggtgtgcctacccagtgggtgaaccccacatgtcctgggcagcttgagctgcctgtaccccccgtgacattgactatgtgccagcccctgcacaagtacgcttcccatggaaacgcgctaatggcggaaaccccgtgcaggacgttcacttcgctgcgacatcgatgttgacctcgctgcgcgccatggcccccatgtcccctgccctgcacggctcgcgcggcagcttggcctgtgtccttgcccgctactgcacgacgctcggcgttggtgcgttgcgcttcgctggtgtgtgccacggacggggcaggtgcacggtgtgcggcgggcgcacgcgcctagggaccacccacgcatactgacccctggcacgcctgagcttgtctcacagactcctagacaagcacactagtgtctagacgcagaccgtgattatgcgagcgcgactccatcatcattgcgcacgtcagccgagacgccatcgggaccatccccaagcccttgttgtctggtggggatcccttcctgggattgaaggaagaaccccatcgaggctactcgcgcatagacccccacctcctgcac

SEQ ID NO: 360896 - DNA, 1105 bp, Homo Sapiens
  misc_feature (919)..(919): n is a, c, g, or t
  misc_feature (992)..(992): n is a, c, g, or t
ggtccggaattcccgggatggaagacgggggtgaaccctttgaagtgtcccctcctacttcttgctgcctcacggttgctgttgcagacccaggagtctctgaaggcttccgcggctttggggccggttgtgagatgccaggcagaggccgctgcccggactgcggctccacggagctggtggaagactcgcactattcgcagagccagctggtgtgctccgactgcggctgcgtggtcaccgagggggtccttaccactaccttcagcgacgagggcaatctccgagaggtaacatattcccgaagcacaggggaaaacgaacaagttagtcgcagccagcaacgaggtctccggcgagtgagagacctttgtcgagttctgcagttgccaccaacatttgaggataccgcggttgcctactaccaacaggcatatcggcactctggcatccgagcggccaggctgcaaaagaaggaggtgttggttgggtgctgcgtcttaatcacctgccgacagcataactggcccctaacaatgggggccatctgcacgctgttgtatgcagatttggatgtgttttctagcacttacatgcagatagtgaagctcctgggactggatgtgccatctctgtgcttggcagaactggtgaagacctattgcagcagcttcaaactgttccaagcttcaccttctgtgccagccaaatacgtggaagacaaagagaagatgctgtctcgaacaatgcagttggtggagctggcaaatgagacgtggctggtgaccgggaggcatcccttgcccgtcatcactgctgcgactttcctggcttggcagtcgctgcagcctgcagatcggctttcatgttcccttgcccgattttgtaaattggcaaatgtggacctgcccctaccggncgtcctcccgcctgcaagaactgcctggctggggctgcctgccggatggctgacccacctggccctggttacnaagttcttgagacttggacaaaccggtctgtgttggaagcaccatccggggaaccttttctccagcacccgcccagtaccgggtcccgcctctggccttttccggaatgggga

SEQ ID NO: 360897 - DNA, 848 bp, Homo Sapiens
  misc_feature (28)..(28): n is a, c, g, or t
  misc_feature (42)..(78): n is a, c, g, or t
tataccacgttgggcgcttggagctcancgcggtggcggcgnnnnnnnnnnnnnnnnnnnnnnnnnnnnnnnnnnnnnatcaggccaaatcggccgagctcgaattcgtcgagagcgggaagtgtcccctcctacttcttgctgcctcacggttgctgttgcagaccaggagtctctgaaggcttccgcggctttggggccggttgtgagatgccaggcagaggccgctgcccggactgcggctccacggagctggtggaagactcgcactattcgcagagccagctggcctggttacgagttctgagacttgacaaacggtctgtggtgaagcacatcggtgaccttctccagcaccgccagtcactggtccgctctgcctttcgggatgggacagcagaagtggagacccgactgcggctgcgtggtcaccgagggggtccttaccactaccttcagcgacgagggcaatctccgagaggtaacatattcccgaagcacaggggaaaacgaacaagttagtcgcagccagcaacgaggtctccggcgagtgagagacctttgtcgagttctgcagttgccaccaacatttgaggataccgcggttgcctactaccaacaggcatatcggcactctggcatccgagcggccaggctgcaaaagaaggaggtgtcggttgggtgctgcgtcttaatcacctgccgacagcataactggcccctaacaatgggggccatctgcacgctgttgtatgccgatttggactgtgttttctagcacttacatgcagatagtgaagctcctgggactggatgtgccatctctgtgcttggcagaactggtgaag

SEQ ID NO: 360898 - DNA, 428 bp, Homo Sapiens
  misc_feature (43)..(43): n is a, c, g, or t
  misc_feature (128)..(128): n is a, c, g, or t
tgtgaaagaggacaaggacgtccttggtggaaagcactgtctnatttacggtgaatctgttcatgtccctaaaggcctgtatgacagtggcccggtacctcaagcacggaatcaaagtgtcccgaaanaagttggtcaagctggacgggggccaaggtgggcctcaggtgcttcatgagcacgatgagaacataaaggaactcattgaccaggtgcagggcaagccgcttggcaggctcctgggagctaggctggcaaaggcgctggctctcccactccactaccttgtcccccaggttggtcacccacagtgtgtgtagcaaggagatcacattagacagcagcggagtctccagaaacttgctttcaaggatgtgtaaaatccatgttaaaaggctatagtctcgtatgatttcatacgcagatct

SEQ ID NO: 360899 - DNA, 919 bp, Homo Sapiens
  misc_feature (89)..(122): n is a, c, g, or t
tcagggaaataacactgcttgtggtctgtgcagaaatgtgtagaatacaacttttcacagagtgagagtttccagtttgttcaatttgnnnnnnnnnnnnnnnnnnnnnnnnnnnnnnnnnnatgcgtggatttaaagtttcctctttttctatttgttagaagcatcagtgactctcaccagcatgttgattcttcctgtaaatttgatagattgccttgttctgtcatatgaagccatgttttaaataacaattgggacatattattgaaaaactactacaggcaaaacacaagttgattgtctgtctccaacaatgctttcgatcatgaaatatctggttcagattattatgcctgaaaagtagagttttattggaatgactctggtatgagttcactatgatcgaatacagggaggcccagttgaactttccagagatgactgggaagcccgccgggtgaggggagtgagtgtgggatccaccagtgaggacggtgggaacaatttgtaccatccgatcaccatgctggacaggtcgagttcttccaacaagatctgagccacacccataaagcatttgtggtccattctgccatagtctccccagacaatcacctgaagaactttaccctgtggactttcatcaaaaaccagagactgctgatacaaaggatcaagggtttttcgtgcaattcttgtcttcttcttggctatacaggccccattttccaaaagatatactttgacatatggagcaggtgtagatttggaaccaggcttttgtgtgaggcttcgtgctctaatgacttccacttctaattggccctttttgtcctccattcctatttgtatatcacccattgcaggggtggcaagggtttggcggccaacaagctgggctggtcccaatcccgct

SEQ ID NO: 360900 - DNA, 487 bp, Homo Sapiens
  misc_feature (66)..(74): n is a, c, g, or t
  misc_feature (99)..(182): n is a, c, g, or t
  misc_feature (273)..(306): n is a, c, g, or t
ggtgcttttggaaaaaagaagggaagaatctctgttagcatcatgaggcctgtcatgacacagccnnnnnnnnnctagtggaaataacagatgtggtgnnnnnnnnnnnnnnnnnnnnnnnnnnnnnnnnnnnnnnnnnnnnnnnnnnnnnnnnnnnnnnnnnnnnnnnnnnnnnnnnnnnncatcagggaaataacactgcttgtggtctgtgcagaaatgtgtagaatacaacttttcacagagtgagagtttccagtttgttcaatttgnnnnnnnnnnnnnnnnnnnnnnnnnnnnnnnnnnatgcgtggatttaaagtttcctctttttctatttgttagaagcatcagtgactctcaccagcatgttgattcttcctgtaaatttgatagattgccttgttctgtcatatgaagccatgttttaaataacaattgggacatattattgaaaaactactacaggcaaaacacaagttgattg

SEQ ID NO: 360901 - DNA, 1464 bp, Homo Sapiens
  misc_feature (38)..(38): n is a, c, g, or t
  misc_feature (476)..(511): n is a, c, g, or t
aattcggcacgaggctaggaatggatttgagcctaagnacactttgagctatgcccaggcttctcagccatgcctcagtgtagacacatccatctgccctggaaagagcatggtatgagctgttcaatattccactggaaattccagttgaaatattctgcactaaactattgtttttattgaattttagtttacatttctttgagattgatgcaagcacaaagcttgattttttaatgcaaagtatcttactttttggggggaaaataaacaaaatgaactttcaatttgcattttcatttagtttctcttggccttgaatttcccttgtgacattctgtacatgtgctacaaactgcagtctctgcaggtgcattgatatgttctccctccttttatgagtcactccacttttgtgattacacaaatagagcagcatgacttggaactgttcagagctgcatgcacattttgtnnnnnnnnnnnnnnnnnnnnnnnnnnnnnnnnnnnnggttatttaataatgtatgttagttccacataggccagcttgtatgttgcatgtacttgtacagtttgcttgttaattactataccgaaataaccaagaaatctaagccatccacttttgttatagacattttgcaggttttagccagactcagtctctgggtctgtggtgaaatgtctatagatggactttattttttaccctccggaaaacgtgatgtagtacggaccaaattccttctaataaatattttggtgtagattcctactgtggggctgtaacacatgtagacactgtgtacacactaggttttaattcatagacatactgcctgcaccaagtgaattatttattattatttacacatgccagaattatctgcccatcattccacagggcacagattgaccactgctcaccatgctgagtaggaggaactgaagcattggtgcacttctactagattccgttctgtcttagtggccaaaaatcaactgattataattgggtagtatccttctattttgaccacttgtcttaacactcccctgtgcttttaaatgaaattccaattcatgtatgtaaacatgtttaataaaatttacttttcatgtcagtcagtagccatatgtgttctatgtcttgccagatttccattgtgggttctatggtgcaaaatgggagccaggccatgggaaggggaggctggggtttgttgtctgctgcgggcatttgacttgacttgtcactgcactatattatgtcttaatcgatggcccaaagggtactttgcatcacatacaagttttcacttcgtcagcctgtctaagtgagcacatgactatacttctgaaaagtggcattattaaaaataataaatctcagtaagaatcaaatggaaggttgttttctgctgctgtttgaatgtgctaataaaagagacaactctattg

SEQ ID NO: 360902 - DNA, 1062 bp, Homo Sapiens
aagcgaggcctgggtggcgaattctgcacgagggtattcctagtccttccccacaggatagtcacatccattatttacttttgttgtcagctgggaggggaaactgaagcctggacacgtctccccaagggctcagtgttcatgggtgtgtaagatccattgactggaccccagaaagcaccctgaggggcagtgcagagagagcccaggaagcccctccactagaggaggcccttggtctggctgaggaccacgtccaccctgggcctccaggcctgacttttcacattaaaggcggggcagtctcctctcaaaggagttctcccttgagcactttgggctctggggcagagttgggctaggagatctgggtgaatcctttagtcacagctagtctcatgttcctcttctgtcaaaggggtcatggccccagtgtgtcctacctcagagttgtcagggtcaaagtaacaggcactgggacaaatatgaagcctagctttgtgcttcctttcaaattcagggcctcctttctactccattccagcctttttttcctgtcagaatccctcaggaaggacctttatcttctggagtgagtggcagttccactgggttcagtgaaagagtcgcccatggggctctgttccccagggagtcctttgtattttggtgaacaaattcttaccaaagcatgagattcggactgtaggaagttcagactgcctcagttcagactgcctcatggggcagtctgggaggtcagctgggcttctggtgtcttcttcatcacaccactgcgggacgctgtctgttaaagcagccttggtgggggggactctgaaagctggagtgatggggaccccagcttatccttggttttttaccccctttgcctgggcactgtggacccccccttcaggggctggccttttgggggggtcttgggtcccctgggatggggcccatttcccttgcccctttctgccccccaaactttctttccaaagtcttgggaacaaagatggggggcccacaaccgcgaaaatttcgctggcaattatt

SEQ ID NO: 360903 - DNA, 380 bp, Homo Sapiens
  misc_feature (280)..(280): n is a, c, g, or t
ccacacaaaaaggccttgaaggaactcttggttctaggcacttgataataatccagtgatgaaaaggtctgggtccagagtgcgtgggtttggcgtgctgtttgtcacggtttggttcttgtgctgggcttggtgttgttcatatgccaccctgggctttggagagctccagttttgctgtttgtgctggattcactgaaatttcttagaggcttacatttaaggatcccacttactgcagtcactccttgtgctttattgcttttacaagtggtctcgnaaacccggtacttgagaataaacataacagtgcagtgatgctgtagcacttttaaaattcttctttgctctattttgtcagtgagctgatgagcaacctc

SEQ ID NO: 360904 - DNA, 307 bp, Homo Sapiens
  misc_feature (106)..(106): n is a, c, g, or t
  misc_feature (240)..(240): n is a, c, g, or t
cctaaccagggttaaggatcagtgtgtccgttgctagaatccagagcccacctgctgctctgaaaagcaggctcctgaggccagtgggggagcagtgccccccatngcccttcaccgaggagcctctgtgcctgtcccttgtcctcggccccaggagtctcctcaactgacactgaagtggtggaagcagttgagtgccaggtcatcccccatcaccacactggggcagcgtccccaggncttccagcagctcccagggtgggtcccaacgtgggaaggattaattaattctttctaaagcagttgc

SEQ ID NO: 360905 - DNA, 349 bp, Homo Sapiens
aggttaggacaatgaaagtcaccccatgctatatgctccatatttaacactcattctgccaataacacatgtcatggaaatagtccttatagctgggaacatgaaaatcctttgaaaaaggtttttaagtatgatgagcaatcattacaagggatgctttttccacgtaaacaaaagcctggatattttgttaagcgacatttccacatgaagaacacaacaaaaccaaacccatgttagagaatttcttctccctgctaaacacggggacttacaaaaaagggagggttgttcttactctgaatctagccattcctttgcccgaagagtctggggagtaacgttaaca

SEQ ID NO: 360906 - DNA, 659 bp, Homo Sapiens
tgagccactgcgcccggcctataatttttgatagatgattttggattattttccagagataaaattttaaatgtttccattatatcactgatttatttctgcaaattgaataaattcttaattttctgcatgcacataatacaaaaggtattttcatagttttggatttataccaaatgaaaaggactctcttgatgagcacctttaactgatttttctgttaaagttttaacaatttgttcttggaagtcagttcgtgaaggcaagtttgtcagtattttcacaaaactattcagctgaatccagaaagtgaaacagcaagaatttgcattgtaaaattgtgttataaaattggactttgaaatttcaaaaataagaaaaattttcatgtgtatttatactaaataccgttttaggaaactaggatcagggtgtttctgttggcgttggcattaactagctggatgtaaatttgaaaagccactcaagcagcttcctagtctagaaagtcagaggtttagattagatttccgacatcccttccatttctgacctgtagttcttgtctggaattctgctttgttataaactattgttcttaaggagttggttgttgatagcacatagtttcatttttgtaaaagattcccctgccgtaa

SEQ ID NO: 360907 - DNA, 375 bp, Homo Sapiens
gtgaaatcaaatgcaaaacttgcacggaatgtttaaggcaactcacataagtttctcatttatagtagttggcttagaataatgcctagaggagcggaggacagaaaccctcatttgcactaggggtatttcatgggagaagtccaactcgatcacgtttgcaatgaggagagtgagtcccagtgaggcttagagggaagggcctcttcttccactttgttgcacccgattttgtctagcagggagccttcatctaggaacacttgctgatttgctttgattagtcctacccacatacccatcatttgtgtcactggtgaagaaaccaggggcttttaaagggctcctttcgatttccagcttattcctccccaa

SEQ ID NO: 360908 - DNA, 570 bp, Homo Sapiens
  misc_feature (18)..(18): n is a, c, g, or t
  misc_feature (38)..(38): n is a, c, g, or t
ggcagagactgtctacgncaccatcaacgctgagacanaccggctggaggctcgcaagaaagccaagaacaagcagctgggccatgaggaagactacgccctgggaaaggactgcatcatgcatggctacatgtccaagatgggcaaccccttcctgacccagtggcagcggcggtacttctacctgttccccaaccgcctcgagtggcggggcgagggcgaggccccgcagcctgctgaccatggaggagatccagtcggtggaggagacgcagatcaaggagcgcaagtgcctgctcctcaagatccgcggtgggaaacagttcattttacagtgcgatagcgaccctgagctggtgcagtggaagaaggagctgcgcaacgactaccgcgaggcccagcagctggtgcagcggatgcccaagatgaagaacaagccgcgctcgcccgtggtggagctgagcaaggtgccgctggtccagcgcggcagtgccacacgcctactgcacccgcccacccgccttttataaacctctaatttattttgtcgaatttttattatttgttttc

SEQ ID NO: 360909 - DNA, 199 bp, Homo Sapiens
tactttgaaatgacaggagacttagagaaaagatgcaaaagccatagagggtccccagatacacttcacccagctaacctcttatgcagctacagcacaatgatcaaaactaagagattaacatccgcgtaaaaccaactacagattttcctcacatttcatccgtttgggtttgtctgatgttttttcacgatgagtg

SEQ ID NO: 360910 - DNA, 1075 bp, Homo Sapiens
  misc_feature (294)..(310): n is a, c, g, or t
agggttctgaaaggttgtcccagggtgttgcttttgggaaatttgggccacccataaaaagtgggaacccacttccccttggattggcaccctttgttggttttcgggaaaaggtttggaaaaattttttgtttagtgggcgtgagttgtgccccaaaaatctggggaaaaaaggcccggaattttttagaaaatttaaggggaagtcttgttttccccaagaaggccccaaaaaatggcccaggcctctgggagtttaggggtgttgcttgtgtccccacaaatccacccaannnnnnnnnnnnnnnnncttaactttggtccttgggaccccgctcggtttccccccaaaaaaatgtaaagggttgggttgcccaggggtttggggaaatccccggtgggggaaaattaattgcttgtggaaaggattgattataggatcccaaaagcctgggggggattggggctggctgggcaccttgacctttgtcccaaatgttggggtctggttagcaccaaatgctggactggcagatggtgctgagggtccagttccaaatacaaaggaggatcctgcagagttagatgtggttgtggctcccaaagcccgaaaccagaggtggtagtattattactgctggctcctggacccaaagacaaatggggtgacagctgtacctgtgctggatgtggttgctagtttgctatcttgagaaaatagcaaagactgagaggtgctggattcagcagtgttaccaaaggcagagctgctcacaggattgctggactgtccaaacacaaaggtagccacaggtggattggaggaagaggtggaactaccaaatatgccaccaccagcagaagtggctggtgtacttgaactagaggaactgttgttcaagaaactaaaaactggctttgctgcaccttgatcagctgtagtactagtttgagctccaaaggcaaaagtggcttttgctggctgttcagattccttctcagatggttttgtcatactaaaactaaatgtggactttgaagaattctcatctttggtttgctctgaattcccaaa

SEQ ID NO: 360911 - DNA, 360 bp, Homo Sapiens
  misc_feature (298)..(298): n is a, c, g, or t
agcacaaggagggagagatctttgctatggagcagtcctggagcaaagccccgtggcttccacccccagatatataccccataagtagtgctgagctccagcttagctgagccaagctcagtccttatctggtgttcagccagtgcacaggtataagcagaactacagagctgaatgtagcttccctgggatctcttctcctttctaaagcatttttcacacagttctgtacctcctacccaagttggggctgctttctgcctgctagcccacggctctgtgtactttcttttctggnttcaggtgcagacagaccctcagtaccttcctggacacagacacatattccctgggccaagg

SEQ ID NO: 360912 - DNA, 793 bp, Homo Sapiens
gttcaacatactgctcccagctggaggacgagaatagctcagctgggctggatattcctgggccaccctgcaccaaggccagtccagagcctgctaagcccaagcccggggctgagccggagccggagcccagcacagcctgcccacagaagcagaggcaccggccggcgagcgtgaggcgagccatgggcacggtgatcattgcaggggtctgtgtgcggcgtcgtctgcatcatgatggtggtggccgctgcctatggctgcatctacgcctccctcatggccaagtaccaccgggagctcaaaaagcgccagcccctgatgggggaccccgagggcgagcacgaggaccagaagcagatctcttctgtggcctgagcgcccatccccacccggccaggtaggaagggcggggagagcacacggcattgctcagccacagctcccaccttgacccggcgctggccactgcctccccgagtccaccctcctccccagcctccagcagacaagccacaccgggttctctccctgcactttcgaggctccctgaaagccaccgtgctggggggctcctgctgatgctcctggtctggggccagtaaatctttggcaacatgtgggggggatctcccgtaagctcttggccacagacaaagcacggaggtgtgtgcaagaggaggcttccggacttgggcatttcacctggtcgcccttcctgcccttggggtggccatagctggtgaactcttcctaccttgctggtccccactaactgcattgaggggacggg

SEQ ID NO: 360913 - DNA, 461 bp, Homo Sapiens
  misc_feature (368)..(368): n is a, c, g, or t
  misc_feature (413)..(413): n is a, c, g, or t
  misc_feature (440)..(440): n is a, c, g, or t
aaggtgggttaatcccagtaggagcaatccaatccaatctgggaaggagggagggaggaacatcgcaagaaccagcccttgttcctgttacaggaacagttacaggtgggtggtggatgtggtgtggggaatatgaggtatcctcgaccaaacctcggtgtcctgagcacaggggagagaagggcgtgccaccaagtgcgttgtagggtccaggccagtccctggggtgcccttgcaggtccgcggttcatcttccattcctgtgagcggccattgcatccctgccttggatcctgagtagatttgctcaggtcatccctgcctgggcaatcttcctcttgccccaggggaagccgggcctggcgttnggaggttacgggcctgcacaaacctaccagcagggccttcctttngggcagcgttggacctgggagcttgtnttttgggccaacagtgttttt

SEQ ID NO: 360914 - DNA, 577 bp, Homo Sapiens
  misc_feature (484)..(484): n is a, c, g, or t
  misc_feature (516)..(516): n is a, c, g, or t
atccgaaaacagacaggtgatcctcctgcaggtgcccgtgcgcccggccgtgctagagcgcgccctccaccccggcccccgaactgtgccttcgcttggagacccacaaagagagtgcgccctgcacgccccgaacccgagtccgcgctgggggagcctcgcccccgcccccaccgggtgaaagtgtcgtctccgcttctctcggtgtggcgtgacggtaaccccatactctccttttgactccttttggaacccccacttttacgttgtgtccctccgcctcccccatggcgcaacaggagtcagtctctttctgtacaagggagaaaagctgtacgcgtttgtctcgtggttgggaagcctcccctttggcggggagaaagctttttttcttgctagtattcgctgtgttcatgggtctagaaatgcggtctggtctcgcctcgcctaaccaatctctgctctctaatgtaatgtaggcgtnacgggttgttttgggtgaatctttgaggaatnaaatgcctttataatttcacaggctgtaaattgaaacttcccacaagattaagctttatta

SEQ ID NO: 360915 - DNA, 438 bp, Homo Sapiens
  misc_feature (15)..(15): n is a, c, g, or t
  misc_feature (39)..(39): n is a, c, g, or t
  misc_feature (50)..(50): n is a, c, g, or t
  misc_feature (55)..(55): n is a, c, g, or t
  misc_feature (198)..(198): n is a, c, g, or t
cccaaaaaaacaagnaaaaacccgcccgtgccccctggnaaaatccgccntcccnaagcccccgaaacgctggggtcctgtccttgtcctggaaacaaatggggcaacacccccggaaggaaggcgggggtcagggctgttcggccttggccccctgctggtcgctgtttcggggactcggggcggcccagtaacccnagcctgaggcggggctcagcagcgttgcatgtacgggcctcgtactgcctcatggaaaatctccggagccgccctccattgtgggttcctgagagtaggacacattgccatggttttgtgggaatcacgcgcccctgatggaacttttctgctgttgtgaagtacttttatccatttgcttctctgctgaccttgccaagttgttcgaggtggaattaaacacctcccagacaaaaaaaa

SEQ ID NO: 360916 - DNA, 478 bp, Homo Sapiens
  misc_feature (12)..(12): n is a, c, g, or t
  misc_feature (28)..(28): n is a, c, g, or t
  misc_feature (49)..(49): n is a, c, g, or t
attccttacacnggaagggcttctctcnactgtgtgtgacctcgtgttnagtgagggatgtgccatgcctaaaggacctcccacatagattacatcgatagggtttctctccagtgtgaattcgctggtgttgaacaagggaggagctgcgctggaaggctttcccacagagactacactgatagggtttctctccggtatgagcattctcatgctgaccaagagatgagctatgcctgaaggcctttccacatacattgcattcaaagggtttctccccagtgtgaattctctgatgctcagtaagctgtgtcttccagacaaaggttttcccacagtcggtacattcatggtgtttctttccaggataaattccttgatctgttccaattagggaaagctccctctcctatatgtgttttctcatgctttagtaagcgatgatctatgaataaaggcttttctacatgcatcacat

SEQ ID NO: 360917 - DNA, 1106 bp, Homo Sapiens
  misc_feature (41)..(75): n is a, c, g, or t
ttggccaggctactctcaaactcctgacctcaggtgatctnnnnnnnnnnnnnnnnnnnnnnnnnnnnnnnnnnngcctgagcaccccacccggcctattttcttaaaggggaacaaatgatcttgacaacatattattccataaaaccagtttagggcacaggccagttcctgattagaacacaggacctgtgggagggactatcagagatgcaaaaattacttcaagatgagtttattgttttcatttgtattgcaaaagttaggaagtcattttacaaattaaaaaaacatttttttcttggtagtctttaaaaattaggggattgaaaggatccaggatgggctttgtgtgtgtgtctcagattctcatttattagtgagcacacctgtgtatatatataaatcataaggagatcatcaagggaaaacattttgcatgtgtaaagcttcatgaagttctctttaaaaaataccaaagcttgtttatttctgataattaacctaagcccttatgaaaataaacaaaatgaagggattatgacaggtattaccaaaaacaccaaaaggaacaaaggggcctgcgttaaaacctaattgctaatgcttcacaactaggagagcatgccgtcttgatgtttaaaaaacccagggtctccacccttcctttgatttgtgcaattctgtcttccacagttccggagccttcagtgaggggtagctacatgccccatgcctgccctttctttccttctttgctcactttactatgggtgtattttaatcttgtataaaaatatgcatgaatgagtcatgcacatgtatacgttatgtatttgacaagtggtggtgaaacaaaatcaaaacagatttgatttgtgtttttgaaatgtcagtacattttgtgccactaacactgtgatgtataaaagagctgtttgaatgccttttaatgttgtgttttgtactctggaatcatatggaaaaagtttgatttgtaatttcaatacatattttaaatgtattgtgtcttacgtagtttgtccccccctttagcagggattcctttttaaagctattttggctggaatacaggtgacttttgt

SEQ ID NO: 360918 - DNA, 698 bp, Homo Sapiens
  misc_feature (71)..(71): n is a, c, g, or t
  misc_feature (104)..(104): n is a, c, g, or t
  misc_feature (110)..(110): n is a, c, g, or t
  misc_feature (132)..(132): n is a, c, g, or t
  misc_feature (432)..(455): n is a, c, g, or t
  misc_feature (479)..(584): n is a, c, g, or t
  misc_feature (624)..(624): n is a, c, g, or t
  misc_feature (666)..(666): n is a, c, g, or t
ggcatatggcatgtgttcactaagaggcctttaatcctggggagtaaggggcgaaggccctttagacaacnatggctgctgtactgccgcccagggtgggtggncagtanggactggccttagcccagtggncctgtggcttctctgaggcccttgagtaactgaccacatttggaggttttgctggaaatgcctgacctctcagtctggctctgctgtgtagtccatagcccagccagatgagcttgcagcctcataggaggtcagcaccttgcaaagatgcagtcaccatagatgtccacgtagcagagactgacttaggatctgagataaagcatcggattgcaggaataactgtccaaattagttcttcctcctcaactcataggagtagctgtggacagaggaaccaacatctgccacctctggcannnnnnnnnnnnnnnnnnnnnnnngagacggagtttcgcttttgtccnnnnnnnnnnnnnnnnnnnnnnnnnnnnnnnnnnnnnnnnnnnnnnnnnnnnnnnnnnnnnnnnnnnnnnnnnnnnnnnnnnnnnnnnnnnnnnnnnnnnnnnnnnggcacccaccaccttcacccagctaaatttttgtattttncagtaggagacggggttttcaccatgttgggccagggtactnttcaaaactcctgacctcaggtgatctgcctt

SEQ ID NO: 360919 - DNA, 632 bp, Homo Sapiens
  misc_feature (13)..(13): n is a, c, g, or t
  misc_feature (339)..(450): n is a, c, g, or t
  misc_feature (477)..(494): n is a, c, g, or t
aaaatttgcaaanactggccactgacatcgactatctgatcaacgtgatggatgcccctgggcctgcagccgtcccgcaccctcccagcacatcgtgacgctactgaagacccaggcctgaggactatagacaggtcagcaaaggcctgccccgttcgcccctgaccaccgtggccaccatgcggagtgtgaattactgaccccaccacacaccggaccaccaagagagccagggctgctgtttcgcgactcaccagcacagatttgctcagaaactctgcccaagattgggcagaagttactttaaaaagacttggttcagctggtcacgggtgtcannnnnnnnnnnnnnnnnnnnnnnnnnnnnnnnnnnnnnnnnnnnnnnnnnnnnnnnnnnnnnnnnnnnnnnnnnnnnnnnnnnnnnnnnnnnnnnnnnnnnnnnnnnnnnnnttaacagcagagcgagactctgtctcnnnnnnnnnnnnnnnnnngacttggttcatttgtataatcaaaaagagttgtaaattaaagatgtattatttatcagagaagactttttagataatttttttaaaggatcagatcttgaaaatggaataaataactactgtgaaatgcaaaaaaaa

SEQ ID NO: 360920 - DNA, 423 bp, Homo Sapiens
  misc_feature (162)..(174): n is a, c, g, or t
tttgctggtgaatacccctcaataacagagaaaaggcccttgaaagatggtctctgtgtcctgaagtctacctctatttcttcccattcttctgcttttgtttttcatttttagggcactgcatccccattgaaaattctaatcacaactgggcactcctcnnnnnnnnnnnnngccacacccagacacgcactccattttgccaatcatttcaacggtcagggacactcgggttgaccttttctggtctagtccctcgtcgccaagttgcagggaggctcactggggctcagatcggaagacattttcaccaagttaccctgagaaggtctgagatgagtgagaaggtgtctaaagtcttacatggggtcctggaagggctaatggcaaaggttgctcttatcacccccatccttgaaaatt

SEQ ID NO: 360921 - DNA, 275 bp, Homo Sapiens
  misc_feature (91)..(152): n is a, c, g, or t
ctttccaaagctgtgttcataaacgccaagccctgactgcttcttaatgcatgaaatctgtcaattcacttgttaattcatacatttcacnnnnnnnnnnnnnnnnnnnnnnnnnnnnnnnnnnnnnnnnnnnnnnnnnnnnnnnnnnnnnnaatattgacacagcacagcagcaatcaaggctgactttgctttgtccccagggagtgaccatttcttggggaggatatagacaaacaagtaaatatctaagtaaataagtctatactgtaagg

SEQ ID NO: 360922 - DNA, 479 bp, Homo Sapiens
aacctatatggccagaggtttagttctctatgtaaattatcaatcctctttttcttcatctttgccagcctgtcctatatcaaatcagttcagccgaatcacagccagaaagacccctgtgcctagaacagggcgcatgtttgcttaattcacctccagacccactcctcagcccagtcttgtttgcaagcacccctccctcactcagcatgtctgggttagctttgcaaccacagagtcactggaggcaaagagtgccttaggtagcaggaggtgaaaagtgttccctgggaatgtcttttccacctgatccccattcccgagcatccttgggtcacccatggcctgcctccagtgggtgcagagggtagctccttccagagggcccagggtgcttaatgacaggtcatgggcatcttgaagcctggggttggcttccagggaggcagaaggaaagttgagcaactgtgggctcctgc

SEQ ID NO: 360923 - DNA, 402 bp, Homo Sapiens
  misc_feature (12)..(12): n is a, c, g, or t
aaagcacggggncaaatccaaaaacggtcagaaataagtccattatcaatataatttgaagaagatttttagtagtactgtgaagttcgtgcttacctggatgagaagaataaatgacacggatacactcctgagaagacactcgttaaacattgcatcggagagctgcctttgataaatgtgctgttaaacacttgaatgaagagaatggtggcagaatgagtgagcaagcagattgccccagaggcccggtaataatcacgtgagggataatcagattcctgcgtattcagcatcttctctattcatgtggagtgaaagctggtttttatacaggagatacgtaaagtaggccccacaattattttttttaaaatacaaagggtccaccacattcctctt

SEQ ID NO: 360924 - DNA, 128 bp, Homo Sapiens
cccttcttgaaaagattgcttgagtgaggcactcagctaattgagaggtaagtttaaactaaaaattcacgaacgggaaaactgtggtataaaagggcgactgacactaatttgacatagaaaattac

SEQ ID NO: 360925 - DNA, 756 bp, Homo Sapiens
cagcacgtctcagattgccctacccaagttggtcctactttgttacttcatctgttgtcgcactcctttctctgcccatccctttctgtgcccttaaacccaaccctatgcctttcgtagctgtcatggtgcaatttgtcctggaacattcagatcatggtaatttagtgtatatgtgattttcaaatatgtaaacttcaacttccactttgtataaatttttaagtgtcagactatccattttacacttgctttatttttcattacctgtagctttgggcagatttgcaacagcaaattaatgtgtaaaattggattattactacaaaaccgtttagtcatatctatctaatcagatcttcttttgggaggatttgatgtaagttactgacaagcctcagcaaacccaaagatgttaacagtattttaagaagttgctgcagattcctttggccactgtatttgttaatttcttgcaatttgaaggtacgagtagaggtttaaagaaaaatcagtttttgttcttaaaaatgcatttaagttgtaaacgtctttttaagcctttgaagtgcctctgattctatgtaacttgttgcagactggtgttaatgagtatatgtaacagttttaaaaaaaagttggtattttataagcacagacaattctaatggtaacttttgtagtcttatgaatagacataaattgtaatttgggaacataaaaactactgaataaatcatgtggcctaatattgaa

SEQ ID NO: 360926 - DNA, 1199 bp, Homo Sapiens
  misc_feature (26)..(26): n is a, c, g, or t
  misc_feature (33)..(33): n is a, c, g, or t
  misc_feature (66)..(66): n is a, c, g, or t
  misc_feature (617)..(717): n is a, c, g, or t
  misc_feature (742)..(757): n is a, c, g, or t
  misc_feature (1002)..(1002): n is a, c, g, or t
  misc_feature (1125)..(1125): n is a, c, g, or t
  misc_feature (1142)..(1142): n is a, c, g, or t
ctaagacctgatataagggaattgtnaataccncctcagaacaatttccctccagcctacaggaanccgtggtgccccatataatttttaaagaacctgggcagtggagctcccatttggggcttcaccgtttccttcatatgccttctgattattgaagcattacttcagctagaggctcctgagggaaatgttcagaggaggttttatcaggattttaatttaaggtttcaaacaggggaagacaggaaattcaaagcgtgacgggataaaactcatgcctccctttgtccaggcttatcagaagtaatacatctgctctgaatagcatgaatgaatcaatgtgcagttttatcagatggcatcatggataaagatgataatgctgccttttctgtctctcaggctgtttccatggaaacctctagagccaaataaaagctaaccaatcatttagccaaagcttgccttggctcatagactggtatttctttaaggaaaattgtttttatatatttgactataagagcaaaggctcttgaacatatcctagattatggaacaccttttcccttcccttttctctggaaaaattaaattttttttctgtccactgnnnnnnnnnnnnnnnnnnnnnnnnnnnnnnnnnnnnnnnnnnnnnnnnnnnnnnnnnnnnnnnnnnnnnnnnnnnnnnnnnnnnnnnnnnnnnnnnnnnnngtgtgcaccacctttcctggctaannnnnnnnnnnnnnnngtagagatgggggtctcactttgttgcccaggctgaccttgtacttgtggcttcaaatgatcctcctgccttacctcccaaagtgttgagattacaggcatgagccactgtgcctggccaaaaaacattttaaatcccttgtctgggggtcagtcctctaaacatccctcagatttcagatagtacttttcaaccctgttcctaaacataggcaggttttgcagtaatcttttaggaatatagcnttgtcaaattaggagaatgggtttttaaccccacatgttcttcatagggaggacattatttatttaggaaccctaagggtaggacatgtttaaaaatccaaagtcctaaggaaacagaacttnggaaaatgggagggaanggttttttaaagtctgtaagtttggcaccattaccgtattggtaaccaaatggcatg

SEQ ID NO: 360927 - DNA, 505 bp, Homo Sapiens
  misc_feature (464)..(464): n is a, c, g, or t
acgagggcagattcattcattggatcaggctagggtcaaatactaggaaatcaccacatttgtcagagaagaatcgtgataaacaaaaaaggccagaataggtcaagaagggacaacagcaagagccagccagaccagcagtgttgatgaggaaccaaaaggttagagcattactagcacatcttgagacatagtttagaaagagcagacctgtgaaatggaactaactgcacagctcagagtcagcatggagacaggtaaaggaaggaaaatctggttcaagtaaatagatgcggacaagaaactcaagactatagccaggcaagtccctactatcacctcctctgtttctctttctaactctgaaatctctggcataacttaaagaggaaagcttccagaaatcctttgctctaatgtgggagaaagttccgggattctctgattttcctgttttcttaccntccttgtactttaagctttcagtattaaagtttaaggattt

SEQ ID NO: 360928 - DNA, 485 bp, Homo Sapiens
  misc_feature (14)..(14): n is a, c, g, or t
  misc_feature (343)..(343): n is a, c, g, or t
  misc_feature (370)..(370): n is a, c, g, or t
  misc_feature (435)..(435): n is a, c, g, or t
  misc_feature (452)..(452): n is a, c, g, or t
gcttagcacgaggnaccggcgagaacctggagcaactgctgtaccacctaaaggtctggtataacgcctaagcggaggccgagctgggccagggccgccagccgctcaggtggtagccacgccagagcggggtcgcctctgggcctctgtctgagcaaacctgggtgtgaattcggtggttttgaatgcataaagtgccttgtggacacgggggagttgtggtgcttctgggtctctgggccccgcctgctggcctgaaatgccctcatgttgggaagcattccgtgccccctaccccgcctgccctccgtatttccttgcacctgttcagccttgcaccgantgatgagccagtttgctcatttgtggntgattaacaaccctaataaggggtttgggggttgcccataaacggggttggccctgccgttggantcaggttttccgccatngaacgcttggatttttcggatgagtttaagcag

SEQ ID NO: 360929 - DNA, 417 bp, Homo Sapiens
caaataaaacctttaaaatccactgaaagtgcctgactagctgggtaatccagttaataccccatatccagccataagaatttccacttcccgaggtccttaggggaaaaaagcccggcgctgggctcattggggtaaagcattccttcctcacagctaatcaagcctgaatcccatccctctctacccccactctcctcccttcacttggagcttgccttctttttattaaaacaacaccagagataattatttttgtgtgatgattcgaagagatgaactgctctctaaagaactctagaaaggctaaagtttttctttacagttggtagctgaaaccagagctctaataacaatgtgttataagtaattcagaaaacaattaaaaataagtttttatctcaggaaagaaatgcc

SEQ ID NO: 360930 - DNA, 495 bp, Homo Sapiens
gaaactgtacaaatctgaaaagtctggaagaggattcattgataggctagatttgcataagcatcagatgattcatatgggacagaaaccatataattgtaaagaatgtgggaagagcttcaaatggtcctcatatcttttggtccatcaacgagtccacactggagaaaagccatacaaatgtgaggagtgtgggaaagggcctacattagtaagtcaggtcttgacttccaccatagaacccacacgggagagagatcttataactgtgataactgcgggaagagctttagacatgcttctagtattttgaatcataagaaactccactgccaaagaaagccattgaaatgtgaagactgtggaaagaggcttgtatgccggtcatactgtaaagaccaacaaagagaccacagtggagaaaacccatccaaatgtgaggactgtgggaagcgctacaagaggcgcttgaatctggatataattttatcatta

SEQ ID NO: 360931 - DNA, 532 bp, Homo Sapiens
ttccttgctagaatttcttccattgctttccagaaacaccagactggctgggttttcttccccctcaatggacacggcgctggctcctactgctccatagcccacctctgggccctagtcttttccattggaactaactctagaggtgacctcttccagcccaataactttaaagcccacctatttgcccataggtgtctccagccctggccttcctgtggaaggaccataatcacttggcagcccacaggatatatcaaaaatgagtcacaactcttgattccatccacctccaaaatccaggtattttccttaattctcattctttcacaactccacatatatccatatcctcattatctcaggacaacgtgaccatttcttgccacttcccaccacttccatgcctaccaaagaagcctatcttctctcaccaggaccactgaaaaagtcttgcaactgatttcccttgtcctcttcttgcctctctacagtcaattctctatacaacagtcagcagtaagatttgttt

SEQ ID NO: 360932 - DNA, 635 bp, Homo Sapiens
  misc_feature (51)..(51): n is a, c, g, or t
  misc_feature (255)..(255): n is a, c, g, or t
cgggaaacagtcccagagatgacgctgcctcatgcaggttaacagagttgnaggtcagggccgacgcctgaggctcaggacgctgatgggtgccttccctcgccaggggtgagcccccagccccgtcttccctcgccagggtgagcccctccccagccccgagtttggaggggccgtggctgccggggactcgcgtgaggagcttgctgtaaatacggagctctggagcaacagtggcctcacgccactggcatnctcgggcaggacctgccctctttttggaaacactttcgagatctttgcgtttgttcgtttccagccatttggtggagactctgagagcctgaacttagaagcccgccgagaggggaaatggcggcctccggggagcgggcagcctggccgcagagcgcgcgggacccagggccaccgtcctcccgagacagcggcagcagccgccactcaccgtgcggaattaaaaacggctctctggttgccacggcaaccagccgtctccccccagcgtcagtttgaatttgtgcagaccattcctagccaagattcaagccaacagattcgtgcttaccctgaggtgaagcctcgtttgagaaccaaataataaaattaacaaacct

SEQ ID NO: 360933 - DNA, 489 bp, Homo Sapiens
ttcaagttaccttctgttcaagttggctttggctatgcagtcagtggtttgctttcattatgcatttcctgaccttagtcctatccctggttccatttttatcatcccattactatctttcatcctctcatgtatgcctttttctttattttctgattccactcccacctctcaacccaaaattttgctgtaacctctttcagcagtatattttggtacctggtacagtcaacgtgctgagtgttagggttccattaaaggaaaaatatacattttacataatttcataaagaaagatttcttacagttaagtaaattaaacaggatatcatgtacataatgcatttgatttagaagttgagttttatgatgtttagaaactgtaacaataaggataaaagataattctagaaaaattcatacattcaaaaaatactattgtaataaaagtataaaatttctataataaagaggaagtaatgccacaaa

SEQ ID NO: 360934 - DNA, 438 bp, Homo Sapiens
  misc_feature (13)..(13): n is a, c, g, or t
  misc_feature (28)..(28): n is a, c, g, or t
  misc_feature (33)..(33): n is a, c, g, or t
  misc_feature (98)..(98): n is a, c, g, or t
cggaccccaaggncccaacccccgggtncccantttaaccacccccattacctacccttccaccccaccacatgtatggcccttttccttattttccngattccccactccccaccctctcaaccccaaaattttgcctgtaaccctccttccagcagtatattttggtacccggtacagtccaacgtgcctgagtgttagggttcccattaaaggaaaaatatacattttacataatttcataaagaaagatttcttacagttaagtaaattaaacaggatatcatgtacataatgcatttgatttagaagttgagttttatgatgtttagaaactgtaacaataaggataaaagataattctagaaaaattcatacattcaaaaaatactattgtaataaaagtataaaatttctataataaagagaaagtaatgc

SEQ ID NO: 360935 - DNA, 469 bp, Homo Sapiens
ggaagagtctcgtggtgagaaagacagaattcctagccaggaaaatgccccgtgcttgccccttggaggcaggtgctcaccacggcagggtctatctaggtgtttattaaggtgtctcaccacgtatcgcccggattcaccagagatgcagaggcggaggatacgttcctgtttacattgatacatagttacataggtgaagagctttacagtgaggaagcggctcacgcggccatgagggacccaggcaggagctgctgttgctgccccaggtgcgattccttcctcctcagggagggctcagctccccgctgcagccaggtgggcccaggcaggccttccttggcctaacagcgcaggacggccaagtgctggtcacggccatttgcatcttacaccaccccttttttcagcagcaacttccacgagttgcttcgatggggaaactgcagacagcagctttgccaag

SEQ ID NO: 360936 - DNA, 477 bp, Homo Sapiens
  misc_feature (336)..(336): n is a, c, g, or t
  misc_feature (460)..(460): n is a, c, g, or t
gctaaaagaaaagaagaggaaaagataactctgttataccaattactaggtatgtgaaagagaaaacaaccaacagtgtataagggcgacagaatcaaggctgggatatggaaggaggggaggaagagaggaagagagaacagaaaatatttttccaagttgtggttcttgatccaagatctgaaaatataaggtttaacttgccaaagtagggcaatggcttgccaatgggacaacggctgctttgtaaaaccatttgctctgagttcagataagtaaaaactatttctcctattttccttgactctctcatgcatgatctcgggttctctgtantttcccagttttgggtgtcaccacctatatccagttaggagtccacccgctattagtaaacaaccgacacaattacagtgattttaaataagtaaactctatttctgtatgtaataatagtccngttagtttcccgttatc

SEQ ID NO: 360937 - DNA, 410 bp, Homo Sapiens
ctgtagtacccgggtctgtagcagctgccctgacttaggccatgtaacttcaaagttcctctgtcacagaagcatagaatatttgccactggaaaaaaaatttagagctatattctttagcaccatggttttgaagatgaacaatctgagctctagaggggctaagagacctcccctcaagctcaccaaccttagtgatcacttccttcatctccctccactcagtagaatacattttccacaatagctcactgccatgggaccacggcatgggatcccaacagatggatctggtcatatgttagtgccaaaatgcagtttagcaaccatttactcacatacccttatactatgtgacaatcagcagaaggtcttagatatttttatattagcttaaaagaaaagtttgc

SEQ ID NO: 360938 - DNA, 516 bp, Homo Sapiens
ttccacttcctattcctattccctattttctattccctattcctatgcgaaattcctgctgaggtaagtaaccaaaaactgtaagaatgattaacaaaaaacgaaaacctaaaatgtgttgatgccttagcattatggaaatgatgtaaacacctttgaaaaggagtgaaagaagcctattggcttcactaaagatatacacaggcactaaactagaggggtgccttaccagaggtatcaggcttagtaacattctaggaatatttgaaggaatactgttatatatttaaagtataatattatatagaacaagtgtataaaaaactgtcccaaatactaacagagtataggtagagaaaaataaaggccagtgtcttctcagtatcatgttagtattatttcagacctcattaaagaataatatttaacgtgaagaacatgagtaataaatcaatatgaagaataaattctaaaattttaaacaatgaataatgacaatactttatttaaaaaaaa

SEQ ID NO: 360939 - DNA, 444 bp, Homo Sapiens
  misc_feature (351)..(351): n is a, c, g, or t
  misc_feature (414)..(414): n is a, c, g, or t
  misc_feature (422)..(422): n is a, c, g, or t
gggcaaacgtaccctttgagcttttcaatcttttcttgaaatcactcagtcattacttcctagagcaaatgctgcttcaggacccagcccagtctaatagggagtggacttcagtgctagctctaagaaatattcagctactgcatctagctataggagcaatttaatagttcttccttctggggctcttttaaaactaatattcaagatcttgagactagcagaacattatatagctggaggttttcaccttttagaggagacttcaagggatttgctcactcttattctgccagcacttttaggaaaagtatgatacttcatttcctggggcatcaagtaggggtagcntggccaaaacttgaaatcatcttgccagggggccagccatctctggggatgagcatggccagnatgttgcntgctccatacagggggcacggg

SEQ ID NO: 360940 - DNA, 389 bp, Homo Sapiens
  misc_feature (301)..(301): n is a, c, g, or t
  misc_feature (364)..(364): n is a, c, g, or t
gaactccttggtctcatttgccttcactttgcatttgtaagtgacctccattaacccccacttccatgcatattgacgagggatctagtctaagtaagaatgtcttttgcctgcgcgtggaggcacagtagaaatctcaaggctttacccagaagagcccagtcagggagaggtgtaaatgcaaaattgccaaatagcacaaacaatgaatgttttctggttgttatatagatgccaaaatagcactttggatatttgcaaagtgcttttatgcttttttaataattgtttagctgtttcntcacatcattgtgagttagatcagtatttttgacccgctgttctttgggggaggcctgggggnacagggagttttgccagggctgttc

SEQ ID NO: 360941 - DNA, 1638 bp, Homo Sapiens
  misc_feature (51)..(51): n is a, c, g, or t
tcaaatgaaccccaaagctttgaccagcaaagatatgaggttctgtctgancaccctccagcacgagtggttccgcgtgtccagtcagaagtcagccattccagccatggtgggggactacatagctgcttttgaggccatttccccagatgtcctccgctatgtcatcaacttggcagacggcaacggcaacacagccctccattacagcgtgtcccactccaacttcgagattgtgaagctgctgttagatgccgatgtgtgtaatgtggatcaccagaacaaggcaggctacacccccatcatgttggcggccctcgccgctgtggaagcagagaaggacatgcggattgtggaagaactcttcggctgtggggatgtgaatgccaaagctagtcaggcgggacagacggccctcatgctggcggtcagtcacggacggatagacatggtgaagggccttctggcctgtggggctgatgtcaacatccaggatgacgagggctccacggccctcatgtgtgccagcgagcacgggcacgtggagattgtcaagctgctgctggcccagcccggctgcaacggtcacctagaggacaacgatggcagcactgcgctctcaatcgccctggaagcaggacacaaggacatcgctgttcttctgtatgcccatgtcaactttgcaaaagcccagtctccgggcacccctaggcttggaaggaagacgtctcctggccccacccaccgaggttcatttgattgattgtatgcaaatagccctttatttacatgccactattaagctgctaattgttcctgttggggtgacagatactgaatgtatacgtattgtgcctgagctcaccagcaaacagaagcatcaagcccaggggtaaaggctgaagctttcacagtgcagagactgctagcctgggcacacgcacctcctttctggccgtcttctgtgtagggcacactttaacccagtctctgttgctgttgagtctctgctccgttttgtacagtcacagggaattctgatctgaaggggcaccttctgttcactcccacaaagtggtgtctggttctcactgagacgttttaagatttttccacaaatatttatatgtactaaatgtggaaccattagaaagttcttccaaaatctcattccagcatagttttggatttttcttttgtcttattttaaaataaggaagtcgagatgactttgatcattggtaacttgggcctgggccagacaaagtataaaacttacaaaagaatattctcatttggtcttaactaggtagatgtaatatatgactttttataaaaagggtatctatatgaacttgacacagtattttcagcttttgtattccatactaaagccatgaagaactacacgtaacatcatcatttgtattaattgcacaactccaatgctaaaggttggattgtgttagaggaatcggctctgtatttgcctctagagaaacacagtgttctctttgtatttatggattcctttttaccgtgtcacatttactttggtcctctatgtatttaaatgtttgaagtgccttagactcttgccatattttcaaaataaaattccattaagcccaaaaaaaa

SEQ ID NO: 360942 - DNA, 813 bp, Homo Sapiens
  misc_feature (717)..(717): n is a, c, g, or t
  misc_feature (763)..(763): n is a, c, g, or t
cagcaggcgccggggggacatggtactttacaagaggcagagagcctccctctgcagcacatcgtaggatcttgcttggaccatactccttgaagagctgaagaaataagagggcccagcaaggttaagtcaagtttccaagcctgttcaggaatatggggactgaaaggaaacggcaatgagagtctctgactgaagaagatgctctttgcaaactgcctgtaaattcctgtcccctgacagggatggtctggtagaagcatgaactgtggatgcaagaggcagcggggaggagtggaggaagacaggaccagcacatggaatataatctagctgctgggactggcatagtcgatggaggcggtggtccagtgtaaaatgatcagtgaatgtaaattcaatatgttttcatttgggggtgcagagtcgtggctaaaggaatgttcaaatgagtctaccatgagcaagggatcagaggtactagtggcactatctgttcattcatttttggtacaaccccagccagtcattgagaaggtacactgtgtaagaaaccatcactccagacttacccaaggtatttattgctagatctcaccaagcactgtcaaattcaaaggaggccctgtagtagaccctgggctgtccttacagggccaaaatgcagtgacttcagggagcctaataggcacccggtccctccaaaacatgccttcntaccaattcccattaacagaggacaggtgttcagtgggaaggggtngggtctcctgttccagaccaccccgggcccggaggcaggctggggggttt

SEQ ID NO: 360943 - DNA, 417 bp, Homo Sapiens
ggcggccggattgttgagcccaggagtttgagtgcaatcctgggtaacattttttagaggtgcccagttccccacctctaaaaaaaacaccaacaacaaaagaaatgatgcaacatgtaggcttacttaggaagtccagcattaatggcatagggcataaagctctattttttgttaaaaatacttcttatagagtaaaatttatttagaactgatgtccaaggacctatgcagatttatatgaatgttggaagctatagagattttgatatcatttggcttataaatccacaggaggagataatgtatggaaaacatttaaatcactgtcaattgcagagctgcctgtgatcttcttaggttatagccaagtcagcaacataattcctctaaataaaattacattgtgctcacacc

SEQ ID NO: 360944 - DNA, 880 bp, Homo Sapiens
ggaaagaatctcttcgctagtttcggcatccggagacagattcccagtcccccttgttgcctagttccacctagggttaacatgggatgtaccaggataaaatatatgtcagcccactgccatctcggataaaatgctccacccagggagcctgaacttggaggacttggccccttacagggaaaatctttgagtctcctgcaagctgtctgcttccaaggcctgaacagttgaccacgatgtcaaaggacggatgaagttcccacaggtcttctattcgccgagtgagtgtccagcctccacttccctttatccttttctccaaccacgggaggtaggcagggcattcacatttcagggttgtaaaagcctgaccaaacacatactgggggaatttcttcagctcagcctcagtcatctttcgaaatcccagaaccacgtcagcccagaatggcacttcttcagtcggagtgctctgaaatatctgccaacctgataccaaatgaacaccagcatctccagcttctgcagaattggcaattgcaaagaggtgattaaaggtttctctgaaccactgcttctgcgtgtgaatgggtgtatctggataagtgtgaggaataagcattccggctgccacatcactggtggtatctggagtaaacttgtctgaaatgatggtaacggagcatcggggcaccagtttggagatgcacacagccgtggagagccccaccacacctgccccgacaactgcaatccgtgctgtgtccatgagcctgtctctgaaaaagcagtcttggaagccaccaaaatctctggcaccaaaccttgtttcccagtgcctggctggtctcatgcccatcccgggaattccggaccg

SEQ ID NO: 360945 - DNA, 479 bp, Homo Sapiens
  misc_feature (18)..(18): n is a, c, g, or t
  misc_feature (28)..(28): n is a, c, g, or t
caaagggacgggatgaangttccccaangtcttcctattcgcccgaagtgagtgtccagcctcccacttccctttaatcccctgatacccaaatgaacaccagcatctcccagcttctgcagaattggcaattgcaaagaggtgattaaaggtttctctgaaccactgcttctgcgtgtgaatgggtgtatctggataagtgtgaggaataagcattccggctgccacatcactggtggtatctggagtaaacttgtctgaaatgatggtaacggagcatcggggcaccagtttggagatgcacacagccgtggagagccccaccacacctgccccgacaactgcaatccgtgctgtgtccatgagcctgtctctgaaaaagcagtcttggaagccaccaaaatctctggcaccaaaccttgtttcccagtgcctggctggtctcatgcccatccagggaattccggaccggtaccagc

SEQ ID NO: 360946 - DNA, 2035 bp, Homo Sapiens
gcacagtacaacatcctccagatgaatgctattccagcagcacaagttattttgaataaatatgtagaaagaattcagaattatgccccagctttcacaatgttgggttacttaaacgaacatctacaactgaaaaaggaagcagcaaatgcataccaaagggcaattttgttgttacagactgcagaagaccaagatacttacaatgttgcaataagaaattacggcagattgttatgttccactggtgaatatgataaagctatccaggcttttaagtcaacaccccttgaagtgttagaagacatcataggttttgcattggctttattcatgaaggggctttataaagagagcagcaaagcctatgaggagagccttgtctattgttgaatcggagcaagacaaagcccatatcttgacagctctggcaataactgaatataaacaaggaaaaacggatgtagccaagacattgctatttaaatgctctatcttaaaggaaccaaccacagaaagccttcaagccctgtgtgctctagggttggcaatgcaggatgctacactgtcaaaagcagcacttaatgagttactgaagcacatcaaacacaaagacagtaattatcagaggtgccttcttacatcagcgatttatgcactccaaggccgcagtgtggctgtgcaaaaacaaatatctaaagctgttcacagcaaccctggtgaccctgctctttggtctctgttgtctcgagttgttgcacagtatgctcaacgaaatgcaaagggaggtgttgtagcaggaaatgtggctcatattctggactcaaatcatggaaagaaggcattactgtacactgcggtaaatcagttggctatgggaagcagttcagcagaagatgaaaaaaatactgcactaaagaccattcagaaaggcagctctccctttctccaggtgatcctgctatctgggctgggctaatggcagcctgtcacgctgatgataaactggccttagtgaacaacactcagccaaagaggatagatttataccttggcactgttatctgctgtttcctgctccaattaaaaacgaaaaatcctttgaaaattacaaccagtccccttgaaaaggggcctctctcacaagctgtcactggtctaatagacacaggaagaatatctgaagctgaaactctctgcacaaagaatttaaaaagtaaccctgatcagccagccgttatcttacttttgagacaagttcagtgtaaaccactcctggagtcacaaaagccactcccagatgctgtacttgaagaactacaaaaaacagtcatgtccaactcaacctctgttccagcttggcagtggctggcacatgtgtatcaatcccaaggaatgatgagagctgcagagatgtgttacagaaagagtctacaattggcatcccaacggggcagttggagtgggaagctctcaagtctgttgagactagcactacttgcattaaaagtctgtatggctaacatttccaatgatcactggccatctttggttcaagaggctacaactgaggccttgaagctttgcttttgtccactggctgttcttttacaagctttgttacaattcaaacgcaaaatgggggcaagagagacacggcgtcttttggaaagagtggtatatcagcctgggtatcccaaatctattgcatcaactgcacgttggtacctactgagacacttatatgccaaagatgactatgagcttattgacgtgctggtaaacaatgccaaaactcatggagatacaagagcattggaactgaatcagagattgtcctcacaataacattggattattttatagtaaggaagcaaagaaaaagctgtaagaatgaagcaatgaatcaagacttctacccaaagcaacatttttttaaactatatttattccttttctaaaggaatctagagaagttgaagtttttaagttaggaatgcaattttctgttaactccaaacctgattttaatctg

SEQ ID NO: 360947 - DNA, 606 bp, Homo Sapiens
  misc_feature (15)..(15): n is a, c, g, or t
  misc_feature (62)..(62): n is a, c, g, or t
  misc_feature (67)..(67): n is a, c, g, or t
  misc_feature (123)..(123): n is a, c, g, or t
  misc_feature (157)..(157): n is a, c, g, or t
acccccaagccggtnaaacctagcaccactgccataaaaaccgtaggccctaacatccccangaacnacggcccacctggttccaaaagccctacaacgaggccctgaaaacttgccctttgnccccacgggctgtccctttaacaaccctttgttnacaatccaaaacgccaaaatgggggccaagaagaagaacacggcgtcctttgggaaaaaagtggtatatccagccccgggtatcccccaaatcctattgccatccaacctgccaccgttggtacccctactgagacaccttatatgcccaaagatgacctatgagccttattgaccgtgcctggtaaacaatgcccaaaactcatggagatacaagagcattggaactgaatccagagattgtcctcacaataacattggattattttatagtaaggaagcaaagaaaaagctgtaagaatgaagcaatgaatcaagacttctacccaaagcaacatttttttaaactatatttattccttttctaaaggaatctagagaagttgaagtttttaagttaggaatgcaattttctgttaactccaaacctgattttaatctgaaaaaaaa

SEQ ID NO: 360948 - DNA, 916 bp, Homo Sapiens
  misc_feature (43)..(44): n is a, c, g, or t
acctccatagcctgtctgcccggccctatgtggaaacagcatnngagtttcaagtcctttatgcctccacccagggatagccacttggaatccacatggcaattgtgaaacaagcaggaaatgcgtaattgtcagaattttgtggggaaaggactagggaataaggaaaacaaagatcttccttgtgttttagagctgtcagctagaggagcacctgcttgagtctgatgccatctaatggtcccagaagaaactgggttttgaacctagagttccatggactcttaggaattagactactactactactaagcattcactggtgcttactatgtgctattgctgtgccaagtatctgaaacctgtcttcttaccttatttttcaagataattctatgtggcaggtattactatctcaattctaagagtgagaaaatggagttttagaaacatttactaacttgcctgggtcacatagctaaggaagaggtggacttgcccagctttgcataaaactcctcaaaagagttgcctatactccctgactccacttatcttcctactatcctctttttaaaatatattatttatttatttaaataagcaatatatgaatgtggtttgaaattcaaaagacacaaagaagtatacagaggaaagcctcactctcaatccttctcaaggtttgctaattcctcttgcataggcaatccgttcttccagctttgtgtttatctttccagagaagtttactgtgtattaagcaaatatgtatatctttattcttgctcagtattttcgcaaacagcagctgtctaagttcactgttctgaactttattttttaaattaaaaatatatggctatgtagtattctattttatggaagttccatatttcatttatcctgtttcctt

SEQ ID NO: 360949 - DNA, 511 bp, Homo Sapiens
  misc_feature (11)..(11): n is a, c, g, or t
  misc_feature (25)..(25): n is a, c, g, or t
  misc_feature (42)..(42): n is a, c, g, or t
  misc_feature (56)..(56): n is a, c, g, or t
  misc_feature (77)..(77): n is a, c, g, or t
  misc_feature (82)..(82): n is a, c, g, or t
  misc_feature (112)..(112): n is a, c, g, or t
  misc_feature (166)..(166): n is a, c, g, or t
cccccccggcnaccctaaccaaggngggaaccaaaagggttntgggtccccaaaantccggtttaaccggggaatanaaccnacaattccattggaatttggtggtaatggntggaaatccatcccttggcattccccccgggataaaacccccaccctgattaanggtgtaattatccttttccgatgtccctgttagatttgatttgcctagtattttgtcaaggatttctgcattcaatacaattcagcatcacttcatgatgaaaatcctcaacaaactaggcatagaaagaacatacctcaacataataaaggtcttctatgacaaacccacagctaacagcatacttaatggggaaaagttgaaagcttttcctctaaggactggaacaagatgaggatgcccacttttaccactgttattcaacatagtactggaagtacccacagcgcagtcaggcaagagaaaaaaacaaaaggcatccaaattggaaaagtaggagtcagc

SEQ ID NO: 360950 - DNA, 426 bp, Homo Sapiens
  misc_feature (32)..(32): n is a, c, g, or t
  misc_feature (81)..(295): n is a, c, g, or t
  misc_feature (311)..(311): n is a, c, g, or t
  misc_feature (314)..(314): n is a, c, g, or t
cctcagtaattcgggatgttgtttaggaaaantgaagttcaaaaacaaaaataggtggcaaggcaacaagttgtcacgccnnnnnnnnnnnnnnnnnnnnnnnnnnnnnnnnnnnnnnnnnnnnnnnnnnnnnnnnnnnnnnnnnnnnnnnnnnnnnnnnnnnnnnnnnnnnnnnnnnnnnnnnnnnnnnnnnnnnnnnnnnnnnnnnnnnnnnnnnnnnnnnnnnnnnnnnnnnnnnnnnnnnnnnnnnnnnnnnnnnnnnnnnnnnnnnnnnnnnnnnnnnnnnnnnnnnnnntgtgccactccattcncantgcatgcagcctagctccgtctcaaaacaaacaaacaagaagcccagaataggtgcatgggcttaagatttcattactgtgccaaattacaaatctagttgaaaaattgagc

SEQ ID NO: 360951 - DNA, 517 bp, Homo Sapiens
  misc_feature (495)..(495): n is a, c, g, or t
ggataagatgtatctggcaggcttagctcaaaatataaagttactagctgacaaaatctgacactgttaggtgagtcagtattcatctcctgtccttctgaagtaagccttttagctgttgagtcctcagttctcagcttcagcaaaaagaccaaaggatggaatgaaatgaagattagtttgccactgactatccccgcagagtcttaggcatgttattgaggaagattgtcttatcgtggtggttcttttccgtgtctgagggcttccattagtactgctgggatcactttatttacatgctcagcacccacctatatggaatcaactcttcatattctttcagagtgtgtggattttgggggcatgtttttgtaactcttgccaactggcttccaaggagttaatctccagctttttattgtccccctgttcacaacaattacatccccctaactaattcatgactaaggaataatgtgggtttacattctnggatcgattcccacccccaccc

SEQ ID NO: 360952 - DNA, 423 bp, Homo Sapiens
  misc_feature (355)..(355): n is a, c, g, or t
  misc_feature (378)..(378): n is a, c, g, or t
  misc_feature (397)..(397): n is a, c, g, or t
ggtagccacacactggagctgtttcagcccctatttggtaacaacagtagagatcacttttttagcttaacgagggtcatctttctcaataatgtgtaaatagtcctaagggtgattatgtaataaatatatacccttcacatgttagtacataaaaacccattatatctttcctgagagaggatttaaataggcaggagagaattaatagtcatacttacccgggtagagtttttgacaatggcaatgtaagaaatgcacagtgttgaagattaggacaatgaactctaggaacattttgtctacggctcccccatacttcccatatctaaaatttgtggaaaagggttaaaantactatttacattttattttaantaatttttaaaagtatttntttttggtacggtttgagtgtcttcc

SEQ ID NO: 360953 - DNA, 1005 bp, Homo Sapiens
  misc_feature (39)..(39): n is a, c, g, or t
  misc_feature (135)..(145): n is a, c, g, or t
tcaacatcaaaaagcattcctcccaagcattcaatgcanctttaggtattatccagcattacaaaatagaatcctactttcatactcccaaatatgaaatgagaaattgttctgtgctctcccttgagaactgtnnnnnnnnnnntgcatggcagcttaggtaattaatattaaaacgtacccatgaaaatgaagactactacacctgctgcacacaaaggagccaccctgctgcaatcagtgctcccagaatattcgatttcctcttatgactgactttggtgcagtgtggaacgatcgtgggttcataaattaactgttgacattaactacagactaacaaatgatgattagacacagtaagttcaaaaattttacattttgctcctgtttggctgctaaagagcagcaatttaaatcgatataaaaacttctgacgacaaagcctgctatacagataaagtacataatcaaaaattaagcagcaattaaatttcttatttaaacttatctggtatagaatatttacacatttgggaagagagatctctgaaaccaccattctctttactcgcctcttgctgctctgcccaccccaccccctccaaatctaaatcaagtgccctgaacaaatacacctgtactttggctaagccggctagatgtgactccttcctacggtcttggtctggaagaaaagacataaagtctcagaagtcatttgcagccttcttttctgaacaacagtgtactgtagtcaatgaatctgtgctttcacagcaagcgggggaaaagggtcctcacacttcactccccaacctgaatggggcaagatcaaatgccatcagctcgttgcaccacaacaggccaccagagaaaagggaaagaaaacgatcaggacaaaggcagcagctatcaacaaaagtttcccaacaaaggaacctctcctccctaggttcccaaggaaataacactccctccttctctttctcttctttcttttct

SEQ ID NO: 360954 - DNA, 474 bp, Homo Sapiens
  misc_feature (18)..(18): n is a, c, g, or t
  misc_feature (146)..(154): n is a, c, g, or t
  misc_feature (432)..(432): n is a, c, g, or t
  misc_feature (450)..(450): n is a, c, g, or t
caagcttggcacgtgganccccataaaaatatcttaatgaatatcagtagtttctaactatttatattttgaggcttttttggagtctaattcagatttatttagaaacaagggtatcagcagttggtaagcaactgaatatttcnnnnnnnnncagactttatgtcataagccatctttagtctttgtctcttactgaacattaatgggacaactctctttgttgtatttttttatggttgtatacaggccacttaacgaagccttttcttgctgtcacttctctaagggtatgacttgagactcgctctgtaactgtgagtcagctggtttgaacttccacaaaaggaagcagagaaacaagtagagccagggctgctgaactcttacaacccagacatgccaagcctgggacatcttgcacttgggagnctcttgggtttacttccntataccttaagttccattacgtag

SEQ ID NO: 360955 - DNA, 1012 bp, Homo Sapiens
  misc_feature (562)..(866): n is a, c, g, or t
  misc_feature (904)..(939): n is a, c, g, or t
tgagcacggcacccagcccttaaatggcttttatgaggtaatgtgaaaggaaaatttgcctttaacctggaagtcaactttatagtaagctgaaattataaataactgatcatggaactattgcagatcacctttgagccaaaaatttggcctggattttggttatgcctactactatgtgcctctcatttgtatttatacctggaattggcattattaactccttttcactcctgcctagaaaacttaaagtgtcaccagacccaagggcggagtggtcctataaaacaaactcgtagcctgtctgaagactagctactagctccttggctgttttggcatattcatcttgattatagctcttggtctttcatcatattagggatgtttatgatgttattaaagaaaatcttgtcaaatgcagtctgttcctagttatctactatcagtcacctgttgtataattataacaatgtttggatttgtggattattattttagtatataacattggattttatgtatgttacctgaagaagagcaatatctgtaccacatattnnnnnnnnnnnnnnnnnnnnnnnnnnnnnnnnnnnnnnnnnnnnnnnnnnnnnnnnnnnnnnnnnnnnnnnnnnnnnnnnnnnnnnnnnnnnnnnnnnnnnnnnnnnnnnnnnnnnnnnnnnnnnnnnnnnnnnnnnnnnnnnnnnnnnnnnnnnnnnnnnnnnnnnnnnnnnnnnnnnnnnnnnnnnnnnnnnnnnnnnnnnnnnnnnnnnnnnnnnnnnnnnnnnnnnnnnnnnnnnnnnnnnnnnnnnnnnnnnnnnnnnnnnnnnnnnnnnnnnnnnnnnnnnnnnnnnnnnnnnnnnnnnggccgaattcccgggcatatgtccggcaccgtcgactnnnnnnnnnnnnnnnnnnnnnnnnnnnnnnnnnnnncgccgcttcctcgctcactagactcgctgcgctcgtcgttcgctcgtaacgctaggcctatatatgatcactt

SEQ ID NO: 360956 - DNA, 424 bp, Homo Sapiens
  misc_feature (237)..(237): n is a, c, g, or t
  misc_feature (293)..(293): n is a, c, g, or t
  misc_feature (329)..(329): n is a, c, g, or t
  misc_feature (352)..(352): n is a, c, g, or t
  misc_feature (375)..(375): n is a, c, g, or t
  misc_feature (383)..(383): n is a, c, g, or t
  misc_feature (398)..(398): n is a, c, g, or t
gcgcacccagcccttaaatggcttttatgaggtaatgtgaaaggaaaatttgcctttgacctggaagtcaactttatagtaagctgaaattataaataactgatcatggaactattgcagatcacctttgagccaaaaatttggcctggattttggttatgcctactactatgtgcctctcatttgtatttatacctgggaattggcattattaactccttttcactcctgcctagnaaaacttaaagtgtcaccagacccaagggcggagtgggtcctataaaaacaaactncgtaggcctgtctggaaggactaggctactaagctnccttgggctgtttttggggcatnatttcatctttggattattaggntcttgggncttttccaaccatanttagggggatgttttatggaaggtta

SEQ ID NO: 360957 - DNA, 509 bp, Homo Sapiens
  misc_feature (335)..(335): n is a, c, g, or t
  misc_feature (359)..(359): n is a, c, g, or t
  misc_feature (439)..(452): n is a, c, g, or t
  misc_feature (465)..(465): n is a, c, g, or t
gcccgcaccggcctgcccattccctgcaagaccttccccgcctgcaaccgcaatggaggtgacgcggcctgcacacacctgtccacagcggggctggctgggggatctcccggggtctagctgcacctgtcctgacttcctctcacctgttcacgtctgtccccagggccctaaatcctcataccacatctccacccctttttcccttctaatgaggcaggggcagcctgggaccattcaagggcaggggactgggaactaggggaggggtacctgaggcccctgcactcctcactcctccttcttccacctcagacttcacgggaggctaccgntgggggccttccgcttccacctgncggagtccggcagttcgtgctccacacaccccggccctgcagccagcccaggggattgccttgagccaggtgaggtttgnnnnnnnnnnnnnngttgaagggagcnagttggagaaggtttgaatatgcaaagaaaaggattaaaggggt

SEQ ID NO: 360958 - DNA, 398 bp, Homo Sapiens
  misc_feature (16)..(16): n is a, c, g, or t
  misc_feature (25)..(25): n is a, c, g, or t
  misc_feature (86)..(86): n is a, c, g, or t
aatacgagtggcagtnctcaagaantcctctaagaaggagacaatgagttgggacatagatgacagtgaagtaggtagcaccgganagatttccaagcctcatgcagggacagaaagagctcaacggagcaggcctgtggagacgatggacggagacaagagtacctgctaggcaatgaggtgggactggcaggaaggacactggaaagtcaggctgacacgagctagtttacgtactgccttttaaaccatgagaaggagtttgatttgtctaagagcaataaacagtcacaataggtttttaggtaggacagaaacaggaaccaatttaagtgttaaagaaatccctccagctgtcgtggggagaagaaatcaggaaaagagagcgcgagcggagc

SEQ ID NO: 360959 - DNA, 488 bp, Homo Sapiens
  misc_feature (300)..(342): n is a, c, g, or t
ttttacatgctttaatttacttcctttcttcttaaatatttgacttacttcaatatttattgcaagagtagagaattactaagttgaagattatgatttattttttctcccttgacaacaattgcttacatgtacaatgactggatttgctgggcatttgttgcttgttaataaaaggctaaataattatcttaaaacattttaataacttacattgtcaacaggaatatataaatatatctgtttcattgtaatttactagcactgggttttatcattttaatctgttttcttccaatnnnnnnnnnnnnnnnnnnnnnnnnnnnnnnnnnnnnnnnnnnnacatttataaagttgaccatttcttgaaactttttacaaatctttatatattccagagagtcgcatgttcataatgagcagggttaccttcatatattcatattaacttctctaataataaatataatactttttccatatataat

SEQ ID NO: 360960 - DNA, 463 bp, Homo Sapiens
  misc_feature (438)..(438): n is a, c, g, or t
  misc_feature (444)..(444): n is a, c, g, or t
ggacaatgtaacctgacagaaaggagaaatcaatacagctccatgaggtagctccatttgctatgtttctgtttctcagcccagactccggaagcactggcaagaatcttcaataggtttcaatgtggtggtccttcagctttttagagtctactgaccttatccagagctgcctgtacctcagcttcactttctgtgtccaatgctgacgtggcctcatccagcagaaggatcttggggttgcgaaccagggcacgtgcaatggcgatcctctgcttctgcccaccactcagctgggcccctctctctccaaccagggtgtcaaatttctaacacagaaaacatggatcagctcttggaagtaacttaaatttaaaaaggctagggaattctattaggaactacattaaaggacaacatgggagctttgtttttaantttttnatgtattcttaaagtatgg

SEQ ID NO: 360961 - DNA, 417 bp, Homo Sapiens
taaatcccaccaattttaaggattatcccggggtccaaatttcacattcatattcaatttcctcaaaaatatttattgccatgaaaaagaattaaataatggcatttgcagttaccctggatggaattggagaccattattcctaagtaaagtaaccccaggaatggaaaatcaaacattgtatgctctcactcataagtgggagctaagctacaaggatgcaaagtcgtaagaatgatgcaatggactttggaaactcggtgggaaagggtgggaggggggtgagggataaaggactacaaactgggtacagtgtatactactcaggtgatggatgcaccaaaatctaagaaatcaacactaaagaatttattcatgtaatcaaacaccacctgttccccaaaaacctatgggaat

SEQ ID NO: 360962 - DNA, 472 bp, Homo Sapiens
  misc_feature (65)..(65): n is a, c, g, or t
  misc_feature (450)..(450): n is a, c, g, or t
caaagccaaaaccgaaaggaagttaaatgtgtggtgctcctcccacaaaggtaattttggttttntcctaaaatagtccacatttaacaagataaattaataatggctgaattccaaaagtttgctagcatcctagtcaggttggcccagatatttctcctctgaaactcagttgaaaccagaggctagctctagtctcttctgttgagttgctagtcatctaaatacatccatgcatcttgttcagttctcccatttggcttaactagtgcaaacctctgtgatttcgcagaattcaatctgttatgaagtcaccagaacacagaactccttacttggtgtggcattaggacctggtctgatgtatttctccagttttatctgtcacagtaactctaagcactccactctgaaaccaaacaaaaattctttctattccctaaacaagtnctgacatttgtgctctacatat

SEQ ID NO: 360963 - DNA, 466 bp, Homo Sapiens
  misc_feature (41)..(41): n is a, c, g, or t
  misc_feature (54)..(54): n is a, c, g, or t
  misc_feature (67)..(67): n is a, c, g, or t
  misc_feature (210)..(316): n is a, c, g, or t
tcaattctctcacctacctaaaacttccccggaaaaaaaantctgcaaacacanacctaagggtagnaggtgaaaaaatgctggcctgcttgcgtcacttgggaagaaatcgtagtccctggatttggagcctgggtagggttaactagttactagttagcttcagttttgtttcttcaagaatgatggccggatgtggtggctaacacnnnnnnnnnnnnnnnnnnnnnnnnnnnnnnnnnnnnnnnnnnnnnnnnnnnnnnnnnnnnnnnnnnnnnnnnnnnnnnnnnnnnnnnnnnnnnnnnnnnnnnnnnnntttgaaagattggctgagtgtggtcacacatgcctgtggtcccaactgtttgggaggctgaggagagagaatcgcttgagtccgggagtttgaggctgcagtgagctataatcttgtactgtactctattctgggtgagatcctgtcttt

SEQ ID NO: 360964 - DNA, 475 bp, Homo Sapiens
  misc_feature (244)..(256): n is a, c, g, or t
  misc_feature (332)..(332): n is a, c, g, or t
  misc_feature (462)..(462): n is a, c, g, or t
ggtacagaaagctttaatgtctccccatgacctttatggcaaaaaccaaattccctcgaccagtctttggattactacacaatacattgtcaaagaaaatagcctggaatggtgaacagagcctgaggctcagttgggagtcctgacttctcatcagctgtgcatgagcaaatttggaggtgttccttaacttgtaaaatcgatttggatttttggtattttaagcatgatttcctttagttcnnnnnnnnnnnnnccagagtgctagaattcagtctttaagttctttgaacatatttataatagctgctttgctgtcttgtctactaagntctgacatctgggccttcaagggacaatttctgctgcctgcttttcccttctttctgtgtgtcatacttttctgtttatttggcatgccccatggattttgtgttgtaaaccgggcattttaggataggnattttgtaggcat

SEQ ID NO: 360965 - DNA, 350 bp, Homo Sapiens
  misc_feature (136)..(136): n is a, c, g, or t
  misc_feature (147)..(147): n is a, c, g, or t
  misc_feature (277)..(277): n is a, c, g, or t
  misc_feature (319)..(319): n is a, c, g, or t
  misc_feature (330)..(330): n is a, c, g, or t
taaggttcaagtaattatcccacctcagcctcccgggtagctggcactatagctcctggctccagtttctacttctaatcctaccttggagcaaagaaagtaggagacgaggccggggacagtgggctcccagcantttggggaggnctgagggcaggtgggatcactgggaggttcagaagtttcgaggaccaggcccgggttaacgtgggcgaaacccaatcttcttacttaaaaattataaaaattagtgggccaggggatgctggcttcacgnctgttaatcccagcacgtttgcgagggccgaggcgagaagtntcacatgaggncaggggatttcgagagcagc

SEQ ID NO: 360966 - DNA, 507 bp, Homo Sapiens
  misc_feature (24)..(24): n is a, c, g, or t
ggtaggccaaaccaaagaagcccnccccaaccctgtcaggcagaagtacctatatggagaacagctattgcccttatgccctcagtttgtaaagagtatataaaagaaaaaattagccttcatcctaagataattttaaagtgtctgttaccgaaccatttaagccttaaaatttttaggttctcatggcaaacctaaatcatcgcactgcgcatattgtatataaagtgcatatttagaggcttaactagtaaactcaaaatgtgacatatgtgcaatgtgggcgacaacattattctgggaaccttaactttaaaatcttccacattttattctgcagccccaaagatgatataatagagtcaactatgcagaagatccaagttcaaggaagaagaggtacaaagaacataaatagaagcaaagacatgaaagacaagaagaaaattcaggctatcaggaaaaaattctggacatggctctctcccactgtgaatcaacctgtac

SEQ ID NO: 360967 - DNA, 305 bp, Homo Sapiens
ccaaaacccctgaatcctcctttaatggcctaatgtttttgggatttaatcacttgtgtaagtgctgggttgccagtgatagtggtctgctgtgtatttgagggactccatctcaggattctgacatatacttgcccccacctgtacaccacatgcccaaactggcatgcccaaactagcacccattcagagctgcagcagcattaacaattcagttgggcaggccagagagttaagatcagttcagctgcaaatgatggggggaagatcccaaaaactaaatagagactgggtgcggtggttca

SEQ ID NO: 360968 - DNA, 449 bp, Homo Sapiens
gctttcattattttcctcgggccttactgagcttgtgagcacagtggatataaatgcacgtcctctggctgtaaggaatgtgttgaaacctttcgctctgcctaataccttaatattcagctgtgatctcacaagtgtgaaaaatcttatgaatgtaaaatgtgtggagattcttctttgtttttagcttccactttgggaacatgtcaaagcacacattgagaagtcccatgagtgaaagagatgttggaaagcccttgaacttggtcgttaggaaacatccacactgaagaggaacctgactgtatggaaggtcaaaaaggctgtattaatttacatgcaaaaagtcacactagaggaatgccatatcagaatgcttttggtaaatatacatgttttaaagaggttatatatcattaataaaaatatctagctggtctgaaaaaaaa

SEQ ID NO: 360969 - DNA, 410 bp, Homo Sapiens
  misc_feature (15)..(15): n is a, c, g, or t
  misc_feature (53)..(53): n is a, c, g, or t
tgaaaacccacccanaaggaaatctttaaaaaatcatcaggagttaatcccanaaaaccttggaaaatacatggccctgtggctgtgggctccgaaaatgggcgcaataaaacttggttcaatgttcccaaagggctgtcctcctgcaacccagtggctcctctggtgcccacacccttgccaccctgctgttccgctgaggtggtggggacccatggtctgtggaactgggaaacaggaacactgactcatgggtggacaggcctgcagcccagcacaggaaggaggggtgaccactgggaagggtgggctgagggccctgtggcagccggctgcttgagacgtgccgccgtgccaaaccttccctaacttcttctgatgtgtctccattaaaacgcccttcatttagg

SEQ ID NO: 360970 - DNA, 976 bp, Homo Sapiens
  misc_feature (573)..(581): n is a, c, g, or t
  misc_feature (618)..(648): n is a, c, g, or t
  misc_feature (676)..(687): n is a, c, g, or t
  misc_feature (689)..(698): n is a, c, g, or t
  misc_feature (710)..(748): n is a, c, g, or t
  misc_feature (795)..(869): n is a, c, g, or t
  misc_feature (908)..(916): n is a, c, g, or t
gcggccgctaccccgaccactcggtggacaggagagaaggttcaaggtcaatgatgggagaacgagaaggacagcattacccagaacgccatggaggaccagagcgccacggccgggactcccgcgatggctgggggggctatggctctgacaagaggatgagcgagggccgggggctgcctcctccccccaggggcagacgtgactggggggaccatggccgaagagaggatgaccggtcatggcagggcacggccgacgggggcatgatggacagggatcacaagaggtggcaaggtggcgagagaagcatgtccggtcactccgggcctggccacatgatgaaccgaggaggaatgtcagggcgcggcacctttgccccaggcggggcctcccggggccaccccatcccacacggtggcatgcagggcgggtttggaggccagagccgggggagcaggcccagcgatgcccgcttcactcgccgctactgagtacttggaatcctgtgtcctgtctcgtggcaacaaggctatgttctgttaggagttaccttaaactgtgtaaaaatannnnnnnnnaatctgctgccatattgtagctcaatacaatgtgaannnnnnnnnnnnnnnnnnnnnnnnnnnnnnngtaataaatgtgtttccgttcacataannnnnnnnnnnnannnnnnnnnnaaactcggagcnnnnnnnnnnnnnnnnnnnnnnnnnnnnnnnnnnnnnnncatggtcatagctgtttcctgacccagctttcttgtacaaagtggtnnnnnnnnnnnnnnnnnnnnnnnnnnnnnnnnnnnnnnnnnnnnnnnnnnnnnnnnnnnnnnnnnnnnnnnnnnntgcagtacccggaaattaaacccgcctaatgagcggccnnnnnnnnngtgatccaaaagaatcttcctggaaatccttttttttctgccaggaatcctgctgcttgc

SEQ ID NO: 360971 - DNA, 1249 bp, Homo Sapiens
  misc_feature (232)..(241): n is a, c, g, or t
  misc_feature (421)..(422): n is a, c, g, or t
gggtccggaattcccgggatcgtcggccgtgccctgccatgaccggtcatcctctcttcggccatggtccccccagtcacgtctgccccttgaaagagagacatctctgatttggattgcccccatctctggctcttgtgctaataactgtggcggcttctggagagtgaatccctctgtgtttcccaccctgtgcccacatcccagcgacttgcgggcccccttgtgggcnnnnnnnnnntcaggtactgtcgggtgtgggacacaaacctggggggaggaggcagcccccggccctcgctcatcctcttgtcagagccatagcccccccaaccatcgcggaagtcccggccgtggcgctctggtcctccatggcgttctgggtaatgctggacatcacagacccagaagggaaaaaaannagcttcagtgtcagcgccaagaccccaaggcttttcaggcaacatgctaacgatgacaacgacagtcactcgggacagaagtgctggcaggctgtatcggttcacacaacacagctgccttcctgaaatctgcagaccagaggccctgtgccctaggctcatggcctggtacaaaaaaggtactagtaccaaggcatctccaaggcaggtccccacagcaccaccagagctgggagggccaccaggagtcacccactaaagatgatgcttacaagagagattccctgggtcccacagctcaaatggttagttcccagagccaacagtattctcttactgtcttctactaaagaaaggtcaggtttataaacctttaatgtgtgcatattctggaaataatttttacaaatttcttccttccacagtgaaggaagtatcaaatggagcccttcatccgaccaattgctaggcaagcatccttcctcacagtcaagtttctcggaagtttctgctggatgcccagtccagggtcttgcaccttgctctgctcaggatataagacacaggacactgagagataaacggctggccttccacttggctagtcccacctttccctcttctgtgtcattgtttttgtaagccacgtggctaacacagacccaggagttcttgaccctgctgtttcagggaagaccaagagagggcgagtcacactctatgcctacttatttgatggccaaggttaatatttacacccacagcctatttctgtggctggaagcactttccagcctgactttcacaaaagctagtgaggtagcttt

SEQ ID NO: 360972 - DNA, 1020 bp, Homo Sapiens
  misc_feature (760)..(878): n is a, c, g, or t
tcttgctcacatccatctactgtttcaatccacctcctaccataacttgccaagtgcctatgcaaaccagcttttaggtcccaattcggggcctgctggagttccggcctgggcaccagcatttggcagcacgcaggcggggcagtatgtcgatggactggggagacacaggtgtctgcctagatccacgtgtggcccccgtcctgtcaatgatggaaggtttgcggatgaggccatgtgcgcctgaactgagaagccagccctccgtcttcccagcggttcctgtgcagatgctgctgaagagaggtgccggggaggggcagagaggaagtggtctgtctgttaccataagtctgattctctttaactgtgtgaccagcggaaacaggtgtgtgtgaactgggcacagattgaagaatctgcccctgttgaggtgggtgggcctgactgttgccccccagggtcctaaaacttggatggacttgtatagtgagagaggaggcctggaccgagatgtgagtcctgttgaagacttcctctctaccccccaccttggtccctctcagatacccagtggaattccaacttgaaggattgcatcctgctggggctgaacatgcctgccaaagacgtgtccgacctacgttcctggccccctcgttcagagactgcccttctcacgggctctatgcctgcactgggaaggaaacaaatgtgtataaactgctgtcaataaatgacacccagaccttccggctcnnnnnnnnnnnnnnnnnnnnnnnnnnnnnnnnnnnnnnnnnnnnnnnnnnnnnnnnnnnnnnnnnnnnnnnnnnnnnnnnnnnnnnnnnnnnnnnnnnnnnnnnnnnnnnnnnnnnnnnctttgctcgcccgccccgcggcccccaaaaaattttttaaaacaccttctttttgggcgcccgggccccaataaggaaaggaacctgggcaaaacctggttcccaagaaaacccgggcaaggaaaagggttggaatcccccc

SEQ ID NO: 360973 - DNA, 1203 bp, Homo Sapiens
gtttttattaaaactatgcttttgcttgcctaaatcttttgatcttatatttctctcatctcagagcctgtcctgagttgtaaggtatttcatactgccttacttaaaagttttttaaactactagagtcatttgatacacacagaagttacctaataatccaaagatgtccatcaagggaggaagggtgggtcatcagactttgcctttgatgttgtagactaggctcctgagttaagcagcagagggacagcagtgccatgtgccttcactgtgtcccagggaaatctgggttggttccagtgggaaataccagtatttcttggttctgggaaagtaggcaaaagagtagggagatgggggaaataggggatgggggagagcaagcccccgcatgtccatggggagtcaggtggggagcacgggtggaagggccggctgttgacagacagactaagctgtgtggtgctcttgccgccccttcctgggtacagagcttgagaaaaatgcagccgaccactccctgtgtttgtacagagcaaagcccaaaagccaacctcagatctcctgatttggcagctgaagaaatcagcagagtcctgattgcctgattcagtcccaaaaatgaatgtcaggccccgccccctccccaccaacattgcctctcctacattctccttctgcccctaaatcagacaggaggccagagaggagtattgctcaatgcgtgctatgtgcaactcctcaggccttgtgccacctccatgctgagccctgaagcagggtgtcctgggtgcctgtgtgtcagctccctcctctctacctacctctgaccttcttgtgggtgagggtggccatgcttatggccatcttaaaactggagaggcagagaactacttatgagtctgtagaccacgtgttgtcttccatggcctgtttctcctgctgtctgggtgagtgagcctgcaacgcaatgcccatgagagtaaatgcctcctgacctaccctgctcagcactgttctagtgtcttggccttgaaagaaaagcctgacttcctgctgacacatgtggtaggggcatggcagctatgaggcacctcctacgtctgttttctggctgtggtgacttgggatttttaaccttatatatctttttcctttactcaaaacaaaacaatttttagcacactgaacaaaaaacgc

SEQ ID NO: 360974 - DNA, 801 bp, Homo Sapiens
  misc_feature (431)..(451): n is a, c, g, or t
acctggctgcatagtgttttaaatgtttgtgtgaagaatgagtttgtggaacaatgtgatttgctgtggcctctatgcctaatgagctagtgtttctggcagctctctctacccaactttgcacttgtagttttgagtctttgtctctctggaatatgaacaggtttataaaacattccatggtgaacaattctgtcggctgcattatagccatgagtgaatagacagcattggctggtccaagctctgttattgagtatacaaggaactgatttttcttatgttagcactaagggcaaaaaccaatatttataatgtaagcactatccaggtaaaacactggcccaagatttggtaaagagatttcattgcaatgtaataactacagttttttacaaattggaacagctttggtgtgtcgcaatcaaggnnnnnnnnnnnnnnnnnnnnncaaataagccatctgattgtggtgactggggcccatgtccaagacaattcctggcatattctgtcacccctcccgtggggcgatcactgtgtggggaccccattccccagttaaagtgtgtctctgtaccttacaacagcgattcaggacccaagtgtgaacaacactcagcccgccctctggagcgtgtgctgtctttagggccctacccaaagtcactgtaacagttaagtgtgtcattaacctttctgtctctttgcgccataaaaaaatgctcaaagttttagatgtagccactgtatgttgtacaaacgttggcgacatgtaaaataaaagtcataaaatgctaa

SEQ ID NO: 360975 - DNA, 631 bp, Homo Sapiens
  misc_feature (201)..(214): n is a, c, g, or t
  misc_feature (233)..(471): n is a, c, g, or t
  misc_feature (478)..(478): n is a, c, g, or t
  misc_feature (523)..(523): n is a, c, g, or t
  misc_feature (563)..(563): n is a, c, g, or t
  misc_feature (614)..(614): n is a, c, g, or t
gtgaagttcatctcaaaatggagaccatgaccagagtttccagatgatacacgttcttttcagcttcattaaataggcaactatgtttctaaatagtaaagtttcaaaatattctctcaatttaaaatttcatcctcttgaaaatctttgtcctttacaaaattatcttaataagttctatatggtcagcttcatcttccnnnnnnnnnnnnnngagatggagtttcgctctnnnnnnnnnnnnnnnnnnnnnnnnnnnnnnnnnnnnnnnnnnnnnnnnnnnnnnnnnnnnnnnnnnnnnnnnnnnnnnnnnnnnnnnnnnnnnnnnnnnnnnnnnnnnnnnnnnnnnnnnnnnnnnnnnnnnnnnnnnnnnnnnnnnnnnnnnnnnnnnnnnnnnnnnnnnnnnnnnnnnnnnnnnnnnnnnnnnnnnnnnnnnnnnnnnnnnnnnnnnnnnnnnnnnnnnnnnnnnnntacaggnctgaggcaccacggttcagctcaggtttcaacccgtttggcaagnaaagttttaccaaggaccggagtttaaatatgacatttcnagggagttgtaactttaacaaggtttaaaaggttgtgggttcagattgccnatactttgttcacaacg

SEQ ID NO: 360976 - DNA, 853 bp, Homo Sapiens
tacgccacggcgtctgctggcggccgcggagacgcagagtcttgagcagcgcggcaggcaccatgttcctgactgcgctcctctggcgcggccgcattcccggccgtcagtggatcgggaagcaccggcggccgcggttcgtgtcgttgcgcgccaagcagaacatgatccgccgcctggagatcgaggcggagaaccattactggctgagcatgccctacatgacccgggagcaggagcgcggccacgccgcggtgcgcaggagggaggccttcgaggccataaaggcggccgccacttccaagttccccccgcatagattcattgcggaccagctcgaccatctcaatgtcaccaagaaatggtcctaatcctgagtcgtcacccttggattttatggatcacggagctgaccatctttacctggtcctggaactgaaaaactgtagcttgtgtgaaaatgagcctttggaccagtctttattaaaacaaacaaacatgagtagtctgcatatcgaatatctagagctctaaaccccccaatacttaaaagtctaattgctgtcctgtggtttcattagtctgataggaagatagggatttcctcagtcacagatgatattttgaaggaaagctgcaataaagccacaatgatttgaggtctttgcttaagtatgagatacttgatgggggctttatcatgcaacattagtttgcttaccttaagaattgcccaaaaatgaaagaaaatatgagcttttcagttaaacatactcctaaaaacattttccgggattttactactaaaattggacatttaagcgaagtaaaagaggccgggtgcggtggctca

SEQ ID NO: 360977 - DNA, 323 bp, Homo Sapiens
gggagatgccatctgggagccagggactggagtcaaaaactttagaagtctactcggtgttctagtctgctgtggctgggctggcaataaagccatatgacatagtgcttctcactcttcggtcccctttccacagatagaggaacatcacaccatggccaccaccacgggcccatagggagtactgccaagctcctgccagtgttcacttaaggcctaaaagctcttcagtcagcttgtggctgccaggactgggactcacccttcaaggcgatcagctctctggaccagggcaggtctagaaatgccatccaggatgctgg

SEQ ID NO: 360978 - DNA, 782 bp, Homo Sapiens
gccccccgggcaagcccagcagatgccccgtcaggagtactcgcagaggtggccgcagcctgcgggacagtgggagctgccttccagccacttcatgatgtgctgcaggtggccgccgtggctgcagccctggcaccacacgaagagacccttgactacgtggtggcagacggcacacatgctggcgcagcggtggcacctgtcgcagacccagccccggctgctcatgggccgcttgcagtggctgcagttgacgtgcagggtggtggaggcctggttgaggcagctgacggcgcggctggtgctcagcttgaccacctcgttggacacgttccagaggcggaagcgctgcagcaggtcgatgtaggaagtgtaccagtgctcctgggtctgctcgtcgatgtccttgcgcacccgttcacccaggacgatgagcacagacacagccatctgcacgtcgccctgctcagcgtagaagtgcagcatgtcgcgcaccagcacgccgaagaagtcgggcggcaggcggctgtcgtagagcgcgtgtgagacagacaggagcgagaaggaggagtccacgggggccagggaggccacatccgcctcgctgccgctcacgtgcggggagtcggccttgtcctgcaggtgctcgggcccgggaggcgtgtccacgatctcgtggcgcagcggaaaggcctcctgcggcagcacgcactcagggtcctcggggtgcgcgtgttccggatccagcaggtacagtcgtcctcctcaccttccagtcacca

SEQ ID NO: 360979 - DNA, 366 bp, Homo Sapiens
  misc_feature (18)..(18): n is a, c, g, or t
  misc_feature (64)..(64): n is a, c, g, or t
tgcacgatggaccgtganctccaccggggactcttaatctcggtggaatgctgtgcttatcctncctggggtgccagagtttggaaaacgggaggcgatgctgaaattaactgtgtatccttagtgtccggcaccgtgtttggatctcaaggggagctcagtgaatttgatgaatgaacatgtaaggtaacaaatgctcgtcttcctttcggaaaggcttcatctggcttccccagataatttcatgtcgcctctgctgcagtccacttcctatcacgaatctctacctaattaaactacactctctctactcttcattgactattttgaggtttttaccaaataaaaaacaaacgtcagcatgcc

SEQ ID NO: 360980 - DNA, 403 bp, Homo Sapiens
tccctaaagtgcctaggattacaggataagccactgcacctggccaagctcctagtcttattttgctgaaaaaggaaggcaattgagggaaaagcctgctggcccgggacactggagacgtgggtttaccacacagccttgggaaatttatctaactctctgggcccctttgtacttttcagcttagagatttgggggttaaagtagatcagtaatttccaaactcttcacagagtaccagggtctgtagagatgcctcacaggcctccatgacaggccaagaagatggcctatgatctctgaaaccagcccccacttcaatcagatcaaagtaattccattctgttttatatgctgggattctgcttaagatttcatttgataaaaagaatcttctgcttga

SEQ ID NO: 360981 - DNA, 461 bp, Homo Sapiens
agagtgaaactcagtctcaaataaaataaaataaaaatctacttttgaggaattcaaagtatacatggatccagtttgcccaaagatttagtaaagacatttttatttaactgagtgtatctcaaatttattgtggaattctcagtccgaatatctggaataggaacagctttgttagatgctaccataaccacaatgaatgtcttcaagggtgtaattttagatatggtgagtggttgtgttgggggcggcataagtcagggcaattttttgcagctcatatcatgctctgaaagtagctacctgctttaatggatggttagtgcttttctatagaatggaaaagattccagcccgatccttgatatgtttgtgttaaacatgcttatatattatattaaacaatgattaaggacataaatgagtttctgtggtaataaagatgctatattgaatatcaa

SEQ ID NO: 360982 - DNA, 367 bp, Homo Sapiens
  misc_feature (140)..(140): n is a, c, g, or t
aagattgtcgcggaagaaaggctagttcctgtggtccaggcggcaccagtgagaaagggaatgcagaccctccagatgtatccttgggaaaagccagtaaaccaaactaatatttattgaagacctactttgtcctctancatagggtagcttctgtcagggaatcttggttcttcccaagaaacactgattttctttcagggagacttcatgtgttcatttatttccaccacagcagattttaagaaattataatatgtaatatttgatatctataaagagtatatctaacgtgaataaattatgaagcatactaatgagtacctatgacccataacacatatacattaaaacattttaaatacca

SEQ ID NO: 360983 - DNA, 1064 bp, Homo Sapiens
  misc_feature (872)..(907): n is a, c, g, or t
gccggggaaggcagggtggaagggcggcttgagggacgccaggagaagactgaatgccaggctaggaaggaggcggctctcgatcacggggtgggtgcccccgacaccgggtctcctagcttgagttccctagaagcgaaatctgagagggggattctggggcaagtagtttcttgcgggtgagtgttctcagagaaacttaccagatcaagaaagggagctcaggctggatggaggaagccacgcaagtgtggcttcaagatccatcgccttggcctgatcgctgtgggggcaggggcctggagtacgaggggcaccctgggggctcccacccagaagcagaggggctgggctgttgcacctctactggcatcagtctttggttaccccacagccccagtaggaggagagcaggcagagcttgtcatccccagcctggtgtcccgcagtcccaggaagccgcttcttgccttcatggctgagtgctgggaagggctgagctcacccaggccagcaggttggggtatcatcttgctcggtggggccacccacaggtgacagcatggaccctcaggctggctgccctgttccttggtccataactggtgagctgtggagacccaggccaacaaattatccccagtgatatggggggaggaggggctagaacaagggcccaggggactggaggcaggatggtggctttccctaactgacacagccatggcccagccccaaggccaggctgtctaccctatggccacagcaggaggtcagcccagggccaggagacacatggctggacaaggctttgcagcctgggagaccccgactttctctaacccagtggctgtgcggtgcaggccactgannnnnnnnnnnnnnnnnnnnnnnnnnnnnnnnnnnnaactgcatgacatgttaactgtgtgcccaggacagccgtggtggggaccgggtatgccaactggaatgattctagaaccaaaataaagttggggcaggaagagggggcttccagggagccctgctcggccctgaatcaccttcgtctcttctctagg

SEQ ID NO: 360984 - DNA, 427 bp, Homo Sapiens
  misc_feature (19)..(19): n is a, c, g, or t
  misc_feature (47)..(47): n is a, c, g, or t
cccctaggttttagcctantattccactactcactgggtgtaagaanttgtatatataattcccggatgtatacaccccggagaaaaatcacagaagtgtaatacgtgtggcaagaattctactcaaaagcccagaacttgtaaatcctaggtaattaaaagggcatagatgtatgaaatgaaatgagggtggcaaaacctttactagagttcaatcactacttgtcataagagagtttatactgaaaggaaatcatataaatgtatgtgtcagaggctttccccaggcattggaactcactaggcatcagaatatacatctttgagaggaaccacagaaatgtaatgtgcatgctaaggtttttacccgaacatcaaaatggaaagagtattcatactagagacaaccttccaaataaatggtttt

SEQ ID NO: 360985 - DNA, 501 bp, Homo Sapiens
  misc_feature (398)..(398): n is a, c, g, or t
  misc_feature (445)..(445): n is a, c, g, or t
  misc_feature (473)..(473): n is a, c, g, or t
  misc_feature (481)..(481): n is a, c, g, or t
aatgtggcaaggtcttcagtcaatgttcacgtcttacagtgcatctgagaattcatagtggagagaaaccttacaaatgcaatgaatgcggcaaggtctacagtcagtattcacatcttgtagggcatcgaagagttcatactggagagaaaccatacaaatgtcatgaatgtggcaaagcctttaatcagggctccacactcaatagacatcagagaattcataccggagagaaaccttacaaatgcaatcagtgtgggaattcctttagtcagcgtgtccatcttagacttcatcagactgttcatactggagacagaccttacaaatgtaatgagtgtgggcaaaaccttttaaacggagctccaaaccttcactggcacatcaggttaattccntggcagggaaaggaaaccctttttaattgttggttggattgttgggnccaggtttttcccgggcttagttccacntcttgttnagttcacccggagattcccc

SEQ ID NO: 360986 - DNA, 348 bp, Homo Sapiens
  misc_feature (16)..(16): n is a, c, g, or t
ccagtgtgaactcacntgtgttcaaatgaggttagatttgtagctaaaggttttcctacattcaccacactcatgacgcactcctccagtgtgacgtctctggtggtgaatgaaatcagatttatggataaaggctttctcacgatcactgcattcataaggcctttctccagtgtgaattatcttgtgtaagattaggtggcactttttgctaaaggattcctcacattcactacactcaaacatcttttgtccagtgtgaatttgctggtgctgaacaagtgtgttcttgcaagtgaaggctttctcacatttgctacactcataaagccctccttcaggacagac

SEQ ID NO: 360987 - DNA, 554 bp, Homo Sapiens
  misc_feature (415)..(415): n is a, c, g, or t
  misc_feature (479)..(479): n is a, c, g, or t
gcgacaatgttccttaaaaaagtaatccttagaaagctgacagcacaactcagattctctggaccacaactgggtcaggtgtatactctaaagtcagagaaaagacatgaagaccctacatgcttggcctattaataatttccccaagcaaatgggagagtacagaggtttgcttctctgagcactgtggggaagtgactcatgcacatggtgtgcacctgccaggtggtaggggtgaaatgtgaaatggcttcagcctcagaaattggcagtgacataaatcaggctataggcctcggcagattagaaattacaatgaacctcctcagagcttcccacatacctgaaacttatgaagaataccccactgtgggtgctcaaagtttaaatttacggagatggctaccacagtctnctccagtgctattatactgattaaaggaatagcacattccttcacattaaggccttttttcagntggactctccgtgtcgatgaggttagatttgcggctaaaggatttccccattcacttgattcataaggctttttc

SEQ ID NO: 360988 - DNA, 996 bp, Homo Sapiens
acagtgatggccgacctgggcgagcgcatggtcagggagaacctcaaagtgtggatctatcccgagggtactcgcaacgacaatggggacctgctgccttttaagaagggcgccttctacctggcagtccaggcacaggtgcccatcgtccccgtggtgtactcttccttctcctccttctacaacaccaagaagaagttcttcacttcaggaacagtcacagtgcaggtgctggaagccatccccaccagcggcctcactgcggcggacgtccctgcgctcgtggacacctgccaccgggccatgaggaccaccttcctccacatctccaagaccccccaggagaacggggccactgcggggtctggcgtgcagccggcccagtagcccagaccacggcagggcatgacctggggagggcaggtggaagccgatggctggaggatgggcagaggggactcctcccggcttccaaataccactctgtccggctcccccagctctcactcagcccgggaagcaggaagccccttctgtcactggtctcagacacaggcccctggtgtcccctgcagggggctcagctggaccctccccgggctcgagggcagggactcgcgcccacggcacctctgggagctgggatgataaagatgaggcttgcggctgtggcccgctggtgggctgagccacaaggcccccgatggcccaggagcagatgggaggaccccgaggccagacgcacactgtccgagccctctgctcagccgcctgggacccaccagggtgcagctgggctccagggtccagcccacaagctgcatcagggtctctgggagaggaggggcctggagggccaggagtcccagactcacgcaccctgggccacagggagccgggaatcggggcctgctgctcctgctggcctggaagactctgtggggtcagcactgtactccgttgctgtttttttataaacacactcttggaagtggc

SEQ ID NO: 360989 - DNA, 1060 bp, Homo Sapiens
ggggggagcgggagcgggagcgagctggcggcgccgtcgggcgccgggccgggccatggagctgtggccgtgtctggccgcggcgctgctgttgctgctgctgctggtgcagctgagccgcgcggccgagttctacgccaaggtcgccctgtactgcgcgctgtgcttcacggtgtccgccgtggcctcgctcgtctgcctgctgcgccacggcggccggacggtggagaacatgagcatcatcggctggttcgtgcgaagcttcaagtacttttacgggctccgcttcgaggtgcgggacccgcgcaggctgcaggaggcccgtccctgtgtcatcgtctccaaccaccagagcatcctggacatgatgggcctcatggaggtccttccggagcgctgcgtgcagatcgccaagcgggagctgctcttcctggggcccgtgggcctcatcatgtacctcgggggcgtcttcttcatcaaccggcagcgctctagcactgccatgacagtgatggccgacctgggcgagcgcatggtcagggagaacctcaaagtgtggatctatcccgagggtactcgcaacgacaatggggacctgctgccttttaagaagggcgccttctacctggcagtccaggcacaggtgcccatccgtcccccgtggtgtactcttccttctcctccttctacaacaccaagaagaagttcttcacttcaggaacagtcacagtgcagggtgctggaagccatccccaccagcggcctcacctggcggcggacgtcccttgcgctcgtggacacctgccaccggggccatgaggaccacccttcctccacattctccaagaccccccaggagaaacggggccacctgccggggtctgggcgtgcacccggccccagtagcccagaccacggccggggcatggaacctgggggaaggccaggtgggaaaacccaatggcctggaagaaatggcaaaaggggaaattcctccccgggtttcccaaataccacctcggtccgggctccccccaagctcctccatttcagccccggg

SEQ ID NO: 360990 - DNA, 1145 bp, Homo Sapiens
  misc_feature (825)..(825): n is a, c, g, or t
  misc_feature (923)..(923): n is a, c, g, or t
cggtccggaattcccgggatgccccgccgccctcgcataaggggcctgagcgcgcgggggagaagcgggagcgggagcgggagcgagctggcggcgccgtcgggcgccgggccgggccatggagctgtggccgtgtctggccgcggcgctgctgttgctgctgctgctggtgcagctgagccgcgcggccgagttctacgccaaggtcgccctgtactgcgcgctgtgcttcacggtgtccgccgtggcctcgctcgtctgcctgctgcgccacggcggccggacggtggagaacatgagcatcatcggctggttcgtgcgaagcttcaagtacttttacgggctccgcttcgaggtgcgggacccgcgcaggctgcaggaggcccgtccctgtgtcatcgtctccaaccaccagagcatcctggacatgatgggcctcatggaggtccttccggagcgctgcgtgcagatcgccaagcgggagctgctcttcctggggcccgtgggcctcatcatgtacctcgggggcgtcttcttcatcaaccggcagcgctctagcactgccatgacagtgatggccgacctgggcgagcgcatggtcagggagaacctcaaagtgtggatctatcccgagggtactcgcaacgacaatggggacctgctgccttttaagaagggcgccttctacctggcagtccaggcacaggtgcccatcgtcccccgtggtgtactcttccttctcctccttctacacaccaagaagaagttcttcacttcaggaacagtcacagttgcaaggtgctgggaagccatccccaccagcgngctcactgccgcggacgtccctgcgctcgtggacacctgccaccgggccatgaggaccaccttcctccacatctccaagaccccccagggagacgggnccacctggcgggggtctgggcgtgcacccggccccagtagcccagaccacggcaggccatggacccttgggaaggggcagggggaaaccccaagggtttggaggatgggccaaaggggaaatccctccccggttttcaaataaccacttctgtccgggttcccccagattttcacttaaccccggggaaaaagggaaaccccccttcggtccactggttcca

SEQ ID NO: 360991 - DNA, 320 bp, Homo Sapiens
gacggagagcagactgtaatgatgcttatctaaggggatgtttcagtttgatttcagggctgtaaaaaatggtgaagccattaaaagagacatcccacttcaaatgatatagttatatttgtaaattgtcctattttgttaaacttaaaacagttctatatttaagtaactgtaactacttgtaggcattcggaagaataaaccttaaaataatttattgctttcatggtgattttattgaaaacgtcacttcctttaaatcatttcatcaattattctcataagaaaatacaatgtcagtgaaataaacagaaaatcaa

SEQ ID NO: 360992 - DNA, 1007 bp, Homo Sapiens
  misc_feature (43)..(43): n is a, c, g, or t
ctacttggtgcaataatctgaaaatttagaaggtcaaaatatntcacaggaaatgatcatagacctaaaaatagtttttaaggaaaccagctacacggggcaaccaaccatcttgctgttgaagaaaacagttccaaaaggctaaatcattggcataaaggaaacaaaacccaaagtatgcgttgtaattcttgagccagtattactgaaacaggataaaagttataaaatctaacataggttaatgcaatgtctctgctagtgctacaagtctaaaatatctttgtaacaatgctttcagaaatgccagttttaattacatttcacattgtatatgagagatactgctttatgaatgaatcggaataatacattttcatttaaatcttaattgcttttcattaaatgcgaagtcttaatttcaaaatgaaatcacactaccagcaatagacagttttcttgaaaactctaataaggaacaatagccagttccgtaaataactttaaaattctaaaagtgttgggtacactaggcaatcacaaatatggtttcttttaatacttttttaatcctgtaaagaagggtttttataaacattctttttattaatcagtcataacatggcgaagtgtgtaagttgcccgtttctgaaaagtgatccaaactctacatccagagattatgaaaaattcttatagaattttgtaacaagtatttacatgttgggtgaaagaaatttcatagtcgttggagtgccatgaaattaatacttgcaattcagattgcggtagtttacactttttctgtatgtttcaaatcaggtgtgtaccatttgtactgagaacaccacagaatgaattatccaaagtccattgattttaatacgtgttttggtttgtaaacaaattatagtaatttcttgcacatttttggaaattaattgtataagaatttatgtatctgcttctagatacagtgtgtaaataaaaaatttcgttcacaagac

SEQ ID NO: 360993 - DNA, 686 bp, Homo Sapiens
gctcttgctcctttcccaagaggcagatgaaaatatagccagtttatctatacccttcctatctgaggaggagaatagaaaagtagggtaaatatgtaacgtaaaatatgtcattcaaggaccaccaaaactttaagtaccctatcattaaaaatctggttttaaaagtagctcaagtaagggatgctttgtgacccagggtttctgaagtcagatagccattcttacctgccccttactctgacttattgggaaagggagaactgcagtggtgtttctgttgcagtggcaaaggtaacatgtcagaaaattcagagggttgcataccaataatcctttggaaactggatgtcttactgggtgctagaatgaaaatgtaggtatttattgtcagatgatgaagttcattgtttttttcaaaattggtgttgaaatatcactgtccaatgtgttcacttatgtgaaagctaaattgaatgaggcaaaaagagcaaatagtttgtatatttgtaataccttttgtatttcttacaataaaaatattggtagcaaataaaaataataaaaacaataactttaaactgctttctggagatgaattactctcctggctattttcttttttactttaatgtaaaatgagtataactgtagtgagtaaaattcattaaattccaagttttagc

SEQ ID NO: 360994 - DNA, 1633 bp, Homo Sapiens
  misc_feature (16)..(16): n is a, c, g, or t
  misc_feature (681)..(693): n is a, c, g, or t
  misc_feature (1381)..(1381): n is a, c, g, or t
  misc_feature (1435)..(1435): n is a, c, g, or t
  misc_feature (1445)..(1445): n is a, c, g, or t
  misc_feature (1539)..(1539): n is a, c, g, or t
  misc_feature (1579)..(1579): n is a, c, g, or t
  misc_feature (1584)..(1586): n is a, c, g, or t
  misc_feature (1589)..(1589): n is a, c, g, or t
aaactgtgccaggtgncctcggaatagatgccaggcagagaccagtgccttggtggtgcctcctcttgtctgccctcatgaagaagcttccctcacgtgatgtagtgccctcgtaggtgtcatgtggagtagtgggaacaggcagtactgttgagaggagagcagtgtgagagtttttctgtagaagcagaactgtcagcttgtgccttgaggcttccagaacgtgtcagatggagaagtccaagtttccatgcttcaggcaacttagctgtgtacagaagcaatccagtgtggtaataaaaagcaaggattgcctgtataatttattataaaataaaagggattttaacaaccaacaattcccaacacctcaaaagcttgttgcattttttggtatttgaggtttttatctgaaggttaaagggcaagtgtttggtatagaagagcagtatgtgttaagaaaagaaaaatattggttcgcgtagagtgcaaattagaactagaaagttttatacgattatcattttgagatgtgttaaagtaggttttcactgtaaaatgtattagtgtttctgcattgccatagggcctggttaaaactttctcttaggtttcaggaagactgtcacatacagtaagcttttttccttctgacttataatagaaaatgttttgaaagtnnnnnnnnnnnnntctaatttggaaatttgacttgttagtttctgtgtttgaaatcatggttctagaaatgtagaaattgtgtatatcagatactcatctaggctgtgtgaaccagcccaagatgaccaacatccccacacctctacatctctgtcccctgtatctcttcctttctaccactaaagtgttccctgctaccatcctggcttgtccacatggtgctctccatcttcctccacatcatggaccacaggtgtgcctgtctaggcctggccaccactcccaacttgacctagccacattcatctagagatggttcctgatgctgggcacagactgtgctcatggcacccattagaaatgcctctagcatctttgtatgcatcttgatttttaaaccaagtcattgtacagagcattcagttttggctgtggtaccaagagaaaaactaatcaagaatataaaccacattccaggctgctgttttctctccatctacaggccacacttttactgtatttcttcatacttgaaattcattctgctattttcatatcagggtacagacttataagggtgcatgttccttaaaggtgcataattattcttattccgtttgcttatattgctacagaatgctctgttttggtgctttgagttctgcagacccaagaagcagtgtggaaattcactgcctgngacacagtcttataagaatgttggcaggtgactttgtatcagatgttgcttctnctttctctgnacacagattgagagttacacagtggcctgtcgggtccaccctgtgggtgcagcacagctctctgaaaagcagaacctccctactattctaacgnttttgcccctctaggaaaaatggcttcaggtatgggatanactannncanaaagggaaagggctgtctaaatctaaacaacatcccctccataa

SEQ ID NO: 360995 - DNA, 376 bp, Homo Sapiens
  misc_feature (113)..(113): n is a, c, g, or t
  misc_feature (159)..(159): n is a, c, g, or t
  misc_feature (364)..(364): n is a, c, g, or t
gcgcttggaatcctacccgagagcattttagccgagaatgagctaaagacatcatatatgagaagagaagtggaagtatctctgtttgctggtgacgcgatctaatatgcagnaaaccctgaaagctccaccacagaagtctgttagagctgataaacnaatttgtaggtcacgaaatcaaaatacagaaatcacttgtatttctacacattaataatgagctatcataaagagaaatggaaaataacaatcccatttacaataacataaaaaatacttaggagtaaatttagccaaggaggtgaaagatgtgtttattgaaaattataaacattgactaaaaaattgaagacatagataaatnaaaatatatccc

SEQ ID NO: 360996 - DNA, 392 bp, Homo Sapiens
ctgctgtgcctccttctcaattcttccacccccccacaccatcagaattcggatttctctccacgtggcgtctgcctctgtccccttccaggctggagcgacgtttccacgttcggatgctgcagcctctgcacctgcctcagacagacccaccagataccacctgtctcttcgtggcatttgggagatgcgtgggcggcctgccccccgaccgccgcccctgcccaccacatgctgggacaaggttctggctggatgtcagaatggatgggggtgggggcagccctggccgtgattagttgaatgaatggggtcacaacatcccttttcctgcccctacagtttgtgttgcatatttgtgtttaaagcctattaaaataaacttgaggaaa

SEQ ID NO: 360997 - DNA, 353 bp, Homo Sapiens
  misc_feature (46)..(46): n is a, c, g, or t
atgtgtaatttagatagtggctgataaactgccctccacagaagtntgtatcaattcacattcccactgtaaatgtataagaacccctccaatgccccctttgagaaaactcaaggctggtaaaatactgggtggcgagcacattgttacaatcctcctgaaagttaatttaaagagctacatgaaattcatagaagaaaatcctcaaaatagagtaagcacatgttacaagacaactaggagggattccaaatttctaaacacaagataactatacacatatatattcctctgtgtgtatgtaaaatttagtgtacactatgtatgtgcctcgtgccaagcttggcacgagg

SEQ ID NO: 360998 - DNA, 460 bp, Homo Sapiens
  misc_feature (16)..(16): n is a, c, g, or t
  misc_feature (28)..(28): n is a, c, g, or t
  misc_feature (90)..(90): n is a, c, g, or t
  misc_feature (100)..(100): n is a, c, g, or t
  misc_feature (104)..(202): n is a, c, g, or t
  misc_feature (434)..(434): n is a, c, g, or t
tggggtccggagttcnaaaacccacctnaccggccacggtgaaaacccccatctctactggaaatacaaaagctgggtgtggtggtgcanacttcctaancccnnnnnnnnnnnnnnnnnnnnnnnnnnnnnnnnnnnnnnnnnnnnnnnnnnnnnnnnnnnnnnnnnnnnnnnnnnnnnnnnnnnnnnnnnnnnnnnnnnnagagcgaaactccatctcaaaaataaataaataaataagaaacatttgtttatatgtacacacataatctctgaaagggtaaaagtggcatactggttggccagaagaattgggaggacagtgatgaggaataattttcactctttatcattttatatttttggaattttgaaacatgtaaaattattaccagttcaaaaaataaatttaaacaaaaatcttaactgtttcnaattaaagtaagaatgataaattaaa

SEQ ID NO: 360999 - DNA, 351 bp, Homo Sapiens
gtgttgaaatggtttaatacacaacaatagataactgctatatttgctgagaaggttctgagcaacctctataactgtagcaggaacaggcttaagagaccatttttactaacccctccctttatgatggaggcagctcctccccaaggtcccacttacagagtgagacctttgtctacttctgtttggcatgtgctggccatgtgcaaacccacaattatattggccaatggcaaacagaattgggaaaccaaccatttccaataaaataaggtttcatttcaaaccagatacacccattttggggattaccaattgctttggagtttctaaatactttctcccatctgc

SEQ ID NO: 361000 - DNA, 383 bp, Homo Sapiens
ctgttcgttctgtcaattaaaaagtttctctgccttgggcaggaataagaagcattgttctgctggctcctcctaaagaatcccttgcagccttcacatgtgatgactccgtagtggatcccagaggacttatcgccacaaattttgcatggtatcacttcaatttgtgctcgcatggtgtggccgctcctaccctccgcgtagtcatgaagctgctcccagcccgaaccccggagagcccaaaaatcccgctcagcacgagtgaagaaggtggtcggcgaagagctgctctgccgagaaaaccatccctttaggcggacgccgtggctgcagggtgacgtttgccgccgccgccgctatgttaacagttttgatgttggtgg

SEQ ID NO: 361001 - DNA, 267 bp, Homo Sapiens
acatagacaatccagtgtatttatacttaatccataaaggcatgatgttacaaaacacatttgtatattatgaagccatctggcatcaaattttccaatttatagacaactttgtatttacataacaaattattaaatcaaccatttttccggtttataaaaggtcactgaggtacacacacagtgtgtataaatgcagataaggctggtaatacatatttacagtagatacaaattaatctttcatatttgaagataatgcttttt

SEQ ID NO: 361002 - DNA, 537 bp, Homo Sapiens
tccatcatacatattcaccacttgagattcataacatatcaatagttatttcataaatatagaaatgaaataattttatttttgacagactggatggaatgagtgtgtaatgattgataaaggttgtaaattttaaatgcaagatgacgcttacgttccgtaaacccattagtaatacaggctgtaataatagaattagtggaacattttgattaacctttcccctagaagtgactgaaatatttttgtgccatatttgagaaagggaactttccttttattaattgtcaatttagagaaactatgcttaagctggtcttttgcattgctaatgtgacatgtacccaacttttcattaatttgtatttccatttttaaattgcatattctatgttttgtagtgtttggattgttaatgaaaaaatattatatgttcgttattccttgtattattgccacttatcttttgcttgataaaaatgcgttgttcttttttcttttggagggacaagatgaaaatatataatttgaattgat

SEQ ID NO: 361003 - DNA, 460 bp, Homo Sapiens
tgatagggcattatgaattcctatgggtgtctgtaaattatgtatgtcagttggacattgtagaaggtatgtaaatcagcatagttgtgtataacttaaccttgatttataaggtcttaagattatgactattcattgacatctcatgagaagctttagaagactttctatttttaaacaccatttatatgtggacttctgttgtcactgactttgggctttatattttcatagagtctttatggaaaaaatagaatttattttccactcttgtagctatagctgctgcacactttcaccctgatttatttttttgtttcttagctttgatgttttcaaaccaagggattgtgattttagggttaggaattacatattagaagcctttaaggactatgtctttgggatccaggaatgctttaggtggataaaccctacttttgaaggaccatactcctta

SEQ ID NO: 361004 - DNA, 413 bp, Homo Sapiens
  misc_feature (71)..(71): n is a, c, g, or t
aactaagttttgctgaatacattaaataatgactgcagaatgatggttgtttggggataagagaggtccanctgagattctgataaaagtgaaggctccaatcctagaagaatgtacgtacctatctgtgtagacacttagaatgaggcctctaatgtcaggaggctctgtaccttgataaaaggatacccactttctgattttctttagtatagcaggcagtggggaaaagaaattgtttcatgcaaagaatcatttatttacctcttatgtgtatcttctttgttcatttccccatcaagcacacaaaaggcaaggccaaagccaaagtctggctggttcaactggtaaacatacaagaagccacttttagaaccagatggttttttaattatataggcagtgaaagaaga

SEQ ID NO: 361005 - DNA, 460 bp, Homo Sapiens
ccgccccagaaagtaccatttccggagttataaaattccaggttgagcccgcccgtttttaaaaagaaggggatccgacgggttccgatccccaacaccagtaccagcacgaagagcctcctcccgaaagagtctcggctggacaccttctgggactagcagtgaatcgggacacaaaccacccaccccattgggagaaaaacccagacgccaggaaaagaagaaacaacaaaggcaggagaacagccactttcagacttgaaaatgacaaaaccctcagttgagcctgagcccccggcgcgggggctgctacactacaggacacccagcatcggctttgactgcagactgttcacccacacgagccctgtgcttttggtgtaaataatgtacaatttgtggatgtcattgaatctagaggactttcccctttttatatttgtattaactttaacttatt

SEQ ID NO: 361006 - DNA, 354 bp, Homo Sapiens
ctcctgcaaaccaaggatgcagttcatttccagccctgagctgcactcaggagctgggcctcatgcccagtccccatccttagggcagtgcccgccctcaggctgacagcctttcctttccttgctccagtcgcttgggtgtgagtcctgcttctcccatttcctctgtgctgggacctcaaggcaagccgactgcaagcccacctggcccaggccactgcagggccacccttcgcagggccaggctgtgaagcagttggaggcgaggcccggggctccaggctactgtgttgagattaatcttaccaactagaactttaaaaattgtgtttccagcctttatttgaaagtggg

SEQ ID NO: 361007 - DNA, 510 bp, Homo Sapiens
  misc_feature (49)..(49): n is a, c, g, or t
  misc_feature (68)..(68): n is a, c, g, or t
taaacccccaggggatgaaaaagccatacatttgccccaaaggtgtgtnagaaaaatcccctgaatcnaaatggcccaactaacttttaaaatacaaaatttaacccttagaagaacctttcctatttttggtgaaacatgctgattgaaagaaaaatcaatcattctgttaaatgaagtacagtattctgcaggggaagcaccagggtttctggatcaaacccttaggacatgaagaaaaccaaagtactctgctggttcaaaatctgtatcacaggaatccctggctcccttccatgtgtccagagatgctctcagctcacaaaaccaacagatggaaggaaaagcaagtgaacatgtgaccatgtgggaggggggctggggacggtaaaacactgctcagactttcagcagcaacacaatcctgttggtctgaatatcctgaggttaaatgataataaaatattgcaccaacacaataaagaaaatcacagtttaaacagaattact

SEQ ID NO: 361008 - DNA, 391 bp, Homo Sapiens
cctctcttttggtagagcagtagttctaagaggatgagaccaattctcactctgtctttttctgttttcctgctgcttggacctagatatgcaagtatacatcagaaaggggtaactgttctaagtttctggtgagagaacagaaaagggaagcctcagggaaccagaaagtactagggagatcacagagatgaagaactcaggagagcaagcccataaactggtttatgaactcctggccccagcccaagtagagaacatgtagatctgtccaattcagcatataataaacagaagtgacattcattggaattataggccatagcagccaggttgaaacttggggtctgaacccaaccagatagactgcctactaaaacaacaactatca

SEQ ID NO: 361009 - DNA, 385 bp, Homo Sapiens
  misc_feature (21)..(21): n is a, c, g, or t
  misc_feature (165)..(165): n is a, c, g, or t
  misc_feature (268)..(268): n is a, c, g, or t
  misc_feature (351)..(351): n is a, c, g, or t
agtgcagcctgatcccattcnagtgcagtgtcgtcgccaggaatgccttggggaggctccacctgggtatcgaggagaggggcaagggcaagtcacggaattatcatccttggctctatggtcccacgcatctccgccctctccaggacctacgcctaagccccnaccttgagcgagaacccgctggcgaagaatccatcgggacacatctcaggccaggcccagtcgccccagggacccccgctggtcacttcgatgaccgccgtgntaccgttccggccatctgcctgtgcacatgtgaaaccagtcgcccgcagaagcagcagcagcggcagcagcttggctcctgcnccccgctccatcctgtagcgtctgtgaatcaggc

SEQ ID NO: 361010 - DNA, 534 bp, Homo Sapiens
  misc_feature (111)..(152): n is a, c, g, or t
tcaatcaaattcccttaaatttgtatggcactggaactttggcaaagcacttttgacaagttgtgtctgattggagcttcatgatagccttgtgacatctttagggcaggnnnnnnnnnnnnnnnnnnnnnnnnnnnnnnnnnnnnnnnnnntttctgtgggactgtggatctcactggaagctatccaagagcccactgtcaccttctagaccacatgatagggctagacagctcagttcaccatgattctcttctgtcacctctgctggcacaccagtggcaaggcccagaatggcgacctctctttagctcaatttctgggcctgaggtgctcagactgcccccaagatcaaatctctcctggctgtagtaacccagtggaatgaatttggacatgccccaatgcttctatatgctaagtgaaatctgtgtctgtaatttgttggggggtggatagggtggggtctccatctactttttgtcaccatcatctgaaatggggaaatatgtaaataaatatatcagcaaagca

SEQ ID NO: 361011 - DNA, 523 bp, Homo Sapiens
  misc_feature (48)..(48): n is a, c, g, or t
  misc_feature (55)..(55): n is a, c, g, or t
  misc_feature (60)..(60): n is a, c, g, or t
  misc_feature (77)..(77): n is a, c, g, or t
  misc_feature (98)..(98): n is a, c, g, or t
  misc_feature (103)..(103): n is a, c, g, or t
acgggccccaaaaaccaccaacaaggccaaataatgggccctcccggnaaaaaangccantaaaatgtcctggtggntccaaccattgttggaaagantagcnaaacccgccctgtacttaggccatggttttaagggaacctgaatcactaagtggctgtggttttgaaacacctgagcatccacggatgcctcccttgaagaagagggaggtggccccatttattaataatttgaaatggtctgcctgagaaaactcagtgaatgggcccaggtaggggagaggggcagcaaagacaaaccctctgcaagcttctgtttggggaatggggcaggaaaaactctagtcgctcctgctgctgctgctgctttcccccaactcccttggcaaggggcttggacctcctggggaactggagaggttgccccacagggtaccagctggtacctacaagttaaggcaaaaaagccagtagagcacattgaagaagaagaaagtcactgggaaaacaactctcgagta

SEQ ID NO: 361012 - DNA, 269 bp, Homo Sapiens
  misc_feature (15)..(15): n is a, c, g, or t
  misc_feature (59)..(59): n is a, c, g, or t
  misc_feature (85)..(85): n is a, c, g, or t
ggcctcgtgcatagnagcatttagaaatggagaccacttctggtgaattgtcagatgtntccaatgatcccaccacatcgtgtcntgtgtagctagtgccccaacaaaagaagcaattgacaataccctgcttgaacacaaagaaagaagtgagaatataaatcttaatgaaaagcaaattccttttcaggtgcctaatattgaaaggaacttttagacagtcacagcctaaatcctatctttgccattatgaactggctttgggccct

SEQ ID NO: 361013 - DNA, 1248 bp, Homo Sapiens
cgcaatgcactgaaaggcccggccaactgctgctcgccgatccgtggggccccctgtgcccgccacacgcacgcacacactcttacacgagagcacactcgatccccctaggccagcggggacaccccagccacacagggaggcatccttggggcttggccccaggcagggcaaccccggggcgctgcttggcaccttagcagactgctggaaccttttggccagtaggtcgtgcccgcctggtgccttctggcctgtggcctccctgcccatgttcacctggctgctgtgggtaccagtgcaggtcccggttttcaggcacctgctcagctgcccgtctctggcctgggcccctgccccttccaccctgtgcttagaaagtcgaagtgcttggttctaaatgtctaaacagagaagagatccttgacttctgttcctctctctcctgcagatgcaagagctcctgggcaggggtgcctgggccccagggtgtggcaggagacccagtggatggggccagctggcctgccctgatcctctgcttcctcctcacaaccccaagagcccccagcccggtccatccacgtctggagtctggggagaggagcagggtcttaggactctcagctctgagcatccctggcagggtcttcaacctctaatctcttcccttaagccctgtggccacacagccaggagagacttgccgctggctcccgcctcatttcagcccagggtgctcatccaggggcccagaacagtcccacctgtgctgctgtgcccacagcacaaagccaggcttcactcccaaaagtgcagccaggccctggagggtgatcctgccagcagccctacagctccacaccctacccacccatcggcagcccctctgctgttccccagggacctctcatacactggccaggaggctgcagaacgtgtgtctccccctccctccaagaggtcctgctccctctgccagaaccgtgtgtgggcgggtgggagggcgctcggggcccggcccctccctctccctgctggttttagttggtccctatgttggaagtaaaaagtgaagcactttattttggttgtgtttgctcacgttctgcttggaagtggggacccctcactgcgtccacgtgtctgcgacctgtgtggagtgtcaccgcgtgtacatactgtaaattatttattaatggctaaatgcaagtaaagtttggtttttttgttattttcttttaaaaa

SEQ ID NO: 361014 - DNA, 1382 bp, Homo Sapiens
  misc_feature (1204)..(1204): n is a, c, g, or t
  misc_feature (1351)..(1351): n is a, c, g, or t
gaccgcttccagacctgcaaggtgcacggcgcctggcctgctcatctgacaataattacctgaacgtgcaggtcaccaagcacgcctgtgctgcccggctcagcggccactgccaccagcaagctcaccatcatcttcaagaacttccaggagtgtgtggaccagaaggtgtaccaggctgagatggacgagctcccggccgccttcgtggatggctctaagaacggtggggacaagcacggggccaacagcctgaagatcactgagaaggtgtcaggccagcacgtggagatccaggccaagtacatcggcaccaccatcgtggtgcgccaggtgggccgctacctgacctttgccgtccgcatgccagaggaagtggtcaatgctgtggaggactgggacagccagggtctctacctctgcctgcggggctgccccctcaaccagcagatcgacttccaggccttccacaccaatgctgagggcaccggtgcccgcaggctggcagccgccagccctgcacccacagcccccgagaccttcccatacgagacagccgtggccaagtgcaaggagaagctgccggtggaggacctgtactaccaggcctgcgtcttcgacctcctcaccacgggcgacgtgaacttcacactggccgcctactacgcgttggaggatgtcaagatgctccactccaacaaagacaaactgcacctgtatgagaggactcgggacctgccaggcagggcggctgcggggctgcccctggccccccggcccctcctgggcgccctggtcccgctcctggccctgctccctgtgttctgctagacgcgtagatgtggagggaggcgcgggctccgtcctctcggcttccccatgtgtgggctgggaccgcccacggggtgcagatctcctggcgtgtccaccatggccccgcagaacgccagggaccgcctgctgccaagggctcaggcatggacccctccccttctagtgcacgtgacaaggttgtggtgactggtgccgtgatgtttgacagtagagctgtgtgagagggagagcagctcccctcgccccgcccctgcagtgtgaatgtgtgaaaaatcccctcaggctgaagccccccacccccaccagagacacactgggaaccgtcagagtcagctccttccccctcgcaatgcactgaaaggcccggccnactgctgctcgccgattccgtggggccccctgttgcccgccacacgcacgcacacactctttacacgagagcacattcgattccccttagggccagcgggggacaacccagccacaaagggagggcttctttggggtttggcagggnagggcaaaccccggggcgttgtttgggaatt

SEQ ID NO: 361015 - DNA, 460 bp, Homo Sapiens
  misc_feature (22)..(22): n is a, c, g, or t
  misc_feature (56)..(56): n is a, c, g, or t
tgcccgggtaaaataaaagaangcctgaaaataatggtccccctaaaaaaatgtanaccaactgcaaaggcctaaaaatgcctttccccattgtcctgttcaacacccctgtgaacctgtagcggtgctggcagctggcggtggtggaaatggcgaacggtaagccacgcagctgctgagaactagcatttaggatctgggctggaagcaacatttttaaatttgtgactttcctcgcaccaagaaggggaagttctccctttgcccacctgtcattcaattgtcctttcacctcagtaggccaagcacgcggcattcttggtcagtgtgagcaggagagcaaagggcaggctgtggagcatgttcgtggcatgaaggcttggctccaagcactggctttaatcacttaagcaagcaacacaaaagttaacagaaaccaagtatctttcccagttttttc

SEQ ID NO: 361016 - DNA, 400 bp, Homo Sapiens
  misc_feature (46)..(46): n is a, c, g, or t
  misc_feature (382)..(382): n is a, c, g, or t
aagacagccaagcagtgcaccatggagatggccaccggggaggtgnacgtagcccctcgtgtccatcttcaagcaaaagcgcgtcaaaggctggtggcccctcctggcccgcaatgagaacgatgagtttgagctcacgggcaaggtggaggctgagctgcatttactgacagcagaggaggcagagaagaacccagtgggcctggcccgcaatgaacctgaccccctagagaaacccaaccggcccgacacgagcttcatctggttcctgaaccctctcaagtcggctcgctacttcttgtgggcacacgtattcgctggctgctccttcaaactgttgctgctcctgctgcttgttcctccttcttgccctgttcctctnatttgttgcctgggttac

SEQ ID NO: 361017 - DNA, 1242 bp, Homo Sapiens
  misc_feature (525)..(525): n is a, c, g, or t
  misc_feature (657)..(657): n is a, c, g, or t
  misc_feature (665)..(665): n is a, c, g, or t
  misc_feature (717)..(717): n is a, c, g, or t
ggaggtttccctctgaaggaatctagaccattttttaatatggagaataactgtaccccatgttagaagtgctctttagccatatttcaagatccagatctgaacccatactgtgcagaaaagcacaagagcgcttacagccaagagccctgggaggagttgagtaacaggctgagatccggtcaccaagcatcattagttagcactgaaattctcccaggacacaaaacaaatgtatggaaacatcgcaatacactatcatttactcacatgggacaaccacctaagtccatagcaaaactttacagatctagatgttatctcaagtcaggattccagatcaacatcctccatgtggagatgagacaactgaggttcagaaagttggagtgacttatttgcccagctagctaactggaattagagtctgggtctcccaaccactgattctgctacaccacactgtgctgcttccattagttagatggacattgacaattaattgttgaaagcattaattagaangtcaaggacaaaagaattgtttgtggatatcttctctcgcttaacatactttgatttcaccattgcatttcagcattttaaagaatagtgtatcagtatagaaggaggagcaaagccctttaagagtaatgntgaaaccnaaaggtcaaaaagtagaagaatagcgaatgtaagttattaaataaatgagcnagaagtatgtgtcagggaaaataaatgcctcttatattgttaataccgtgattccctgcccgctcaccccgtcactcaacacttgatgcatttgttttggaaagtgccattttatgctgagatactggtattgaaaacttccctctttcccaactctgtcagaagttctcttgctctttggaagaagccgagggccttaacaaatcagactgacctcccttgtgacaggcagcctcgcctgcccttggaaacaagctgccagaatgtgagggccacagagacccaagagaagccagcactgctagactgaggaacttgtaaatatcttctgctttcttggtgaacaaggacagaggcaattgcgtgtatattgtgactgtagtttgtgaagaaaatgcaaccatttgcttcgacagctcctcaaatgtacttgttaagtgtgaatgtgcctgcctcattgccttgtgttccaaacacagtactgaatgcgttgtttttaaataaaccatttcgttttgctttggg

SEQ ID NO: 361018 - DNA, 1904 bp, Homo Sapiens
  misc_feature (1305)..(1305): n is a, c, g, or t
  misc_feature (1481)..(1481): n is a, c, g, or t
ggaatccggacgccgggcgcgagtggagctcagtgccagaggaggggattcccggcgccgggggacagagccccttttttcttttgccgaaagaccctttctgctggggagcctcttgtgtccagcctaggcccgcgtgcagcgccgacggatgatcgtcttcttggcaagaaagtgaataaacttaattgagaatgtctgaaaaccttgacaagtccaactgtaacatgaagcaggaaaatcaaaatccaatgattctgaggaaggcctcgaagatgctgtggaaggtgctgatgaagccttacaaaaagcaataaagtcagactcctccagcccccaaagagtgcagagacctcactctagtcctcctcgctttgtgacagtagaagaacttctagagacagcgagaggcgtcaccaacatggctctagcccatgaaattgtagtaaatggagactttcagattaaaccagttgaattaccagaaaacagcttgaagaagagagtaaaggagattgtacataaagcgttttgggattgcttgagtgtgcagctaagtgaagatcccccagcattattgaccatgctatcaaacttgtaggagaaatcaaagagactctcttatctttcttgctgcctggtcatactagactgagaaaccagataacagaagtcttggatctggatctgataaagcaggaagcagagaatggggcgctagacatttccaagctggcagaattcattattggcatgatggggacactgtgtgcacctgctcgagatgaggaagttaagaaactaaaggacattaaggaaatagtgccccttttcagagaaattttttctgtgttggacctaatgaaagtggacatggccaactttgctatcagtagcatcaggcctcatctcatgcagcagtcagttgaatacgaaaggaagaagtttcaagagattttggagaggcaaccaaattccctggactttgtcacccagtggctggaagaagcctcagaggaccttatgactcagaagtataaacacgccctgccagtggggggaatggctgctggctctggggacatgcccaggctgagccctgttgctgtccagaattacgcttacctgaagcttctgaagtgggaaccacctccagaggccattccccgaaacagttttaatggaccagtctcgcttccacgagctccagttgcagctgggaacaactgaccatcctgggggctgtgttgctggtcaccttcagcatggcagcgcagggaatttccagccaggccgactttgctngagaaactcaagatgattgtgaagattttgctaacagatatgcacctgccctccttccatctgaaggacgtcctcactaccatcggggagaaggtgtgcctggaggtgagcagctgcctctccctgtgtgggtcctctcccttcaccacgaacaaggaaaccgtgctcaagggccnagatccaagccgtggcccagtccccgatgacccccattcgcaggatcatggaatctcgaatcctgaccttcttagaaacctaccttgcctcgggtcatcagaagccattgcccacagtccctgggggactcagtccagtccagagagagctggaggaagttgctattaaatttgctcgcctggtcaactataacaagatggtctttctgtccctactacgatgcaatcctgagtaagatcctcgtccaatcctaacgtgtatgcaccctacagcagcagtattactcactagccacagaatacctgttctgtactctaatgttgcattggaaaatggctatatagtacatgtctatttaacagcaccgattccaaagggaagaatattgtgtatcactgttgaaaagacttgttgagaaatcc

SEQ ID NO: 361019 - DNA, 436 bp, Homo Sapiens
  misc_feature (50)..(50): n is a, c, g, or t
  misc_feature (72)..(72): n is a, c, g, or t
  misc_feature (154)..(154): n is a, c, g, or t
  misc_feature (262)..(271): n is a, c, g, or t
ctttaacctccctgggacccttcaaatttcctttaaaagtccttctgggnggtgaacacaagaaagttgaanaaaacactccctaacacacccagaaaagcatccacaattcactctttgccctcacctctttgatttctccctacaagtttgnatagcatggtcatatgctgggggatcttcacttagctgcacactcaagcaatcccaaaacgctttatgtacaatctcctttactctcttcttcaagctggggcagtgnnnnnnnnnnggaggggggcaaaaaccaaaatatttgagtttcaaatcactttcaaaagcacaaatactatgggtttagggtaagatcaatcccagtgatttggaccaaggaaagatttcccaggcatacttcaactgagggcatactttattttaaaagttagtgattttttgc

SEQ ID NO: 361020 - DNA, 425 bp, Homo Sapiens
  misc_feature (24)..(24): n is a, c, g, or t
gctgcctccatatccgtcagaagnagcctttccagaatgattctgggcatatactaagaagagcaggtatggaaagatctattgtcagggaatcttagaattccctacacgagtgggagaaagatgtccaaattccttacgcagtggtattcatgatggtgccctatctaagtccaggactgttttcctacagcgtgcctcaaaagtgttgtagagggcaggattctacattcacagcctgttccatctacgagattttccagatgctacttgtggtagacattcctaactcatggtacttagccaccagagatcatgatggaatgagtgggtgggcttttctacctgccattccctcagaattcatgaggggttggggacagggggaccggaattgtcttagcaccccaatgttatggacaaaa

SEQ ID NO: 361021 - DNA, 586 bp, Homo Sapiens
tcggtcctacttttcacagggctctagaagaaacataaagccgccacacaatactggtgacatgctaatcgttgtttatgttttattgacttaccaagaaaaatatagtcagttaaaatgtcagtgacatacttgtcattgcacatattttattgacttatccagaaaaatataaacagatttttcaacagtttaaattttatttgtgtagttgctgctgttgaggctaagaaatagagtgctggcagttgggggtgatggtaggaatcatgattttgttctattactgctgaagtctatgagaaaggaaagtttcctaattgtatttcttttaccagacacatcttccagagctagatacactttcatcagaaagagccagatccttcataacttggcttagagacagcagaccattaagtccaatccttcacatagtaaagtaagtacttttgtaacttaattatgaagttgtctttcctatgtagtctgtggaattgcttgtcttcaaagcaaactttaaatagtagcaaaatatattctgatggtaaaatgttgttacttgatttaaatcccctggaaaagt

SEQ ID NO: 361022 - DNA, 982 bp, Homo Sapiens
tactttcaggggagccagatccttcataacttggcttagagacagcagaccattaagtccaatccttcacatagtaaaagatgagagtcctgccaaagcagaattttttcagcatttgattgaagaccggacagaggctgcattttcttactatgaatttttgcttcatgttcagcagcagatttgtaagtgaagtagaataaaattgaataagaaaaagatctataacctaggtaaagcataatctgtcagagaagcgcgtgagaaatttgaaatgaaggcatttgttaatacaagatgcaacgcacagcactctgtctgaggctttggtaaaaagtaaaggggaagaaagaacttgacagatctttttcaactcaaattaatggtaacgatgatgctgtttcaccaagtatattttgaattggtttctacacatttccagtagtatggcagtacagtgctctgttcattgcaagctggcaaatttatgtagctatgtggaatgatatgtcataatgtaaaattagataaattcttttttcttataattaatataacatttctggacttgaactctggcaagagatgccaaaaggcattggtacccgtgttatttgtttatatgaattaccttttaacaaggaatgtttctctattcattaaatgaattcaacattttctctgtaaaaacaatagagtttcagtacatgaactatagaaaaaaatctatatataatgtacataaatgttacatttgtaaagaaaatgtaaaaatgtaactatagcatatgaattgcttaaactgtgctgcattgttggatgacaactctttttgtcacagttagagaatgaggttgactaatgcatattatgaattgagtccacaaaggaacacaaaactctttgtaattctgttaaatcttttatgtagatttatttatgatcagcctactaattaaaactatttcgcttgacagtaaaa

SEQ ID NO: 361023 - DNA, 259 bp, Homo Sapiens
  misc_feature (160)..(160): n is a, c, g, or t
caatgatctgaatatctttgctattatagaactcatcagaaaccaactgtaatagctacgttttctcaccatggaagacttccgagaagaaaatttcaatgtccattagcaagtccatataagtttaaagttttaaaaagtatataccccaaactgaacncctgatatgttattgtttactaagtatgatgttaaagaagcaataacaactgcattatgacctgagctttttaaataaaattaaacctagaacccagtc

SEQ ID NO: 361024 - DNA, 899 bp, Homo Sapiens
  misc_feature (874)..(874): n is a, c, g, or t
  misc_feature (889)..(889): n is a, c, g, or t
ctaggtttccaggatagaaaggcactcataagaccccagctttgcagttcaggtttcgctcgggtgcctgagagggcaccaaggtgcaccgtcagcagaagtttccatcacaaacccttgtttggaaccagtcagagtgcacacaaacggtctcgactcagttcacttttgtctgagtacagagctcagcgatgatattctaggttactgaggcactcattaggccctgggcaaatctaaacatgcagttcttttccgtacactctacatctgcctgtgtcacccccggctcggagactgggaaggccacatgcagatatgcttcttagctttgtggggtggaactatggctgtagctacttctgctgaaactgcccttaggacatcatatgcatctttgaaagccaaatacataagtgaacacatctgcgtgtatgtgtatacaccatacatgcacacattcatacacatgcgtatacgtgtgcatgttttagttaacagaagtccttgggggctggacaatattttggctccaagggatgtgagcaactataaagtcatgagactgagtttcttgtgcggctccagcggctctgaaagcccctctgaagggagtccaccagcgcacagtgttacattcaccaggccaaggggtctgcagaggtgctggtgttgatctggcaatttacagggaagattcagaatggtggggattgtggcctccaggagctgtctgcttgcacgtctgggagcaggaatgccacctcagccttctgttgcctctctgccttcctagcctgggcatgtcttcatgggagttaattcccctaattggggaggcttaaaaaagaaaaggggagattttcccgaagangaggggaaccggganttttcagatt

SEQ ID NO: 361025 - DNA, 1238 bp, Homo Sapiens
agggaaatcatttgcctcaaactgctgttggattttaaaatttttaaaatatctgctaagtaatttgctatgtcttctcccacactatcaatatgcctgcttctaacaggctccccactttcttctaatgtgctgttatgagctttggacatgagataaccgtgcctgttcagagtgtctacagtaagagctggacaaactctggggggacacagtctttgagacagctcttttggttgctttccacttttctgaaaggttcacagtaaccttctagataatagaaactcccagttaaagcctaggctagcaattttttttagttgcaactaagtaaggatatactacaaactaaggatgctgctagactaaggaataaacagcaaggtaccaaagtacagcaaagcaacaacaaaggctctgtatttgcagaggggtctatcatgcttttaagaaaaaagaagagtacaggaaaaaaattcagatagacataagagtattttggatgccattaaactttgtcaataaccattaaaacataggcttaaattatcacgtattgttacaaagacacagttttgtctcattataaaataagattatatgaaatttatattctagaaatgattccaaatcatgtcctaagaatttctcccattcaaatgataatggaaattactgtcaaaaggaaaatctcaaagttaccattacgctgctctcttgtaaatgaactagggataaagatatgggttttatcaaaagccctaaggaatatatctcacattcacctcctatatgtatgtgtatatataaatgccactataaatgaaaatgtcacccagagataataaaataatttttaaagtttaaatctggtccaaagtctttaaaataggtagattttcagctttcttaagtttctccctcatttagatttcatggtttttacataaagggtgaatatttgaattttcttttaaatttcactgcatcttcaattgcccaactgtgtttcctgataaattttagattcacatttttaggaaatttggagtattccagacaatatactagatacccagaaacttttctcagtaggttctgaggtgttttaagttcttatgctagactgtaagctccttgagggcagagactgttttatttattcttgtatcctcagtgcctggtacaggacttgacacagagtagttgttcaataaatatttgttgaatgaatc

SEQ ID NO: 361026 - DNA, 421 bp, Homo Sapiens
  misc_feature (36)..(36): n is a, c, g, or t
aaaataattttaaaaagttaaaaacccgggtccccnaaagtccttaaaaaatagggtagaatttccagccttccctaaagtttccccccctcatttaagatttccatggtttttaccataaagggtgaaatatttgaattttccttttaaatttccactgccatcctcaattgccccaactgtgtttccctgataaattttagattccacatttttaggaaatttggagtattcccagacaatatactagatacccagaaacttttctcagtaggttctgaggtgttttaagttcttatgctagactgtaagctccttgagggcagagactgttttatttattcttgtatcctcagtgcctggtacaggacttgacacagagtagttgttcaataaatatttgttgaatgaatcaaaaaaa

SEQ ID NO: 361027 - DNA, 482 bp, Homo Sapiens
ctggttgttggcggccggcgaaaggagctggtgcctgtgcaagttgttgaggagttgtggagtgtatggcagctggcacaattatccttgcacacaattcggggggcccaaagcttgacattgtggttcctcacgaaggagatataactggctttctggctgagagtgaagaagactatgctgaaactatcgctcacattctttccatgtctgcagaaaagagactccaaatcagaaaaagtgctcgtgcatctgtaagcagattctctgatcaggaatttgaagtgacattcctatcatctgtggaaaagttatttaagtaatgccatatctgtaaaattaaagatattttatataaactgggtaaacaccttccatatgtaaatatttttctaaattcaatctcatttgtcaaatcattttactttagaaaacagacatatttccttttagaataaaaggaagtgttgaaaagaacatta

SEQ ID NO: 361028 - DNA, 469 bp, Homo Sapiens
  misc_feature (16)..(16): n is a, c, g, or t
  misc_feature (22)..(22): n is a, c, g, or t
  misc_feature (57)..(57): n is a, c, g, or t
aaagctgaaggcccantgtaanacagaccgtggccccgcggtgtaacaaaaccccanatagggtacatgtgccaggaggggaattgctggctgcttttacttcctgacccaagactgaaaaattatttactgaaatctgtaaacctttttatgaaacttttaagcacccaggctgtttacttacacaatttaggtctgccagaaaattctatctgtgatagatctgtaaagagggtcaggggttagagtttactatttttgaagtttacattgttacatatgaaatggaaacattattttgaaacgttgtcataacccaatggtgcattctgtaaccatggagtcttctgtttcctgggggaaaggggcattcatgacctgaactttttagcaaattattattctcagtttccattacctgtttggccaaacagattaataaaatatttgaaaaagaagcgttcaaaaa

SEQ ID NO: 361029 - DNA, 466 bp, Homo Sapiens
  misc_feature (398)..(398): n is a, c, g, or t
  misc_feature (425)..(425): n is a, c, g, or t
  misc_feature (438)..(438): n is a, c, g, or t
ggttaacatcctcttcatcacctgcattcctattatcctctactttaccaaagtggaatactggagctcttttgatgacattccatggggaaacctttgtggattttcagttcttttattgacattcaatattgtattaaattttggaattgccgttacatatcccactctgatgtctcttggaatcgtcctcagcatacctgtgaatgcagtgattgatcactacaccagtcagatcgtcttcaatggggtccgggtcatcgccatcatcatcatcggcctgggttttctcctcctgctcctgccagaggagtgggatgtctggttgatcaagctgctcacccgacttcaaagtgaggaagaaggagggagcctgcagagggccgctgccgaacctngagcttcagggacctcaggagcaagancagaagagcccgncctttccttacgcccgttaaacaccatt

SEQ ID NO: 361030 - DNA, 129 bp, Homo Sapiens
aaggtttttaataacacttcttttttgctgtagtcaagcattaatagaaactagtttaattttcacagtggtaaatatttttattcttgagttatctaggaatggattttccacgatgtctagtgactt

SEQ ID NO: 361031 - DNA, 366 bp, Homo Sapiens
ctgcatggtgggtgagtgtaaggcagactggacctgccatgggaagctggttcccaaggggctgcctgcatggtgaagcggctggtgctgctgcatgttgagatgctggtgaagaggcgggctgatctggaggggaggaggaggggacacagccatgtttgctatagagacagtcactggcatttggttattcggcttgggggctatgttcctggggagactaggatgcatggcagttaggtgaggattcattcccggttgttggtgatagtgggaacttaggtacagggccgagtgggcctggctgggcccatggaacaccgacggcttcgaattgatcagctgaggaggttgagatgtcttcac

SEQ ID NO: 361032 - DNA, 354 bp, Homo Sapiens
  misc_feature (58)..(58): n is a, c, g, or t
  misc_feature (288)..(288): n is a, c, g, or t
  misc_feature (313)..(313): n is a, c, g, or t
tgaatgccttcagtggagcatgaagaaaccagctcgaccggagggccagaaggccatngaactggaaggagagcttccagatgggaagcaaaagcagcccaccctccccctatatgggattctctggaaacagcaaagacagtcgccgaggcacctctgagctagacagacccctgcaggggacactcacccttctgaggtccgtgtttcggaagaaggagaacaggaggaatgagagggcagaggtctctccacaggtgccccccgtctccctggtgagtggcgggntgagccctgccatggacgggcaggntccaggctcacctcctgccctcaggatcccagagggcctgg

SEQ ID NO: 361033 - DNA, 501 bp, Homo Sapiens
  misc_feature (14)..(14): n is a, c, g, or t
  misc_feature (23)..(23): n is a, c, g, or t
  misc_feature (307)..(317): n is a, c, g, or t
  misc_feature (459)..(459): n is a, c, g, or t
  misc_feature (484)..(484): n is a, c, g, or t
ggtaaataagcatnacacccatncatggtcatctatcatcaagagaatttggaattctgagccagcactttctttctgatgatgcttgttgaacggtccactttctttgatgagtggaatgacaagcaatgtctgatgcctttttgtgcccagactgttttcctctctctttccctaatgtgccataaggcctcagaatgaatgagaattgtttctggtaacaatgtagctttgagggatcagttcttaacttttcagggtctacctaactgagcctagatatggaccatttatggatgacaacaannnnnnnnnnngtaaatgacaagaaattcttatggcagccttttacctaaggaaattttctgtccagtgccttatcttatggaaggaaacagaacctctctaggctaatgtgtgggttttctccttgcctggcccccaccctagggttcaccnttggcagtcttttaaccccgttctnccctttggattaccata

SEQ ID NO: 361034 - DNA, 146 bp, Homo Sapiens
gaaacgccaacaaattaggaacaactttccgataaataaatcaaaccttagtgcaggggcctattttggactttattgattgcattcaggatttgcggttggttccaactgagatactaaagtgaagaaatgacacttcttaaata

SEQ ID NO: 361035 - DNA, 422 bp, Homo Sapiens
cactctaggtcgttggccttccttgaccactccatttaattctctctgctgtttgggttgggtttttccccttagttatctgtgggtttcctgtattttatgttaatatttctattaagaacatgttgggcatgtggacccaagcacctgggaaggaggtggcatctgagacagcctgatacgttcccgtctgtgcacccatggagatccaggcgtgggcccgtggctgtccctggttgtaaattcgagggtctgcatatctgatgttcaggtagacctgggcgcctgggaacgaggccatcagctgccatgcacataacaaagagacaatgcattccttcttatttttcctttttaaaaatcgatgaatcatttgtgatgcttttaacaaagattaaatgaatttgatcagcttttgcctt

SEQ ID NO: 361036 - DNA, 496 bp, Homo Sapiens
  misc_feature (23)..(23): n is a, c, g, or t
aaaccccgggaaaatgcccctcncccccttaaacctcaaaaatgcccgcggtaagcccaccctaggtcgttggcccttcccttgaacccactcccatttaaaacctctctgcctgtttggggttgggtttttcccccttaagttaatcctgtgggtttccctgtattttatgttaaatatttcctatttaagaacatgttgggcatgtggacccaagcaccctgggaaggaggtggcatctgagacagcctgaatacgttcccgtctgtgcacccatggagatcccaggcgtgggcccgtggctgtccctggttgtaaattcgagggtctgcatatctgatgttcaggtagacctgggcgcctgggaacgaggccatcagctgccatgcacataacaaagagacaatgcattccttcttatttttcctttttaaaaatcgatgaatcatttgtgatgcttttaacaaagattaaatgaatttgatcagctttaaaa

SEQ ID NO: 361037 - DNA, 705 bp, Homo Sapiens
  misc_feature (13)..(13): n is a, c, g, or t
  misc_feature (443)..(477): n is a, c, g, or t
  misc_feature (521)..(521): n is a, c, g, or t
aatgaaggttccnattctccaatgggtggtttttaactcaacaaaggaacgggtgcctccctcccaaccgggcaactgtttggggcgtgaaagattcacccctgggcttttcccctctaaatggaccatgtttcttttcccagggtaaatgaaggcaattcccccaagctcagacatggtggatgggagaacgtctgcactgtcattcggattcacccccagccagcatgtcaccagccagggctctggcgttctccctttctgagagggaccctcattgggattcacccccagccagcgcatcaccatccagggctctggcgttctcccgctctgagagggaccctcattgggattcacccccagccagcacatcaccagccagggctctggcgttctccccctctgagagggaggccacggtcatctgagatccctgccannnnnnnnnnnnnnnnnnnnnnnnnnnnnnnnnnntactgacttcccatttcaaggcaaaaggtgaccccccccaccancctatattcctatagacttacactaacatccctgattctaggaaaccgtaagggtgtggagaccgcacagactggcgcgcagagggctgggttcggccacctctgctgtgaccgtgctgtgaccttcagttactctcctccctgggcctcagtttccccttcttgaaaatgagggtcacgctga

SEQ ID NO: 361038 - DNA, 454 bp, Homo Sapiens
ggctaaaccagacaaagacctccttatggaagaagatgacatggccttggaaatgtagtcatgcaggaagctcagaagaagctcatctcacaagttcagaagaggaatttcatagaaaatattattccaattatcatctccctgaagactgtgctggagaaaaataagatcccagctttgcgggaactcatgcactatctcagggaggtgatgcaggattaccgagatgagctcaaggacttctttgcagttgacaaacagctggcatcagagcttgagtatgacatgaagaagtaccagggaacagctggtccagggagcagggagctaggcaaaacatgcagatgttgggccgggacgtctggaggttgctggaggttggcacctgtgggcacaggtttgccctgtgtttttaggaaaccagttgcccatttcctgctggcccaagaaaacc

SEQ ID NO: 361039 - DNA, 699 bp, Homo Sapiens
  misc_feature (639)..(639): n is a, c, g, or t
  misc_feature (677)..(677): n is a, c, g, or t
aaaatgtcaagaatttggaaggtggtacaaacatttcaagaagacaaaagatatgatggttgaaatggatagtctttctgagctatcccagcaaggcgccaatcatgtcaattttggccagcaaccagttccagggaacacagccgagcagcctccatcccctgcgcactcatcccatggcagccagccctctgtccggacacctcttccaaacctgcaccctgggctcgtatcaacacctatcagtcctcaattggtcaaccagcagctggtgatggctcagctgctgaaccagcagtatgcagtgaatagacttttagcccagcagtccttaaaccaacaatacttgaaccaccctccccctgtcagtagatctatgaataagcctttggagcaacaggtttcgaccaacacagaggtgtcttccgaaatctaccagtgggtacgcgatgaactgaaacgagcaggaatctcccaggcggtatttgcacgtgtggcttttaacagaactcagggcttgctttcagaaatcctccgaaaggaagaggaccccaagactgcatcccagtctttgctggtaaaccttcgggctatgcagaatttcttgcagttaccggaagctgaaagagaccgaatatnaccagggacgaaagggaaagggagcttggaatggttgnctcggccatgggtcctgccccc

SEQ ID NO: 361040 - DNA, 826 bp, Homo Sapiens
cagggtccccggtcccgttccctgggaaccggctcctcccccacggagagagcgcactagactctcgggtacttgcgccccagcttcagctcgatgtctctgaggtctggcagcgggctgtcttccatggacttttccggaacggcgataatagtaataaaacgcagcagatgaaaggcagccacggcttcgaaggctgctgcgaaatcagcagacctctcccgggggccagggtctctatcctccgccgctccggtgtaccgtcctgttccataaccgcctatgcggtatcagccctgaaatccgcacaggacgcggggggtcgcagctgcagttcccagtccgctgcgactcctccgacactaagatgatcaagatctcctcattctctctctttttggccacctcactgcaaagttgagttcactgatattgcagacagagggggaataaagagggggaagtagtgaaagaaaagagagggaaattaaatctgttttagctttaccaagggaaaattttcacattataaaaccgtccgttcacatccctgcgccgctcactgactgcccatctggtactacgcgacacaaaataatgatgcagccagaaatgatgtcctgggtcgtttcattttccagccatatgcctccaagctttcgggatatcctgggttgtcagaaataatctctggtcagtgaaagaggagttcggtcgtgtgcatggacccataaaaaagagctagttagcttagcaggagtttaacggcttccttgatgcagcaaaatgtccttcttcccatttaggctgtatgatccaagtcatt

SEQ ID NO: 361041 - DNA, 1316 bp, Homo Sapiens
ttttttttattaagaaagcatgcaaaaaaacaatgacaacaacttgtgagaccatatacccccttcccaggatgcagcaatgcaaagcattatgggtggtggcacaaaggactcaccaaaccagaaacatgaggagcagggactgaggagagaaaggttgggatgggtggatctataccaaataattactccttttgtccctctcctccactttctctcttatttcctcttataggcagtgagcttctgcagttttgcacacatcacccaatacaacaataatgactacactttgtgtccagcaatgctagaccaacaagaaaaagtagtattcttttcatttcatgaaggggaggggaaactgaggcccaaagggagtcaggtttgccctgtgccacgtagcaagactgggcttggtggaagggagctggaatctcaggaggcctaatggccaatctccagtcccagacccaaacttcagctaccctggctgcacgccagaattcttcatgagactagtttgcagaagacacagatgaacaaggggcatttgcatgtatgatcctacccttgcaaatcctgtatggatctgaacaggaaaagggtttagaaaagagaagtgatcatttacaaatggggaatattgaggagaactgatgggaagttttgtataggacacaccctgactggaaggaataaggaaggaaaagatgcctaaaatagggacactgggcaaaggcattttgccaccctctaagagaaattctcctttccccaatgggaaatattatgtcatacttcaaccccactaagtgccctccaacatcatgggagattcaagccactcgcacccccatttctttcttagaaaggcttcaaagaaataaagtgctctttagttaactgccctatcttgcccctttacttcagcctcactggacttcttcaatgaactctcatatataacccccttccaaaaaaaggaaaggggtggatgaaagaaaaaagcaggagacggaacgccaaacctcttggaaattatgggtaaataaaataatatgcatgaaaagcagaaatcacaaagaaagtggccttgtctattccatacattttgtcccacagcttttcagcaagtgaaataaggacagaagtaaaattgttcttccctctcgtaactaaaattcaacaatcaacattaaatatacactgagtactttgcaacagtaagtcatggccaccccttgtaaaagagatgagttagctccatacctttttctgggggtcccccttggccctcactgaactcttcctcgtgc

SEQ ID NO: 361042 - DNA, 436 bp, Homo Sapiens
taattaagccctgggacaaatcccacccaccttgggttagcacagtacaacatttgggagattgtggtagctatggtcttgcagcttctcgtgctgcacatatttcctagcatctatgatgtttttggaggggtaatcattatgattagtgtttttgtccttgctggctataaactttactggaggaatttaagaaggcaggactaccaggaaatattagactctcccattaaatgaatacctgattattattgtctcattaatgttcagttattaatatgtatactgccattttaatgtttacctatgaatgtcttttgtgttatataactgacagagtgctataaaatatataatatatacaaatgcagaaaatttattctagtctaatatattcaaatacaaatattaaatatatgaaatacgttaaaaaaaa

SEQ ID NO: 361043 - DNA, 949 bp, Homo Sapiens
ttcgctctgtgtcccacggtgtccaaatggaaataaaagccctcattgtggtaaagtctctcccctcccagagcccgccccgtatttacaatacttatccttggactaactcagttcttgcaggagtttttctttctacttgcccaaactggacactcacagacatctcggctatgaactgctcacagccttccttggtgacttgcttgcagtacctcaggtcaatatgacagatgtttccacagcgtttgaagaaggacaggcactgatcagtgaccttattgcagtcagacaggttgatctcggttaaggagtctcgggtggtggtgccaacagcagtgagcaggttgatagactggtcggtgacgtggttacagtaactgaggtggagcttggagagcaggggcatgtggcggatgatgagccgcagggaggcatctgtgatgtccaggcctgccaggcgcagctccacgatgttccggagcttgctccgattgtccatctgacctggcctgttgtctgtgggcggggacaggagatcccgcatctgggcatcctttagtccctccacccactggacatccagggtccggagcagcggacaactggagctgcaaagggccgagaccgcgatccatgagcagcctgacagcaccaagtcccggagcccaggcagccggttgatgagccagctcagctgcttcttggagatattggtccagctgaggtcgagggagacgggctgtcgccggatgatgccactcagcatcaggggtgtgatagacttgcagtggttcaggtcaatgcgggtccacaaccgcttatcgcagcaccagcggttccaggtcctgcagacccgcatgcacacacacaggtcttggtggctgaggtagctgaagacggccatccacacctccctgtgcatgacgtgggctgccccatcgtccag

SEQ ID NO: 361044 - DNA, 980 bp, Homo Sapiens
  misc_feature (844)..(852): n is a, c, g, or t
ccccgcaaaattcagatggtaccggtccggaatttccgggatagactgtccacccgtcctcagccccctctcttcgtgggctatctactcagttgatccctccctcgctggcttggctctgactcctgctcagacccatcacctttgccgggaatgatgtctggagaacccctgcacgtgaagacccccatccgtgacagcatggccctgtccaaaatggccggcaccagcgtctacctcaagatggacagtgcccagccctccggctccttcaagatccggggcattgggcacttctgcaagaggtgggccaagcaaggctgtgcacattttgtctgctcctcggcgggcaacgcaggcatggcggctgcatatgcggccaggcaactcggcgtccccgccaccatcgtggtgcccagcaccacacctgctctcaccattgagcgcctcaagaatgaaggtgccacagtcaaggtggtgggtgagttattggatgaagccttcgagctggccaaggccctagcgaagaacaacccgggttgggtctacattcccccctttgatgaccccctcatctgggaaggccacgcttccatcgtgaaagagctgaaggagacactgtgggaaaaagccgggggccatcgcgctgtcagtgggcggcgggggcctgctgtgtggagtggtccaggggctgcaggaggtgggcctggggggacgtgcctgtcatcgccatggagactttgcgtgcccacagcttccacgctgccaccaccgcaggcaaaacttgtcttccctgcccaaggatcaccagtggttgccaagggcccttgggcgtgaaaaactnnnnnnnnnctcagggccccggaaagctgttttcccaggaaaacccccaattttcctcgggaagtttatcttcggaaccagggaaggcttgtgggcccccccaatttgaagaaaagtttccggggggaattgaatgg

SEQ ID NO: 361045 - DNA, 473 bp, Homo Sapiens
  misc_feature (456)..(456): n is a, c, g, or t
aaaaaaaaccccggaagggctggaattttaatcccaacgccctcgtcgttatgtttggcctgaaacaccctgtggccccgggtgcaggttaaacttcttgttaatcaggagccccactatgccagaggcccaaaggtcggcagccagcgaggcctatgaattggacctttttggtatctgtgtgactgctctgtgcccatccttagccaacttgctggcgtgacaagtgcccacaagtaacacacccaggtacccagagcagggtggacaggagagacctgaatcacagcagtgaggaattcctcaaagctgtgacctcgcccctgaacttgttcccagtgaaggtcaacagggccaccaaccagggttgaggaaccatctcagccatcctcccaggaagcccacccctgacccttactaatttttctaatgtgcaaactttttcattgaaaaatnaaatatatttatgaaac

SEQ ID NO: 361046 - DNA, 1130 bp, Homo Sapiens
ttctgaggaaaccagggccacaacacagggggtgtaacaaacacccaaacagaagcccaactaacccaacttgaatgggtgcactcatcccatgggaacctcttcaaaaaaggctttcttttccaaagtgttcataatgaatgaagggatggccatgccaggggctgccatgagaatcctggacacgacaacttgcgtgatggcttgtttcgcagcgttcgccgactcccccaagcggttcccattctcatccgtgacgggaatgccaactttgagttccctttgcctcattaatggaatattaatgcaattagcagcagctacggcagcaaagggaacaaaacgtcctatcagtggtgagacatgcttggtcaatgcattgagtcctagagctgttgctacggcaccagttgttgcagaaacgtaagctgttcccaactcattgacagtgaggggtgcgtctccacttctgttggtgtaattgacgacggcattgaaggactggttaatccactgccagaacagcacagccggcgtagtcctgtaaaacgtcatcatacaacctgtgatggtcatgttcatgggaacctgggctgacattcttcctatcaaaatcatcttctcaccagtgtcaggatgaaaagctgaatcatagatgtactttgctctccacaattcattttctgtaagaccaggaggaacaattccttgcctgtaatcatgtactatttttctcgcactctcgagttgttcgttggttaacagaatgttcctggggtcagttacagtgaagaaatgattggctcgtccaatgaaagtgctttgatcccatcgaggttccttgatgttaatgtttggtggtagttctccagacatggtcccggacgcttcccccgggctgccgcccgcgctgctcgcaggtcccgctcagtgcagcctccgccgccaccggaaacgcttctcccgccacggcgtcctcgcgcgtccccggagcgcgtcctcgcgcgcgcctgtgagcgcgcgtccgggcccgggagctacgaggcccagggacccgccctccgggtccaggcccgggtccaggccccgccccgcgcccgcgactccgcttctggcttagcgaccgcgcc

SEQ ID NO: 361047 - DNA, 448 bp, Homo Sapiens
cggtaatcaagagatcactcatgaatagtacacagcaaaaatgccccgtggaagagcttctcggacttctattcagagtgaacttcatcgagatagaaggcgcccagagatcaccattgtggcagctgagccactgaggccagcctcgtggtttccaggaaccccacccccaggactgggatttcctacatcatctgcagcaggctcttggaggcctaatgagctggttcctgctgagctcccaccatcttatgaacaagttataaaagaaatcaaccaagttcaagttaatactacaaataataataatgctgctgctactccaaggcacactattacttctgcaactcagactgacttttcagaagaaatagacaacgatctgcctcaaacactacaggcacctctcaagcctcttcagcctttctcagcagtctcgtcaacatag

SEQ ID NO: 361048 - DNA, 865 bp, Homo Sapiens
cataggtctccagcatgagatcccagtaatgctcctttttgagtggaatccagttgtccccacggttcctgaggtgtctgctgggaccagtgaggctcccgaggtccccgtcttcggatcagcctttcgctccagtcgggccaggctgggaggcagcccagggcctagttctgctttctgtgtcagattcctcgtgtcacgatgtggcttcagaagctccccaggccctgaggatgaatttctcaagtcccaactcctgaggcaccacttcaagatggggctccacttcccccacttggcagcttggagattccatcttctctgataagatgtcctgtcctagaacctggatactgatccattgccacagtctctgggggtcccccttcaagctttccacaagggtcactgcctcttctccacttcctggacactgtttccgcacccacatctggatctccccaggcaggatggtcagaaactgctccaacatgaggatctctaggatctgctctttggtgtgaacctctggctgtagccactggaaacagagcttccgaagttgcttcaaggtctcatgaggcccagacatcacctggtaacggaactgcctgaaaagctggcgtgcggtctcagggctggagagttcctcttgaagggcagcatctgattctgagaactgggagtcctcggccttcgccagcgatggcagcaggcctagggcctgccccaagtcaacgggcattgtccagcctggcaagtccttttaagtaaagtgcttctgcagtggaattgtctccggcaagaactaggtcttcaccaggacactcggcccgcggcgccggctccgggcgcactccccgct

SEQ ID NO: 361049 - DNA, 767 bp, Homo Sapiens
tcccagttcattgtggaccaaactacaggctcttctgatcttactgctttctgaagcagccagcagcgtagataattccttgacttgttttatttaaaaaatatcactggagatttagtaggagtgttgtatcacaccaattctcattctgttttcaaccaaggattctggagtactctgatagcattggtttcatttctcatgtcgtcctggcaagcataattttgtagtttatctcagtttcaggtagaagctgcagaagcagagagcagcctacccacaaaaggggtccagttggttctctagcccctgagctgagtggcaggcagtctatatgtttgctcatctctgcactgtgcctggtgctgtgcttagaggagaagcaaaggaaggagcgtgtagtccaagtggaaagccaggatagacagctggtaaaactcgcccatctcttgccttccttcttgccttctggataattgtgtttttgcaatagcttctcatttcccttctaaagaagaaaagcaaaaagcaaaagccaaacaaatatacacatattttatatcaaagatgtttgcaaaagttgtttctgtaactcattgcttagcaatggtaccgtaggggaattttcatactgggctacagaatacttatgcatttttgtagtttatttaaaattctctaaagaggcaatgtgttaaaggaatcctaaagtaagtctttgtataaagcaaatggtccttccctcattaaagtgtatttcttattaa

SEQ ID NO: 361050 - DNA, 473 bp, Homo Sapiens
aattcggcacgaggcggattctgtggctgtgtcaccctcatcccgcagcatgaaactcatcgctctcctcttcctgactgccctggccggggccctggtctgtgcccaagacgccccggtagaagaaacccctactgagacccctgctgagacccctgccgagacccctgccgagacccctgctgaaacccctgctccagcggaggccacccaggagacgcctgcacctgcccaggagacaccggcagcgacccaggccacttcggcagcgacccaggcgacaagcagtatcaccccagcgaaatctggctcctttctggatggcttaaaaaataagttcaaggttctgctcgggtgagttgaaggcaagaagaaaccaactgcgggtggaatttccttacgggaaaaacagccgtcactggactccaagcctcatggccctaaactattaaactgagagcatccctcgtgcc

SEQ ID NO: 361051 - DNA, 426 bp, Homo Sapiens
cagccccaggactcccaggtgtccactcagtgatcgcactcaacacagacgctcaccatggagactgggctgcgctggcttctcctggtcgctgtgctcaaaggtgtccagtgtcagtcgctggaggagtccgggggtcgcctggtcacgcctggaacaaccctgacactcacctgcacagcctctggaatcgacctcaatacctatgcaatgagctgggtccgccaggctccagggaaggggctggaatacatcggaatcattaataagcataataccacatactacgcgaaatgggcgaaaggccgattcaccatctccaaaacctcgtcgaccacggtggatctgaaaatcaccagtccgacaaccgaggacacggccacctatttctgtgccagatgggatgattattccctcaccttatgg

SEQ ID NO: 361052 - DNA, 1758 bp, Homo Sapiens
ttcctgctccgtgccctcccccttgggattctctttctcctccttaggcaccagggcgatgactgtccacatgtcgtagcagccgggaagctcaaaggttgtcaccacctggggccggatgctcttctgcagcaccgaaagagccccattcttcccgtggccggagcaaaccacaatctccaggtccggctcagggctgttctgaaactctccagacaggaaggcaggctcacccacggcagcattggcacagggtccaatgttaaggatgctgtcacacacctcaaaggagtaggtggccagctgtgtgcccgactgggcctcgctgccgtacacttcaatctcgtccacctcatcctgcgacaccgacttacccccagctgaccagccggccatcgcatccactcgcttcttctgtgagggaggctcttccttgtcagcagcctcacagacagcactggccgggggctcctgaagcttctccgtgtacttgaggaggagagaattgcccaggcaagaacccaggaacaggtacccaggctccatggtgaccatgctggtggtgaggacgctggcggccgccttgtcaaaagtggaacactcggaaactacgcatgccatcggtgatgagggtcagcacgtagatctcaccgcccttgagggagatgaccatcttgtcataggagatgaaggtggcctgggcgcagtccagggggatccacacacccacctgggtgcaaagcgggaaagccgcggtgcctgtggtgaggctgctgagagccacaccatacggggggacgctctggttcaggtacaacagcgagttgacggcaaacaccaccaccccacctatgggcttgggcacagccaggaccctgggtgcaatcaaagggcaggctggtgagggacccagatgactggggtgcacctttctgctgtgatgttcagtgagatggccaacatatggagcacgtgtccctgccgcacggccaagcgcccaggccaggtctggttgggctcaaacaggatgaggagggtaggctcgtagtagccatgcaggaactgcaggtcgatgatgttgagcagcttctcgtctagggcccgcacgtcgatgatgtagctgggcaggaagctggacctctgcccctcacccacgagcccctcgtgctcctcagccaggctctccctgcggaagggcaggaccaccagccgcgtgccgtagacaagcatggctgcacagcgcccgtcggggtccacccgcactcgcggcgtgtgtacattctgcacaaacccgtcccgaagctcaggctcctcaaagtagtgcagtgacagggtcttcaggtcatgggtgcccgggtcgtactccaccacagacagcttggcatccttgaagcttaggagcagggcatcccgcttggctcctgccagctgcacgctggccatggacatgacgttgccaaagaaggagaaggaggcagcaagctcgagcttctcccggtgggccttcccctctgtgctcctgtcattcttggtcagagcctcggcgtcgcggttgaggcggtacacgtagagctgcgaggtcccggccactaccaggttgcgctcgctgttgttgaagaagttgcagtacatggagaactccagaccggtgggcggatgcgcctgtttgtacacggcgtacatggcgccaacccgggctgcgcaaggccgggagaggaagggtgagcggggtcgcccacgcaggagcccggccccgca

SEQ ID NO: 361053 - DNA, 346 bp, Homo Sapiens
gtggatccccaaatgctctctgtgggctcagctgtctgggttctgtagccccacctctcatcctccctcctgaggttgacagcatttctcaagctttcttgtcactgtatttggagtgggctgagccaggagctgggcacactggtgagaggccctgctgcttcctgacagccgacttaataaagtaagcactgtcagaggtaagtagcctgagatacaattcattaggatttcattaggacttcttctcttttgatcacttgttcaaaaagtaatttgatcaccagcatgactgtcttagcatgtggatctcatacatactgagaagacaggggctggaaaatgc

SEQ ID NO: 361054 - DNA, 421 bp, Homo Sapiens
ccaaacacagcagcctcaacatgaaggtggttatggtcctcctgcttgctgccctccccctttactgctatgcaggttctggttgcgttcttctggagagcgtcgtggaaaagaccatcgatccatcggtttctgtggaggaatacaaagcagatcttcagaggttcatcgacactgagcaaacagaagcagctgtagaggagttcaaggagtgcttcctcagccagagcaatgagactctggccaacttccgagtcatggtgcatacgatatatgacagcctttactgtgatgcgtattaactgtcacaagaactttggctcagaggaatccagacgatgctcacaacccgactgtggactggcagaaatctcaacttttccttttgactttcccctttgatcagtaatatggaagacgt

SEQ ID NO: 361055 - DNA, 347 bp, Homo Sapiens
aagcactcacttggtaattttagtttttaaacccaagtccctcttaactttgcctttgataccaaacaattcaaaagttggatctgagtttggagaaagatatttccaacctaagtgggtattattttgaaaccagatttttaatttaatagcctatatttgtagtctgttggataggtgtttccaaagtgtgtcttctcaagtgaaaacgcaactctaggtttcaagtactccttttctccgatcctgtggtacttgaatatccaaaaaccctgcactttgaacaatcagctgttgctatctggaactaaacagaactatgagtaaaattgcctggatactttaaa

SEQ ID NO: 361056 - DNA, 563 bp, Homo Sapiens
atccagaagctgaaggatgagattgcagatgtgtttgcccaaatcgactgcttcggactgcggaggacagcggatggcccagaagcagaacgagctgtgtattgggcgcaagaagttcaacatggaccccgccaagggtatccagtatttcattgagcacaagctgctgacccctgacgtccaggacattgcacggttcctgtataaaggcgagggcctcaacaagacagccattggtacctacctgggggagagggatcccatcaacctgcaggtcctccaggccttcgtggactgccacgagttcgccaacctcaacctcgtccaggccctcaggcagttcctgtggagcttccggctgccgggcgaggcccagaagatagaccggatgatggaggcctttgccactcgatactgcctctgcaacccaggcgtcttccagtccacagacacctgctacgtgttgtccttctccatcatcatgctcaacaccagcctccacaatcccaacgtccgggacaggccgcctttcgagcgctttgtgtccatgaaccgcggcatca

SEQ ID NO: 361057 - DNA, 905 bp, Homo Sapiens
  misc_feature (231)..(256): n is a, c, g, or t
  misc_feature (274)..(288): n is a, c, g, or t
  misc_feature (496)..(555): n is a, c, g, or t
ttgggatggcccgaaggccagggggaatatcccgggaggttccaggggggaggaaaaccaataatggttccaaacatgttgaaacccccttttttaacggaaaaatccgggaatttaaccggacaaggggggcctggggcctgaagtacccagtttgctcaggagggttgagggcaggaggattcacttgaactcggaaggcggggggttgcagtaaaccggagattggtnnnnnnnnnnnnnnnnnnnnnnnnnngagtaagactccatttcnnnnnnnnnnnnnnngaaagaaacaaaaccttttcaggcaatcctcacactttaaatggcactcctcagtttacataataaatacactatttaaaagtattaggacccagacctcaagacccataagtatgtcttcaaacacaatgaaatgttttatacagtaacttaagactctgctaagtatttacaatagtatatgtaagtgaaaaactataaaccatgnnnnnnnnnnnnnnnnnnnnnnnnnnnnnnnnnnnnnnnnnnnnnnnnnnnnnnnnnnnngtcgtaaatcagtgcatccttttaagtcttccttatgttgtttttcctaagctgcctgtctctcggtgtgcacacccatgcaaaggaaaagccatggcgccaatgctttgcagagcgagaccctcttaaggagaacaaggactccggggggctgcgctagcctctgtctgaggaaaaccagggtaaactgcggaagaaagtgaggatgtatgtccagacaacgtccataaaggccatcctgaaatctcctttttaaatttatgaactttaaggactagaaacacaagcaaacgatagtagagatcaagaggaaaattacatagagaagtacatgcaattacaaagaggtc

SEQ ID NO: 361058 - DNA, 495 bp, Homo Sapiens
  misc_feature (327)..(327): n is a, c, g, or t
  misc_feature (480)..(480): n is a, c, g, or t
accacccaaaaattcaaaaacccaccaacatccaagtgatattaggcacatatcacttgaacttgacattttaatgatgaaaagcaaatttaagaagcaaaaaaattaacatatttaaattataatttgcacatcagattactttttcagatgtgtcagagctcacagataaaagtaatgaaaagaaacgtggtaaaatacattttaattttaccttcattataaattaaaatgaggcgtaagaaaaacattgagaccataatatatacatatggaaaactggccactgaaagatgcaaataattcatacaatatagcgtaagcttntcatatataaattatatgtcatttcatcaactgttagtatcatcagtctaaattttacaatatatattaaaatattaaaatgctaaaaaaatcattgcaatatagaatacactgtggcaaaatacgtatttgtggctttatagacaatctaantccattctatacaat

SEQ ID NO: 361059 - DNA, 747 bp, Homo Sapiens
gtgttgcactattcctagaacagaacccagagtcaggttacaaatttaaacttgctactcctcttccattggtctactgattattcagtcattgctattacagacagatgggaaagagataagctgagcaaatctcagttctgccattaaacaaatgtaaacctttaatttccatcatccttccccacctcggtcagcaatttgacttcttaactcctgaactacaaagtaaaatccaatctgatctagggttagggagcaagaaagcagtgaataatatccctgaagttcttggcgcttttctctggctagtatattacaacaggaggccctatcgtctgattttcatccagtgggctcagctggatgcttccaagcactctcacacctttcctttgtgtgcatctcagtactttagctttaggattggttgagtagcagggatatttgagatgaaagcaataagaggaggtaaagggaagctgcaagtggaaggcagagctaggacctttcctcgtagttctctgctcgttaaaatgaaaacagctattattgcatcattagtggaagaggggaaggaagcttcaggatcatgacttaaaacctgactccagaaacacttctactgaatacaggtaacatagcacagaacctagtgttctcaacttcccgccctctgcccatttttgctgatgctataaatacttgaattaaatatgggatcttctttgtaaaaaagctcgtgcc

SEQ ID NO: 361060 - DNA, 402 bp, Homo Sapiens
cgagaattggtcaacttcattctatagattgaaggtgtgactcaatccctaaaatctgagatttgcaacctattccaaactgagcactcaggattaccctcgtgggtgtcaagtgcctaaggagaatgttccatgtttgctagaattagaaaggggaggtaataattcttagggcctagagaaggttgggctagcccaatgaatattttcttttttgaagtaatggattatttctgaataattcaatattatgttaggaaacactttattccaggtcagtagaaggttgtctacctaagtgcccagatgttaaataagagtagtctgtcccatagaacaacatcacatagctcttcagaaaagacttccagaaaatctgagtaacttgaatgagcactcttg

SEQ ID NO: 361061 - DNA, 1056 bp, Homo Sapiens
  misc_feature (894)..(931): n is a, c, g, or t
tatcactgtatagagtgtggcaaggctttcagccaaaagtcgcaccttgttagacaccagagaattcatactcattagaaaccctatgaatattgtgaatatggcaaggccatctgaaggaattaacacctcattgcacattacatgatcacttccagagtagaaaactatgaatgtgggatagccttctgaaaaagccacaaatttatgaaacattagagaattcttccaaggtgacaaattatataatgaaaaagctgttaccagaaactttcagcagacatcttattgataatatttaatcagcattctcattgaaatctgaaacaaggtatcttccatcagcataacaacacaacacttgagctcctagccaatgtattaagtaaggaaaacaagtatcaacgaagaactataaaaataacttttatacaagaaataattagaaaatgtgttgatagaaaacctaagaataaacacaacaatgagttaggtctttatcaagttataaaatatgttgaaaggcacaaaagaacacctgaaaaatgatattttgtctgaaaagacttgacattgtaaaaatataatttctctcccaaatcactaagtttaatatacttctgaagtttacatcagttttattttaaggaacttcacaaacttatccaaaaattttatgtggaaaagtaaagaaacacaaatagctgaaacaaacttgacaaagcaagtagagaagacacactctattattagatatatcatgtacttatttaaagctgctgtcatttaaacaatgtattaccaagtgaataaatcaagcagtagtaagatagtgagcattcatacaaaaatccaagaagatacaggaattctgtgtatgacagtgctattgannnnnnnnnnnnnnnnnnnnnnnnnnnnnnnnnnnnnnaaaggttcataggaagaaaaatttttaggctttcctactgttttatccctataccacaaaataaaaattccaaccttaaaggaccccggaattattaaaaaaggccaaaatttttttaaaaacct

SEQ ID NO: 361062 - DNA, 134 bp, Homo Sapiens
ctcccaaagtgctggatccactccacgaggccttgtctcattttaattaaaactgttttgccatagtaaaaataaaagggacaaatagaaaactcagccatcagcaagaaaaggcttcttccacaggggcaaca

SEQ ID NO: 361063 - DNA, 868 bp, Homo Sapiens
  misc_feature (845)..(845): n is a, c, g, or t
cagttcctgctggtgaaggatcagagcaagtaccctatccgggagtctgaaatgcgggaatatattgttaaagaatatcgcaaccagtttcctgagatactcaggcgagcagcagcccacctggagtgcatttttaggtttgaattgagagaacttgaccctgaggcacacacctacattctgttaaacaaactgggacctgtgccctttgaagggttagaagagagcccaaatgggccaaagatgggcctcctgatgatgattctaggccaaatattcctgaatggcaaccaagccaaggaggctgagatttgggaaatgctctggaggatgggggtgcagcgggaaaggaggctttccatttttgggaacccaaagagacttctgtctgtggagtttgtatggcagcgttacttagactacaggccagtaactgactgtaaaccagtggagtatgagtttttctggggcccaagatcccacctagaaaccaccaagatgaaaattctgaagttcatggcgaaaatatataacaaagatcctatggattggccagagaaatacaacgaagctctggaagaagatgctgccagagcctttgctgagggttggcaggctctccctcactttaggaggcccttttttgaggaagctgctgcagaggtaccatcccctgattcagaggtttccagctattcctcaaaatatgccccacattcatggcctgagtcaagattggagagcaaggcaaggaagctggtgcagttatttctgcttatggattcaactaagctgcctataccaaagaaaggaattctgtactacattggccgagagtgcagcanagtgttccctgacctcctgaatc

SEQ ID NO: 361064 - DNA, 1050 bp, Homo Sapiens
gcaggtaccagatgtttatagatggatagtccttataaatttaagatcacatatttgccacatattaaacaggaaagctcccaagaattgaatgcgtacgagccattgacatcaatttattccttcaaataattgttaggcagtataaatgaaggctaatagaccatttacaaatgctgtttgttggcaaccagagccccctggagctgcctgtgtgcacggggacactagcaggcacagttgggctgcggtggaggaggagtttccttgagtctcgtgttctgctttgcagcagtgatggcaggatcagtctccaaactctctgacattttgtcgcagatgatatccacaaggcgctcaaatgtctgcttgacattaatgttgtccttggcacttgtttcaaaaaactcaaacccaagctgttctcctaaatgttgacctcgctcagttgagatgacccgctcgtcttccatgtcacacttgttcccaaccagaataacttgggcattgtcccaagagtatgttttgatttgagttgaccaatcttgtactgcattgaaggattcttcatttgtaatgtcatacattaaaataaagcccatggctccacgataataggctgtggtgatagtcctgtatctttcctggcctgctgtgtcccaaatctgaagcttgattctcttttcatttttgaatacagtttttactttgaaatcgatcccaactgtgctgacgaatgcagatgtaaaggagtcatctgcataacggaatagaaaagatgttttccccacactgctattgccgatgatgagtaatttgaacatgtagtcaaagttctgatcagaggagtctttctggccgtacctggcatcttgggcagaggccatctgcatgggcgcttcgtgtctcattgttggcaaatgtcctttctctctggctaggaccgcactggtctgggcttccggtcaagcgtgcacagtcccggcgctccacgctccacactctgcactcttggggttcgctaaccggctccaacatcaccactccgct

SEQ ID NO: 361065 - DNA, 1548 bp, Homo Sapiens
ctggaccggtccggaattctccggatctctgatgctcaagatgctatttccaagatctcttactgctgcttctcctggcttactggccagaaactagctcactcaaggctgccatccttcacttgcagcctccctgccattctccttcactggttggcaaccttgagagttcaaagaaaatcaacctctgtggtggtcaactaaaggtattaggaaactaagtctgtggctcttctctgctgatggaaacagaagggcgccaagccatgcctaaaaagatctcgccaataattcttgtctttgggtgttggagccctggattctggtgctatagctcctggtgccaaagtctggatctttccacatttcagcagcaccaacatctgctgctactcaaaatgtcctgttgaagagggacagctgtgatgcccttttgctggggctgccatcttgaaatctgagtgcaataggatttgcttgtaacagttatttcaggatattttgtttctttaatctgcacactttctagatagattttatttttaagtgtcctcagcattgcagaaaataacattgtaatagcaagtaaaggctggaggctgtttctctgggcttcaaatggctggcaaggctggctctcaaatcccaaagttgggaggcatgtttctgaaaagcaactgaggtgtgactgtttggacccaggcctcatcatcagagggtcctggaggaagcctccaagtagaggggagacctggtagttgaatagttgtttaatcaagccaaatagtcccactgcccccggtcaacaaacccacttttatgacagttttcttccgcagcttggctcttaaattttactggcaggtgtatggttgttggagggttcctagtgagttgggggacctggcaatagagctgcttggttggaggaagtgaagctggcttagtaccagcagctgatctcttccacgtgctgctgctttttttgccactctgatactaaaccagagaaagctgcaggtggataaagaagctgtggctgttttttgcttttgggtggcaatgagaaagagtcacagtgtgggttaaagggatctgcagtggggccaaggatgccaccccaccctcagctgtaggcaagcttgcacataaataacccccgtcagtggagtgttcgggatgcagggggcactatagtgttcttggacttgtcgtcctggggcagttttagttctttatatttagtgggtcagtgccaagtgctaccacttcccaataaaggaatggggacccagaggctgggtccctggctaccttgttatgaggttttgttatttctctgacaagattgctttggaaagagctgcttttagggattattttttgaatacccccgagtggggagcagggttctccctcaaagcctcaccaaccatagggatcaataggaaaaaggggccccttatttttccctggctgcctttcccccggcttcaaaaaccattatacctgaaattgggaaatgtgtattttttttaaagaaacaac

SEQ ID NO: 361066 - DNA, 1296 bp, Homo Sapiens
agcgcgcggcgcgcggggaggcccgaactgatccgcggcggccggagaccgctggggacagacaggtagcgccgtcacccgcgggatccgcagctccatctgccgggcgaaggggctctggtcgggagagggctcagcgggcggaagcgcgtctctagagaagggtgcggtcgataaccgggggcgcccctggaaggccgaggatgggcagcagctcgctgtccgaggactaccgccagtgcctggagcgcgagctgcgacgggggccgctgcgggcgtgtgcggggacccctcgctgcgcgcggtgctctggcagatcctggtggaggacttcgacctgcacggggcgctgcaggacgacgcgctggctctgctcaccgacgggctgtggggccgcgccgacctggcgcccgcgctacgcggcctggctcgcgccttcgagcttctggagctcgccgcggtgcacctgtacctgctgccctggaggaaggagttcaccaccatcaagaccttctctgggggctacgtgcacgtgctgaagggtgtgctctcagacgacctcctcctgaagagcttccagaagatgggctacgtacgcagagacagccatcggctcatggtgaccgccctgccccccgcctgccagctggtgcaggtggccctgggctgcttcgccctccggctggagtgtgagatcctgggtgaggtgctggcccagctgggcaccagtgtgctgccagctgaggagctgctgcaggcacggcgtgccagcggggacgtggcctcctgtgtggcctggctgcagcagcggctggccccaggatgaggagccgccacccctgcccccccgaggctcccctgctgcttacagggccccactggacttataccgggacttgcaggaagacgaggggtcggaggacgccagcctgtatggggagccgtcaccaggccctgactcgcccccggcggagctggcctacaggccacactctgggagcagagtgccaaactgtggggcactgggggcgggcctgggagccccagctgaggagctgccgcaccagcaggcccaccatatggggccttggaggaggggctggaacctgaaccttccgccttctccttcctctctctgcgccgtgagctgagtaggcctggggacctggccacccctgaaagctctgcagcggccagcccgaggcgttattcgggcagagggggtaccagcctcagcctattaggtcttgtcttcggagcccccagggtaaccagggcaaaacaagttgcctgttt

SEQ ID NO: 361067 - DNA, 931 bp, Homo Sapiens
tggggctcccagtcccggcccgcagtgccccacgatttgccaattctgttcccaagattggtgcccttttaaggcaagcctcctccgtggggcagagtaagggccttggtgactgctcccccatactagctggccgtcctctcgtcccctcgtcttcctgccaaagtgcgccggtataagtccagtgggaccctgtaagcagcagggaagcctcgtggggccagggctgcggctcctcatcctgggccagccgctgctgcagccaggccaacacaggaggccacgtccccgctggcaacgccgtgcctgcaagcagctcctcagctggcagcaacactggtgcccagctgggccagcacctcacccaggatctcacactccagccggagggcgaagcagcccagggccacctgcaccagctggcaggcggggggcagggcggtcaccatgagccgatggctgtctctgcgtacgtagcccatcttctggaagctcttcaggaggaggtcgtctgagagcacacccttcagcacgtgcacgtagcccccagagaaggtcttgatggtggtgaactccttcctccagggcagcaggtacaggtgcaccgcggcgagctccagaagctcgaaggcgcgagccaggccgcgtagcgcgggcgccaggtcggcgcggccccacagcccgtcggtgagcagagccagcgcgtcgtcctgcagcgccccgtgcaggtcgaagtcctccaccaggatctgccagagcaccgcgcgcagcgaggggtccccgcacacgcccgcgcggccccgtcgcagctcgcgctccaggcactggcggtagtcctcaggacagcgagctgctgcccatcctgtctgtccccagcggtcatccggccgccgcggatcagttcgggcctccccgcgcgccgcgcgcttcc

SEQ ID NO: 361068 - DNA, 522 bp, Homo Sapiens
ccgcctctgtcgccactctctccccctgttccgcgtctgcgtcgccaccaccgccgggggtatccggggggtcgcttaccgggctggccccgcgccacagccgtagctttaacctcccgtcagcggccgccccaggaagaggcttctcggccgcggagccacttggggcctcagttctcgccctcttgccgtcgccgcgggtcctggagaagcggccgcggccagtggaacggggcatcgcggttccaacgattaactgctgaagtactgatcgagttctgcatttcttcaatgaggaactacaggctgatcttctgccataatctcaaacagccataaatgacaaaagaatgcttgctcagtgagggtagctggtgcagaagccattttttaaacttaggtatttaagtactgaaagaaaagacagctttgatttctggctgcaaaaaagatatgaggaagagctcctccccttccttgagtaactgcaactccgttcttgctaacaaaatatttggaatt

SEQ ID NO: 361069 - DNA, 548 bp, Homo Sapiens
tggctcttcacaagcatggtgtcactgtttcttaccatgtacatgaacctgtcaagcactgcacacctcaagctttggaatcagactatgcaaccatcactctctctcttttccacattgattttcacacagtactatgacagatatcagatctccaaaggaagctagtgtggtctcatgtgctgaggctgcatgctctccccagtctattcacttacagtgcccagctgatgttgagcatcactgttttcctcgaaggtttaaagtagccagtggttcccttgatcacttgctgtggcacctcagactgccttggcacacgatttcgagagccatgggcgttagcaccgatgttgagggggacacaacctggggttgggactggcccagggatactgagtggctctcaggatctaaacagttgtggggttcttgccacagcctctttcacatcaggcaattagcagatgagttacagggggaggctcctaggccccagttggggaagattctggtgtctataaaatttaggaaaacttaagaaaaaa

SEQ ID NO: 361070 - DNA, 833 bp, Homo Sapiens
  misc_feature (603)..(616): n is a, c, g, or t
ggggagaagaagtgaagtcaagatgaagaaccatttgcttttctggggagtcctggcggtttttattaaggctgttcatgtgaaagcccaagaagatgaaaggattgttcttgttgacaacaaatgtaagtgtgcccggattacttccaggatcatccgttcttccgaagatcctaatgaggacattgtggagagaaacatccgaattattgttcctctgaacaacagggagaatatctctgatcccacctcaccattgagaaccagatttgtgtaccatttgtctgacctctgtaaaaaatgtgatcctacagaagtggagctggataatcagatagttactgctacccagagcaatatctgtgatgaagacagtgctacagagacctgctacacttatgacagaaacaagtgctacacagctgtggtcccactcgtatatggtggtgagaccaaaatggtggaaacagccttaaccccagatgcctgctatcctgactaatttaagtcattgctgactgcatagctctttttcttgagaggctctccattttgattcagaaagttagcatatttattaccaatgaatttgaaaccagggcnnnnnnnnnnnnnngggtgatgtaaaaccaactccctgccaacaaaataattaaaatagtcacattggttatctttattacgaaatcaccttcttaattatatgtttcatactcctaagtatcaaaatcctccaattatcacggctccacctgaaaagaggttatgcctctccttaggaaataacaggttttcctagccattttaacccaaattaaaacccagggggggag

SEQ ID NO: 361071 - DNA, 723 bp, Homo Sapiens
  misc_feature (364)..(378): n is a, c, g, or t
  misc_feature (646)..(664): n is a, c, g, or t
gggatcccacctcaccattgagaaccagatttgtgtaccatttgtctgacctctgtaaaaaatgtgatcctacagaagtggagctggataatcagatagttactgctacccagagcaatatctgtgatgaagacagtgctacagagacctgctacacttatgacagaaacaagtgctacacagctgtggtcccactcgtatatggtggtgagaccaaaatggtggaaacagccttaaccccagatgcctgctatcctgactaatttaagtcattgctgactgcatagctctttttcttgagaggctctccattttgattcagaaagttagcatatttattaccaatgaatttgaaaccagggcnnnnnnnnnnnnnnngggtgatgtaaaaccaactccctgccaccaaaataattaaaatagtcacattgttatctttattaggtaatcacttcttaattatatgttcatactctaagtatcaaaatcttccaattatcatgctcacctgaaagaagtatgcctctcttaagaatacagttttctagcatttaacaaataaacaagggggagaaaaataaaactccaggaagtgaaaatccaggagggggtaataaaaatggtcccttggatttcccccccgccnnnnnnnnnnnnnnnnnnngaatttcccctgggaaaaaccaaaacctttccccacttttcctctaaaatatgcttttt

SEQ ID NO: 361072 - DNA, 868 bp, Homo Sapiens
  misc_feature (625)..(643): n is a, c, g, or t
ggggagaagaagtgaagtcaagatgaagaaccatttgcttttctggggagtcctggcggtttttattaaggctgttcatgtgaaagcccaagaagatgaaaggattgttcttgttgacaacaaatgtaagtgtgcccggattacttccaggatcatccgttcttccgaagatcctaatgaggacattgtggagagaaacatccgaattattgttcctctgaacaacagggagaatatctctgatcccacctcaccattgagaaccagatttgtgtaccatttgtctgacctctgtaaaaaatgtgatcctacagaagtggagctggataatcagatagttactgctacccagagcaatatctgtgatgaagacagtgctacagagacctgctacacttatgacagaaacaagtgctacacaactgtggtcccactcgtatatggtggggagaccaaaatggtggaaacagcccttaaccccagatgccctgctatccctgactaatttaaagtcatttgcttgactgcattaactcctttttcctggagagggctcttccattttttgaattcagaaaagtttagcatattttttttacccatgaaattttgaaacccgggggcnnnnnnnnnnnnnnnnnnngggtgggaaggcgaaaaccccatattcccctgcccccctgaatttatcttaagaatagcgtcccaccgcgtttatcctctcttaagggggaataccccctcccgtatatctaaagggggtcaccgcttctagcgacgccccagaaactttccacgatttgctatggcttgccccgctgcaaaagaagggacctgctcccgcctacaggaacaacccccgtttcct

SEQ ID NO: 361073 - DNA, 669 bp, Homo Sapiens
  misc_feature (606)..(616): n is a, c, g, or t
gggagaagaagtgaagtcaagatgaagaaccatttgcttttctggggagtcctggcggtttttattaaggctgttcatgtgaaagcccaagaagatgaaaggattgttcttgttgacaacaaatgtaagtgtgcccggattacttccaggatcatccgttcttccgaagatcctaatgaggacattgtggagagaaacatccgaattattgttcctctgaacaacagggagaatatctctgatcccacctcaccattgagaaccagatttgtgtaccatttgtctgacctctgtaaaaaatgtgatcctacagaagtggagctggataatcagatagttactgctacccagagcaatatctgtgatgaagacagtgctacagagacctgctacacttatgacagaaacaagtgctacacagctgtggtcccactcgtatatgggggtgaagacccaaaatggtggaaaacaacccttaaaccccccgatgccctgctaacccggacttaattttaagttccttttccttgaactgcattagcctcctttttttcttggaaaaggggcccctccctttttggaatttccaaaaaggtttggccctannnnnnnnnnnccccaatggaaattttgggaaaaccagggggcgccccctctttcctctctccc

SEQ ID NO: 361074 - DNA, 1356 bp, Homo Sapiens
  misc_feature (406)..(419): n is a, c, g, or t
  misc_feature (676)..(691): n is a, c, g, or t
ggatccgaattattgttcctctgaacaacagggagaatatctctgatcccacctcaccattgagaaccagatttgtgtaccatttgtctgacctctgtaaaaaatgtgatcctacagaagtggagctggataatcagatagttactgctacccagagcaatatctgtgatgaagacagtgctacagagacctgctacacttatgacagaaacaagtgctacacagctgtggtcccactcgtatatggtggtgagaccaaaatggtggaaacagccttaaccccagatgcctgctatcctgactaatttaagtcattgctgactgcatagctctttttcttgagaggctctccattttgattcagaaagttagcatatttattaccaatgaatttgaaaccagggcnnnnnnnnnnnnnngggtgatgtaaaaccaactccctgccaccaaaataattaaaatagtcacattgttatctttattaggtaatcacttcttaattatatgttcatactctaagtatcaaaatcttccaattatcatgctcacctgaaagaggtatgctctcttaggaatacagtttctagcattaaacaaataaacaaggggagaaaataaaactcaaggagtgaaaatcaggaggtgtaataaaatgttcctcgcattcccccccgcnnnnnnnnnnnnnnnngactttgccttggagagccagagcttccgcattttctttactattctttttaaaaaaagtttcactgtgtagagaacatatatgcataaacataggtcaattatatgtctccattagaaaaataataattggaaaacatgttctagaactagttacaaaaataatttaaggtgaaatctctaatatttataaaagtagcaaaataaatgcataattaaaatatatttggacataacagacttggaagcagatgatacagacttctttttttcataatcaggttagtgtaagaaattgccatttgaaacaatccattttgtaactgaaccttatgaaatatatgtatttcatggtacgtattctctagcacagtctgagcaattaaatagattcataagcataaaacaccactccacccgaacacttgtctaaaaccaaaccgcctagtaaaacaaacgacaccgatcgcccgacgcgaaaagcgatcaagacataatgaacatatgcgggcccccctagggctctagaaaaaaatttttttagaacaatttagtttgggccgcggggcgccccataaaggaaaaatgtaaaacggggccattgccgcttttcccccgcagaaacccctggtccccgcacaattggctctgggataccccccctcc

SEQ ID NO: 361075 - DNA, 948 bp, Homo Sapiens
  misc_feature (755)..(768): n is a, c, g, or t
gggagcatttaaacttcagacttcaaccacagttgtgattgtttttagtttgttagctgcctggagtgttattttaagaaagcagaagcaccatcatttgcacactccttatagatcacacaccttaaccctgactttttttgctccagtttttcagaagaagtgaagtcaagatgaagaaccatttgcttttctggggagtcctggcggtttttattaaggctgttcatgtgaaagcccaagaagatgaaaggattgttcttgttgacaacaaatgtaagtgtgcccggattacttccaggatcatccgttcttccgaagatcctaatgaggacattgtggagagaaacatccgaattattgttcctctgaacaacagggagaatatctctgatcccacctcaccattgagaaccagatttgtgtaccatttgtctgacctctgtaaaaaatgtgatcctacagaagtggagctggataatcagatagttactgctacccagagcaatatctgtgatgaagacagtgctacagagacctgctacacttatgacagaaacaagtgctacacagctgtggtcccactcgtatatggtggtgagaccaaaatggtggaaacagccttaaccccagatgcctgctatcctgactaatttaagtcattgctgactgcatagctctttttcttgagaggctctccattttgattcagaaagttagcatatttattaccaatgaatttgaaaccaggggcnnnnnnnnnnnnnnggggtgatgtaaaaccaactccctgccaccaaaataattaaaatagtcacattgttatctttattaggtaatcacttccttaattatatgttcatactctaagtatcaaaatcttccaattatcatgctcaacctggaaagaggtatggctctctttagggatacagttttctagcatta

SEQ ID NO: 361076 - DNA, 845 bp, Homo Sapiens
  misc_feature (478)..(492): n is a, c, g, or t
  misc_feature (714)..(715): n is a, c, g, or t
  misc_feature (751)..(767): n is a, c, g, or t
ggaagtgtgcccggattacttccaggatcatccgttcttccgaagatcctaatgaggacattgtggagagaaacatccgaattattgttcctctgaacaacagggagaatatctctgatcccacctcaccattgagaaccagatttgtgtaccatttgtctgacctctgtaaaaaatgtgatcctacagaagtggagctggataatcagatagttactgctacccagagcaatatctgtgatgaagacagtgctacagagacctgctacacttatgacagaaacaagtgctacacagctgtggtcccactcgtatatggtggtgagaccaaaatggtggaaacagccttaaccccagatgcctgctatcctgactaatttaagtcattgctgactgcatagctctttttcttgagaggctctccattttgattcagaaagttagcatatttattaccaatgaatttgaaaccagggcnnnnnnnnnnnnnnngggtgatgtaaaaccaactccctgccaccaaaataattaaaatagtcacattgttatctttattaggtaatcacttcttaattatatgttcatactctaagtatcaaaatcttccaattatcatggctcacctgaaagaagtatgcctctcttaggaatacagtttctagcattaaacaaataaacaaggggagaaaataaaactcaaggagtgaaaatcanngagtgtaataaaatgttcctcgcattcccccccgcnnnnnnnnnnnnnnnnngactttgccttggagagccagagcttccgcattttccttacaattcctttttaaaaaagtttcactggtgtagagaaa

SEQ ID NO: 361077 - DNA, 660 bp, Homo Sapiens
tgcctacagccctgcccggtgcagtgggaagcggacagcccaaacagcacgacggatcatagggctggagctggacactgagggtcacaggctttttgtggctttttctggctgtattgtctacctccctctcagccggtgtgcccggcatggggcctgtcagaggagctgtttggcttctcaggacccatactgtggatggcatagctccaggggctgtgtggatatcaggggatctggtgggactgatgtggatcaggctgggaaccaggaatccatggagcatggtgactgccaagatggagctactgggagtcagtctggccctggggattctgcttatggcgtgcgccgggacctgcccccagcctcggcctcccgctccgtccccatcccactcctcctggccagtgtggccgcagcttttgccctgggcgcctcagtctctggcctcctggtctcctgtgcttgtcgccgcgcccaccgacgtcggggcaaggacatcgagactcccgggctccgcgccctctctccctccgcagtttggcccggctccacggtgggggcccagagccacccgccgccctccaaggacggggacgccggtgcagacgcccgcagctctaacaccacctttccttgccgcctccggagggcgtg

SEQ ID NO: 361078 - DNA, 1262 bp, Homo Sapiens
acaggtccaaggacttaaccttcctgcccatgagattcttctggaagaggctctttcttgctctgctctttcttttccagaaagtctcatccttggctggatgggtttccgtattggtggctggtagactacacagctctctccttatctgagctgggtctgtgctccactgtggatcttctatgggcagagaatgtgtgcaacaggctaccttggggttcgaatccagagtttgggatggtgctagcactgtggacatcctctggctgtgtttcctcttcacagcagaagacacatggatagggagaagtgggcaacttcttaccctcagcagggggcacaggatcttcctgtgagaattgccccaaatcagagtcttgctggaggaactgcttctcttctttcactctgtccatcacttccaacacaacttggtccaaactgttccttttgggggtgttgtggggtggtggtggccggtctcggggccatgggtacagacacatcttggagatggctttccgaaggcggtctctgggtgactgggtttcaggctctcgggacagaatcctgatggatggcacatcagttggatggttgcaattccagaacatgtgggatggtgtgaacttttggacaggtgtcttagacacataggagtagagacagaagaaggcatcagcagtgacagccagtgtttgcacctgcttaaacctgctggccagcatgaggcaggggtcttccatttcaatcctccgcacctgggacttcaggaagagctggaaatcaatgcccttggcctgagagggggtggtgaaaaaatcgggcgggtatccgagaagtgtctttgtgatcctcttggccaaagcccagactgaaagaggacatcttctgcatcttcttgcactttgtccagaatttctgagatgcttgaactagtcttgttggtccccccagtcatgatgctggaagccaaactacagccaagatcaagtagctggcaaggcctggctgtctcgaggaaactcctggagaagagtttgccattggcggccagtagtgtggcctccgctcccagggtcaagtcatcttcaaagctggtcccatggctgcagaagccattgtagataaactgtcctgcttcctcagaaaatccttcttcagagtatccgcaatcctgcagccagtcttcaattttattgattggattccctagaaaagtcagacactagatcactgtgagaactgaacgaaaccccgct

SEQ ID NO: 361079 - DNA, 665 bp, Homo Sapiens
agctgcagctataagtatttaaataaatcatcaaagggtttgttgcatcagccaagctttttagagtcccaaatttaaaagctgagataaaatcttatcttgctgtgtctttacggaaggatccccagatacctggggttaaggtctggctcaagtcaggacctaggaagcagcatatgttgactggagagacctgggtttgaatcccagctgtgcatgttattagttatatgaccttgggcaagattcacaaccttagcccttctttaccttctcaccctaatctggggtaaacatttgtaccttttggggttgttgcaaggattaaaagaggcaaactctgtgacaatgcctagctccatgctggacttaatataaatgctcaataaattttgacaccatcttctatcccccatatcctacaagataaaacaagacagaatgagaaagtgcttaggtttcttcatctgtaaaaaggtaattggaaaaagaaaattaaaggcagaagctcactcagcctctagggtctgggagatgtcttcttgttgtttaagttttagtctgtactttctaaaaaccagtagtgggcctctggcatttcctggcacatcttagcagataggtattgaatatataccatgtgccacagtactgcgccctttgta

SEQ ID NO: 361080 - DNA, 644 bp, Homo Sapiens
gagacgcccacagggacatgcctaggcaaacgatgaactaacgggcatgaagatgtctagggaaaaaacaaggaagagtaaaaagttacacagaatctatgcagcggcaacaaaatcacttttaagggtgcaggagaaaaactaatgcaaatcttaggtcattagggagtctccgagccattcacataatttgcatttcttacactccttatccacagcacaatgaaaccccaagagaatccatctggagagagcgaaaggggatggattccgggtgttttggggtgagggacagggggagaaggtccagtttcaacaaatgtgacatacggggaaagtcagacgactgaactgtaaactagataatggaagttacaaacaaaataatcagacagatacaaacaacgagaggataaagcatgaacttcaggtctagggttcaacggtgaaaaaaagcccattcctagaacaattcctctagagactacttcagaaggttctagctagacagagaactgctctttaggtacccaataagttaacaataggcaataaataacttccattatttctgaggcagtaaaaattttgtataaaaatagaaatgcttttttacaaataaaatttacaggcctgtggctttc

SEQ ID NO: 361081 - DNA, 281 bp, Homo Sapiens
  misc_feature (152)..(152): n is a, c, g, or t
  misc_feature (174)..(174): n is a, c, g, or t
taaatattcttctgcacagagttgaaaattattgtgcatcttgcaggtgaagtactttcattggattgtatttccatttgttgaggcaccggcaaataataaaatttgttctaatgttttctcaagctgtacaaagctccaagggtcaaagnctccccaggaatacagaggaantatatacaaggactgtcttctctgtgttcaccaaatatgggattacaatgtgtcattttaataactcctacgccaccccctagccgacggtaattcatcccgccata

SEQ ID NO: 361082 - DNA, 641 bp, Homo Sapiens
cgagaccctgccctgcgagtctacacaccatgccctgctctgctgcctggtgggcaccctcccgctagccatatttttccgggtgtcctccttgccaaaaatgatcctgctctccgggctcaccacgtcctacatcctcgttctggagctcagcggatacaccaggactgggggtggtgccgtctccgggcgcagctacgagccgattgtggccatcctgctcttctcctgtgcgctggccctgcatgccaggcaggtggacatcaggctgaggctggactacctctgggccgcacaggcagaggaggagcgagaggacatggagaaggtgaagctggacaacaggcgcatcctcttcaacctcctgccggcccacgtcgcccagcacttcctcatgtccaaccctcggaacatggacctctactaccagtcctactcccaggtgggcgtcatgtttgcctccatccccaacttcaatgacttctacatcgagctggacggcaacaacatgggggtggagtgtctgcggcttctcaacgagatcatcgccgactttgacgagctcatggaaaaagacttttacaaggacatagagaagatcaagaccatcgggagcacctacatggccgctgtggggctag

SEQ ID NO: 361083 - DNA, 1128 bp, Homo Sapiens
  misc_feature (1031)..(1031): n is a, c, g, or t
  misc_feature (1080)..(1080): n is a, c, g, or t
  misc_feature (1115)..(1115): n is a, c, g, or t
ccgctgtccccgcgccgcggtgggggagctgatccagccgtccgtgagcgagctgtcccgggccgtgcggaccaacatcctgtgcaccgtgcgcggctgcggcaagatcctgcccaacagccccgcgctcaacatgcacctagtcaagagccaccgcctgcaggatggcatagtcaatccaacaataagaaaagatttgaaaactggaccgaaattctactgctgtccaattgaaggctgccccagaggccctgagagaccgttttctcagttttctctcgtaaaacagcactttatgaaaatgcatgctgagaagaagcacaaatgtagtaagtgcagcaattcgtacggtacagaatgggacctgaaaagacatgcagaggactgtggcaagaccttccggtgcacatgcggctgtccctacgccagtagaacagcactgcagtctcacatctaccgaactgggcacgagatacctgcagaacacagggacccacctagtaagaaaaggaaaatggaaaactgtgcacaaaaccagaagttatccaacaagaccattgaatcattgaacaaccaaccaatccctagaccagacactcaagaactagaagcttcagaaataaagctagaaccatcttttgaagactcttgtggctctaacactgacaagcagactcttacaacaccaccgagatatcctcagaagttgcttttaccaaagcccaaagtggctttggttaaactacccgtgatgcagttttctgtcatgcctgtctttgtgcctacagccgactcctcagcccagcctgtggtgttaggtgttgatcagggctctgcacaggggctgtgcacttaatgcccttgtcagtaggaaccctgatcctcggcctagattcagaggcttgctctcttaaggagagcctacctcttttcaaaattgctaatcctattgctggtgagccaataagtactggtgttcaagtgaactttgggtaaaagtccattctaatccttttacaagaactaggggnacacgtgttcaaaagataggcatttttttcaatcaacgtgcaggacagntctgtcttatggcctcacaaaacttttttaccctntggcacagtgggg

SEQ ID NO: 361084 - DNA, 576 bp, Homo Sapiens
ctgatgattataatctgctactttgattatgcatcagtgaaatgtccaccaagcagttgaaaacactgatgtacatgtattctaaaacttactaaataatgggccagtaagataccagtatctttctagaacgtttagaaagagatcttagttgccagagaaaactcagatacaacatgggcctgtaaacacatacactctagtctacaaatatgagacttttcaactcaacaataagtgggccgaaaacaatatagggcgtatgacctagactccctgggtgctgctcagcagctgcttcagcatcaaattgtgttcatcccattttctaatctaaccaagcacttggaactaaagggctgtatgtgagcccaagaaactgatatattaaatatttttcaccacatatgacatctttcattcagtactgcctgttagtcaattactgtggattctttcaggcttcatcaatgcatgtgtggctcgatggtttaggaataaatatatcctcgcccaatgctttccactgaaatgaaaggtcacaacttctatgtcccctatcaaatgtgtcacgcc

SEQ ID NO: 361085 - DNA, 431 bp, Homo Sapiens
ggacgctcggtcccgcgctgcgcatccccgcggacgccacagcgctagacgtctcccacaacctgctcccggcgctggaccttgggctcctggccaaactctcagcgctggcagagctggatataagcaacaacaagatgtctacgttagaagaaggaatatttgctaatttatttaatttaagtgaaataaacctgagtgggaacccgtttgagtgtgactgtggcctggcgtggctgccgcgatgggcggaggagcagcaggtgcgggtggtgcagcccgaggcagccacgtgtgctgggcctggctccctggctggccagcctctgcttggcatccccttgctggacagtggctgtggtgaggagtatgtcgcctgcctccctgacaacagctcaggcaccgtggcagcagtgtccttttcagctgcc

SEQ ID NO: 361086 - DNA, 417 bp, Homo Sapiens
ggcacgaggataaggaaaaaaagatgttaataaattctattcaattgttgctataaaggaatgttaatagatcacttccatgaagaattaaaatcaataaggattaacaggatgaagcaatcaatttcagatgacaacattcagccatctagataaagcttctttcagttcccagagtgtagttattctttctccgtcatctccttatcccctccctcatactttcccctgactagctttactcatccttcaggtctgaatgtcacttcctcaggaagcatgccctgaaacccccaggtcatcactttgttagagtaaaagtctatctcctcctgagaggcaagaaagccaatctgacctggaaatatcaaagcagttactgtcagtagatcattatttatagtgattctagatatc

SEQ ID NO: 361087 - DNA, 754 bp, Homo Sapiens
  misc_feature (74)..(124): n is a, c, g, or t
  misc_feature (198)..(272): n is a, c, g, or t
tgactaggtaccgaggctgggtgttaatcggcacgaggcctacatgcttctaatttccacatgccacagtgatnnnnnnnnnnnnnnnnnnnnnnnnnnnnnnnnnnnnnnnnnnnnnnnnnnntgggggcccagatcctggtcattccccacaggtcttaataaaggttcatggaaggaaacctgtttcctaaggtnnnnnnnnnnnnnnnnnnnnnnnnnnnnnnnnnnnnnnnnnnnnnnnnnnnnnnnnnnnnnnnnnnnnnnnnnnnatgtaaggagcaggagtgactgggtcctgagtttagggagttgggcaagaggaaggagagatggagacaagcctggaccaagagccactcagagctgcctggaagggaagccaggctgagataaatggcaaggcaaagaaataagacactgacaaggatcaagccagggttgggtagggactgggaacagagtctgcctccatgagaagctgtcacattgctgctctggtgccctgtgacagcggcaccatctccagctggagactcccctctctggatcttgtcattgtgactttgctttgttggacaaccaggagtggtgacatgcagggaatatggtgcccagggcagctagcaatgccacgaccagtacatgatgccaaccacccgtcattggccatctcatcatctgcaaatggagtggggtgttaatatgatcttgatatagttggatgcatgatcgaatgcaaaaaaggtatgga

SEQ ID NO: 361088 - DNA, 448 bp, Homo Sapiens
ggggctatgcttatcttggacgttcagggacctatacgctcagaagcttggctgctttttgatgtgaccatctcgacatgagtctttagggttttctacagcagagaaagaacaagaaataaattgtctcttaaatgttcttaccattttcattggccaaagcaggtcacatgatcatgcttacctataactttgtagagaactgtaattcttctgtcttctcagagagaaaagaggactggaaatgacagagaatatgaataacatataccacagtttcattgggcatgagaaaatggtgatactttgatagatctcagaaaattacatacactcagcaccatatacatgccctcgaagagaagagaccatagactcttaaaaatgtaagtatctcagaggagattttggccagtgaatccaaattatacagcttggaagtctacag

SEQ ID NO: 361089 - DNA, 2175 bp, Homo Sapiens
ccatgtctgaatgtgctttcctggttgctgtttgtcagtgacactgatgtactggctgatgcctgctgggccctctcatatctatcagatggacccaatgataaaattcaagcggtcatcgatgcgggagtatgtaggagacttgtggaactgctgatgcataatgattataaagtggtttctcctgctttgcgagctgtgggaaacattgtcacaggggatgatattcagacacaggtaattctgaattgctcagctctgcagagtttattgcatttcctgagtagcccaaaggaatctatcaaaaaggaagcatgttggacgatatctaatattacagctggaaatagggcacagatccagactgtgatagatgccaacattttcccagccctcattagtattttacaaactgctgaatttcggacaagaaaagaagcagcttgggccatcacaaatgcaacttctggaggatcagctgaacagatcaagtacctagtagaactgggttgtatcaagccgctctgtgatctcctcacggtcatggactctaagattgtacaggttgccctaaatggcttgggaaaatatcctgaggcttggagaacaggaagccaaaaggaatggcactggcattaacccttactgtgctttgattgaagaagcttatggtctggataaaattgagttcttacagagtcatgaaaaccaggagatctaccaaaaggcctttgatcttattgagcattacttcgggaccgaagatgaagacagcagcattgcaccccaggttgaccttaaccagcagcagtacatcttccaacagtgtgaggctcctatggaaggtttccagctttgaagcaatactctgctttcacgttcctgtgtcagaccaggctacccagtcgagtcctcttgtgggagcccacagtcctcatggagctaacttctcaaatgttttccataatactgtttgcgctcatttgcttgccttgcggcacctggctctcttacacacatctggaaaacctccggctctctgtggtggaatacccttctaataaaagggtaaccagaacggcccactctcttttacggaaaaatccctaggctttggagatccgcacttacattagagttatgggaatatacacatattaatgtggctccctttttcttgtgggggaataaaagaggactcctcctcattccctttaacatgggggaaaaaactgacattaaaagatgagactaaatctttatcttgaattttacacaactacttacgacaagggagatgtttagacctgttgtgtatacttcagagtacttttcatgagttcttccacagtgaacccttggattacctggtggctttttctagccagatttgcattaatccttactgagattggatggttttctttcctctattggcgccattcttcagatattaaagttaaaccatccactccctcaccttcagccttcagtgaatgtgctttctagttgtcaggaatgctgaagaattaacactttgactcctaaatgtgatactggtttgtagattcccttagagcagaaaggagaggggcacatattaatttgtatcgcttttgcttctctttggtcttttgtgtcttagaatttggaagtggttcatttctgttgctggtatgaggatttcgaatacttagtaatcgaaaaccatatcctgtaatttaataaaaaaaactaaggacgaaaaaaccctccaattttcccaaatgcaatcagtgtaactaggggctgtgtttctgcattaaaataaatgtttcaggctttgtggtcctgatcaaggtcctcattaaaaaattggagttcaccctaggtgcttttcccctctgtgactggcagataacacatacttttgaaagtaactttgggatttttttcttaggtgcagctcgattctaatcttttcatgctgcacacgattcctttaatgtagcatccttatctgaaagaaataaccatcttctcaacatgacctgcttaacccaaataagaacagtgatcttataacctcattgtttcctaatcattttatttcatctcctgctagtactgtgccgcttccccctccccccacacaaaataaaaacagtatctgccttctggctcatttaaaaaaaa

SEQ ID NO: 361090 - DNA, 548 bp, Homo Sapiens
ctattaagacatctaaactaaaaagggcaagagtgagttattaaacttgggctcaagttctacaagtaacctatattacccaagatatttctgacaagtagctccagagtaggttgaagcaaggatttctattgcctcaagcctcgactatgcctacttcttatatcccaggattgtttttcagcaaaaagaaatgggagagttataaagaattaaatacacatctaattatgacaccaaggacaatttcctaaggactggaactaaacattcttatttggtaagatcgtctctcacttacttttcccctcaaaggcagctaatcttttactctaggtaatatgtgggaggttataaagtgatagacacaataataatttttctttaacttacaatatgctgcctgattggtacttacttgatctgttcagctgatcctccagaagttgcatttgtgatggcccaagctgcttcttttcttgtccgaaattcagcagtttgtaaaatactaatgagggctgggaaaatgttggcatccatcacagtct

SEQ ID NO: 361091 - DNA, 424 bp, Homo Sapiens
aaatagggcacagatccagactgtgatagatgccaacattttcccagccctcattagtattttacaaactgctgaatttcggacaagaaaagaagcagcttgggccatcacaaaatgcaacttctgggaggatcagctgaacagatcaagtacctagtagaactgggttgtatcaagccgctctgtgatctcctcacggtcatggactctaagattgtacaggttgccctaaatggcttgggaaaatatcctgaggcttggagaacaggaagccaaaagggaatgggcactggcatttaacccttactgtgctttggattgaaggaagcttatgggtctgggataaaattggagttctttacagagttcatggaaaaccagggaggatcttacccaaaagggccttttgatctttatttgaggc

SEQ ID NO: 361092 - DNA, 825 bp, Homo Sapiens
aaattacaaatgtaatttaatacatgtacattttaaaatcaatccctgttatcaaagataaattcagagtttaaatctctttcccaggttcagtgctgtgcaagggttctaattccaaatacttatgattttatcaccttttctaagagaaaatgtttgcctgttaactttttaccttccttgctcttggtctcagcttttcagtttgaataaacacagaaaggcaattttcagcatttcaaaaaatgtactttcctcttagtcattcaaataattacagttatttttagatctcaaagtttcaaaaaaagcagctcaatttccctttaaatatattactagatattttttggtgttgtatatgttgttctattcttattttaggcactgtaattattcacaacattacaatgactctatatctaacctatgcaacaattataatcttaataccttctaaggtattatttgattttgtgtattatattactattgaatttttccttcaagataaatggttggaagagaattttaaagccctgcagcacttttgctttgagtagtgttaatacatattttctgtcatgcttaatatttaaacttctgaaataggaagacaagaggcattggaagctgcaaatttcctcaaactacattctactccaactccaatttattttgttcaacattaaatatttttctttacaaaaacaagtatatcttaggctaatttttaaaaacagaatttctgctctataataacacagctaaagggaaataacttttcaatttcagctgcactagaactatgcaaaactaagttcc

SEQ ID NO: 361093 - DNA, 698 bp, Homo Sapiens
ctgtattcttgatggatcctcggacctagccagacttacttgtgtgggatcttatccagaaatgggaaactccttgggctaaagtatttcctatccgtctgatgttgagacttggagctgaatatcgactttatccatgcccactattcagtgtcagataacggaagccattgtatggagagacggggcataccatcatgaatcttcttgcagacttcagaaattaccagtataccttgccagtagttcaaggtttggtggttgatatggaagttcggaaaactagcatcaaaattcccagcaacagatacaatgagatgatgaaagccatgaacaagtccaatgagcatgtcctggcaggaggtgcctgcttcaatgaaaaggcagactctcatcttgtgtgtgtacagaatgatgatggaaactatcagacccaggctatcagtattcacaatcagcccagaaaagtgactggtgccagtttctttgtgttcagtggcgctctgaaatcctcttctggataccttgccaagtccagtattgtggaagatggtgttatggtccagattactgcagagaacatggattccttgaggcaggcactgcgagagatgaaggacttcaccatcagacggataggaaatactttagcccaaggagtttcccatttctggataagaatccccaacatgtaagct

SEQ ID NO: 361094 - DNA, 444 bp, Homo Sapiens
cagggcaggagaggaaggcagtgctgtgaacctggtcccaaggtgacctgagattgccgagaggtgtggagaacctgggtggagttgaggcactgtcagtatgcagaggaggctcagccttcgcaatatagctgtggaattctgcaatctggagctgtgctaaaccaggcaggggtcagcaatctaggtctgtgagtctagttccacttgggactgatgatgagctcacaaagtggcagatggcccagctgtgaccagcaacgtagcacagtgctggccaagtgctggggtcatggcagtgcttcagccccattggccatctcaggtgctaggcaagggagctgaagtaggaattcagtcatcttgatgaggctgccagagctgatggaaagaaagggagtctgagactcagcaggcacatggaagatgaataaagttgaggtt

SEQ ID NO: 361095 - DNA, 575 bp, Homo Sapiens
aagtggctgcagcagtgggagtggcactccccctatccctggagcgggcagcccatgccagtgctgacatacccgaagcctccagtaaaaaggcagagaaggaggcaagttggctagctccgagggcaggtgaacagggagaggccatgaaacagtttgacctgaactatggaagtgccatcattgaaaattgcgggtccagccccggggaggagagtgaggtgggttctatggtgggcgaaggcttcatcgaagtcctgaccaagaagcagcgccgcctgctggaggaagagagaagaaagaaggagcaggccgtgcaggtgcctgtcaaaggtcgaggcctttcctcccgtattcctcctcgatttgcaaaaaagcagaacaacttatgtctggagcaaggtgacgtgaccgtgcctggcagcagcctgggcactgagatctgggagagcagcagccaggctctccctgtgcaggccccagccaacgactcctggaggaaagctgtcactgccttcagcagcaccgagactggctctgcggagcagtcccacttagggggggtccggagctcg

SEQ ID NO: 361096 - DNA, 471 bp, Homo Sapiens
  misc_feature (18)..(18): n is a, c, g, or t
  misc_feature (39)..(39): n is a, c, g, or t
  misc_feature (47)..(47): n is a, c, g, or t
gccacatccaaacagaancccaaaaccccactcagaacngacctgangccctgtatggtggagctgaaagcaagctggctgccctaagcaatggccttcatttgggaattaatgttcactgatcaactgcagcagtttatatctgtccatgttttaatccactgcatgaggaagtgccaataagtgtattaaatatttccaagcatagctacaaaattatatgtttgcttaacacctttctatgatagaggaagtatatactatggttgtcctcttgtagtatgtcttttaattttgttcaatgtgttatcaactgttttaaggaatggggattgaaattcgtgtgcaaactgatatgtatataactcctgaggcaacagaagtgcccggtcatatggtgtaaaaatgtaaatacaggaaaatttcatttttctaataaagataatttctgccaattgatatgaaaatgag

SEQ ID NO: 361097 - DNA, 406 bp, Homo Sapiens
  misc_feature (20)..(20): n is a, c, g, or t
tccctaattatatactcttntggtttttaggtagaaactggagctatcaatattttcatgtaagtatttcaaggagtagctctttaaaaatggttcctaaattagattttaaaaattcatggtcatctaaatgcatgtttagtcacaatgtatcagtattgtgtttaaaggtgctcagcatcactttttgaaaactatgtttacatatttaaaatgtttaattattttgaaatgtatagggtattaaatacaagcttctaaaattttcagtatctatattggctttctctaacagctctacagcaaagtttgacatgttttttgtgtgtgtcatgtattgtaagttgtaatatctgtaggagtgagttggacattctaaattagcagtaaaaaattcacaattaca

SEQ ID NO: 361098 - DNA, 449 bp, Homo Sapiens
tctttgtttctgaaacagtcttatctcatctgtccactgctgctctggaagggtcaggaccagcactgcagacactcggccatgctgtgagtgagcccagacatacgcgtggaatctgaacacccaacgctggcgttcccgtgccagtctgagggctgcggctccagcgcttgtccacacacacgcctgcctctctctagttcctccactgcctggcttcctcgcttgcaaaacccagcatgtgaaatgaggacacctccacggagacccttccgagcagggaggtttcatcacacctttcgttcttgccaaggagtctatcgcctcatccacaacatctgcttgcgggagaaacagcaaatgtgtccctctgagggaaggactgaggagggctttggtagtcacagattgagacacatttctgcgaaaactggtattatgtttcctcg

SEQ ID NO: 361099 - DNA, 958 bp, Homo Sapiens
  misc_feature (851)..(888): n is a, c, g, or t
  misc_feature (936)..(936): n is a, c, g, or t
ttgtaccttcatcgtccctcattgtatagcttcacgtgttccctagagtctttttggttcttgaatttgttttttgcatatgttaaaactttatctaaaggtatcacatccagggtataaatactgaagccataccatcctttactattaacagatcgtgtatgcagaatcaggttttgaagtttacaggctttgctttaattcggtttgatttttcttgtcttgactcggagaaaaaataaaacggaatgtatgttaaaatagtataaagtgatattagaaaatgtataaaatataaaagaatagggttgatggtatgttttagcttcatggtagatggttttgaagacacgtggttattcataagtactcaaaaagtagaattaacagacttcagcgagaatcttcctcgatcaagaggctaaggtggtgtgacacaggaccagcagcttctgagggtggcaaatgtttacagctgtttccccagtccttcccaacaacgaattctgtatcagttgacaatggtaggaggtactaggtgctttgaagatatgcgcccttgtgtcaaaaccgctacgccggagtccgggttcctccggcctcgggcccgcgcaggcctggctgagcacccagagcgttcacgccccgcgccgccgcccggggatcctggcgcagctgtcggggccagcaatgcgaggggacgaacgtatgcgaccccgtccaacgcctcctcgtcccggccccggccgcgtagacaactgcagtgtcgcagcccggcgcagccacatgatcgtatgttgatgtggaaccccgctctcgacgaattcgagctcggccgatttggcctgatnnnnnnnnnnnnnnnnnnnnnnnnnnnnnnnnnnnnnncgccgccacccgccgggtataaaacctccgcaagggggcgcccacaantacgtagttcaatattccattc

SEQ ID NO: 361100 - DNA, 539 bp, Homo Sapiens
agcggagcgctgctgtgggctagcgcctgggctgcgacactgcagttgtctacgcggccggggccgggacgaggaggcgttggacggggtcgcatacgttcgtcccctcgcattgcggccccgacagctgcgccaggatccccgggcggcggcgcggggcgtgaacgctctggggctcagccaggcctgcgcgggcccgaggccggaggaacccggactccggcgtagcggttttgacacaagggcgcatatcttcaaagcacctagtacctcctaccattgtcaactgattctcgctgaagtctgttaattctactttttgagtacttatgaataaccacgtgtcttcaaaaccatctaccatgaagctaaaacataccatcaaccctattcttttatattttatacattttctaatatcactttatactattttaacatacattcccgtttattttttctccgagtcaagacaagaaaaatcaaaccgaattaaagcaaagcctgtaaattcaaaacctgattctgcatacagatct

SEQ ID NO: 361101 - DNA, 782 bp, Homo Sapiens
  misc_feature (47)..(89): n is a, c, g, or t
aactaacacagatgtcacatggctctaagaaaatcctttaattctannnnnnnnnnnnnnnnnnnnnnnnnnnnnnnnnnnnnnnnnnncctttagaagttagacagattcacctctagaaagtacactgctacatacaaaaagtgacaagcctgataagatgaaggagtcagaaacattctaaaatcaaaataaaatgaaacagaaaaacccaacagccaaagactatggcacatagcattatatacagagtgacctttgggagcctcaccactttacaacacagtgccataattattgttaagaatggtaattctgagttatacagacaggagttggatcatgatgaagatagtctttaagaaagtaggcagtgaataataccatttcatgaaggttttcattctaattttcgaaagtaagaaaaattggtacttcaaaggggaatatcaaatatcttaaaatttacttacatgaaactgtatctcattaggatttgtaaggatttataatgcatttgtggattaaggaggtagaatgtggttctggcaatgtggatcatatgagatcttgaaatcttgattgtctcaccaatcagtttggctactcaatgcttctgggctagcctgtcaattgaccttccatgggaatgaactatgctaattctcaatcacatagaagaagcagaatagaagcaacacagttattttagcagcaatgctaacattagtagtagcagcagcgtctccattggctgccttggatcctcaagagtcagctat

SEQ ID NO: 361102 - DNA, 450 bp, Homo Sapiens
  misc_feature (43)..(43): n is a, c, g, or t
ctgcgtctgccacccagaaggaatgctgaaggcagtcacgacncaggcacaagtgtttcttgtgattaggcataattgaagcctgttaacaataatgtgaacttgtgatcaattaagcagctgaccagtcgttacctcctcctccctttcatcctacccaataaatgtggagggctgtggaagctcaggggctgcctttgctcactagaagcagggagctctcttcttccccagttcgccttctttaaaacagtttctttcgtcttaagttttcatttctacgttcgtcccccttcattcagtctcgtaatgatggtctcaagtagtaacagtaactgtcgtagtgatggtctcaagtagtaactgtacaagtctgccacatcttcccacagggtccattgcagtggcagcaatgcataaggaccctgcacaggtaagtcaaggatttct

SEQ ID NO: 361103 - DNA, 609 bp, Homo Sapiens
  misc_feature (19)..(19): n is a, c, g, or t
  misc_feature (469)..(470): n is a, c, g, or t
caaggcctggacctgggcncagtccttctcagtgggggccccaggggtgacgaggatgagggcgtcgtagtgcgttgggtgagaggcggcggccgcggtggtggcagtgcccgtgtggcccagaggcacggtccagagcaccacattcgggcgctctggggctgggaagggagtgggtgctgtggggaccgaagcaggcgcagcgcctgggtcgccaggatccaatccaagcagcatgtccaccacaaggcccacgtcagccttgccagccacggccaggtctagccgtgcgctgcccaggcgctccaggcctgagcgcacccacgacagcgcaccctcaaggccgccggtctcaaaggcctcacgcacagcctctagctctgctgcacccaacacctcgaagccatcctgcgccggtggaggaagctgcgcacgcttctgcctggctctgcagcgccgcccggagctnnctagctcctcgcagccgtcgctgctgccgcagttcgccggtagcacaaacagatccgcagctcctaaccccgcgctgttcagcagagctgctgtctgatcacgggcctgggcggcagtctgtgaatccccaggacggag

SEQ ID NO: 361104 - DNA, 1036 bp, Homo Sapiens
  misc_feature (544)..(545): n is a, c, g, or t
  misc_feature (593)..(593): n is a, c, g, or t
taccccgccgtacagttgcgcgccaggcagcggggggcggagagaggagcccagactggcccccacctcccgcttcctgcccggccgccgcccattggccggaggaatccccaggaatgcgagcgcccctttaaaagcgcgcggctcctccgccttgccagccgctgcgtccgagctggcctgcgagttcagggctcctgtcgctctccaggagcaacctctactccggacgcacaggcattccccgcgcccctccagccctcgccgccctcgccaccgctcccggccgccgcgctccggtacacacaggatccctgctgggcaccaacagctccaccatggggctggcctggggactaggcgtcctgttcctgatgcatgtgtgtggcaccaaccgcattccagagtctggcggagacaacagcgtgtttgacatctttgaactcaccggggccgcccgcaaggggtctgggcgccgactggtgaagggccccgacccttccagcccagctttccgcatcgaggatgccaaccctgatccccnncctgtgcctgatgacaagttccaagaacctggtggatgcctgtgcggngcagaaaaagggttccctccttctggcatccctgaggcagatgaagaagacccggggcacgctgctggccctggagcggaaagaccactctggccaggtcttcagcgtggtgtccaatggcaaggcgggcaccctggacctcagcctgaccgtccaaggaaagcagcacgtggtgtctgtgggaagaagctctcctggcaaccggccagtggaagagcatcaccctgtttgtgcaggaagacagggcccagctgtacatcgactgtgaaaagatggagaatgctgaagttggacgtccccatccaaagcgtcttcaccagagacctggccagcatcgccagactccgcatcgcaaagggggggcgtcaatgacaatttcccagggggtgctgcaaaaatgttaaggtttggtctttggggcccacaccagaaagacatccctc

SEQ ID NO: 361105 - DNA, 1171 bp, Homo Sapiens
  misc_feature (950)..(968): n is a, c, g, or t
tggaaccctgaggtgtgcacagcgctgggatgccaggttcggcctcgaagcggaggatccctgtgtcccagccgggcatggccgacccccaccagcttttcgatgacacaagttcagcccagagccggggctatggggcccagcgggcacctggtggcctgagttatcctgcagcctctcccacgccccatgcagccttcctggctgacccggtgtccaacatggccatggcctatgggagcagcctggccgcgcagggcaaggagctggtggataagaacatcgaccgcttcatccccatcaccaagctcaagtattactttgctgtggacaccatgtatgtgggcagaaagctgggcctgctgttcttcccctacctacaccaggactgggaagtgcagtaccaacaggacaccccggtggccccccgctttgacgtcaatgccccggacctctacattccagcaatggctttcatcacctacgttttggtggctggtcttgcgctggggacccaggataggttctccccagacctcctggggctgcaagcgagctcagccctggcctggctgaccctggaggtgctggccatcctgctcagcctctatctggtcactgtcaacaccgacctcaccaccatcgacctggtggccttcttgggctacaaatatgtcgggatgattggcggggtcctcatgggcctgctcttcgggaagattggctactacctggtgctgggctggtgctgcgtggccatctttgtgttcatgatccggacgctgcggctgaagatcttggcagacgcagcagctgagggggtcccggtgcgtggggcccggaaccagctgcgcatgtacctgaccatggcggtggcggcggcgcagcctatgctcatgtactggctcaccttccacctggtgcggtgagcgcgcccgctgaacctcccnnnnnnnnnnnnnnnnnnnggggccactgtggccgccgaactcatctcctgcctgcaggccccaaggtccaccctgtctggccacaggcaccgcctccatcccatgtcccgcccagccccgcccccaacccaaggtgctgagagatctccagctgcacaggccaccgccccagggcgtggccgctgttacagaaacaataaaccctgatgggcatggcaaaa

SEQ ID NO: 361106 - DNA, 1241 bp, Homo Sapiens
  misc_feature (53)..(89): n is a, c, g, or t
catgtatagactcactatagggcgaactcggagcttatcgcggtggcggccgnnnnnnnnnnnnnnnnnnnnnnnnnnnnnnnnnnnnnatcaggccaaatcggccgagctcgaattcgtcgagagcgggcgggcacgctccgaaccgcggcttacgtggcggcggcgaaggatgcacccggcaggcttggcggcggcggctgcggggacgccccggctgccctcgaagcggaggatccctgtgtcccagccgggcatggccgacccccaccagcttttcgatgacacaagttcagcccagagccggggctatggggcccagcgggcacctggtggcctgagttatcctgcagcctctcccacgccccatgcagccttcctggctgacccggtgtccaacatggccatggcctatgggagcagcctggccgcgcagggcaaggagctggtggataagaacatcgaccgcttcatccccatcaccaagctcaagtattactttgctgtggacaccatgtatgtgggcagaaagctgggcctgctgttcttcccctacctacaccaggactgggaagtgcagtaccaacaggacaccccggtggccccccgctttgacgtcaatgccccggacctctacattccagcaatggctttcatcacctacgttttggtggctggtcttgcgctggggacccaggataggttctccccagacctcctggggctgcaagcgagctcagccctggcctggctgaccctggaggtgctggccatcctgctcagcctctatctggtcactgtcaacaccgacctcaccaccatcgacctggtggccttcttgggctacaaatatgtcgggatgattggcggggtcctcatgggcctgctcttcgggaagattggctactacctggtgctgggctggtgctgcgtagccatctttgtgttcatgatcccggaccgctggcggctgaagatcttggcagacgcagcagctgagggggtcccggtgcgtggggcccggaaccagctgcgcatgtacctgaccatggcggtggcggcggcgcagcctatgctcatgtacttggctcaccttccacctggtgcggttgagcgcgcccactgaacctcccgctgctgctgctgctgttgggggccactgtggccgccgactcatctcctgcctgcaggccccaggtccacctgtctggccacgggcaccgcctccatcccatgtccgc

SEQ ID NO: 361107 - DNA, 389 bp, Homo Sapiens
aaagtgctaggattcaggtgtagccaccatattcagcttaagtgcacaaatcttatgtggacagctcgaggaagtcttacacaggcctacgactgcatgaccatctcccagatcaagaactagaacattcccagccccaggtggcttccttgtgtcccataccagtcatcacctacgttttggtggctggtcttgcgctggggacccaggataagttctccccagacctcctggggctgccagcgagctcagccctggcctggctgaccctggaggtgctggccatcctgctcagcctctatctggtcactgtcaacaccgacctcaccaccatcgacctggtggccttcttgggctacaaatatctcgggatgattggcggggtcctc

SEQ ID NO: 361108 - DNA, 418 bp, Homo Sapiens
  misc_feature (70)..(70): n is a, c, g, or t
  misc_feature (205)..(280): n is a, c, g, or t
  misc_feature (286)..(286): n is a, c, g, or t
  misc_feature (302)..(302): n is a, c, g, or t
  misc_feature (377)..(377): n is a, c, g, or t
ggccttcttgggctacaaatatgtcgggtgagtacccccgcccttcacgccagccccagcccttgggctntgatcctcacacagcctcctctccctcccccaggatgattggcggggtcctcatgggcctgctcttcgggaagattggctactacctggtgctgggctggtgctgcgtagcatctttgtgttcatgtttcccctnnnnnnnnnnnnnnnnnnnnnnnnnnnnnnnnnnnnnnnnnnnnnnnnnnnnnnnnnnnnnnnnnnnnnnnnnnnncgctgncggctgaaagatcttngcagacgcagcagctgagggggtcccggtgcgtggggcccggaaccagctgcgcatgtaacctgaccatgggcgntggctgcggcgcactattgattcatgttattgggttcactt

SEQ ID NO: 361109 - DNA, 906 bp, Homo Sapiens
  misc_feature (50)..(50): n is a, c, g, or t
  misc_feature (56)..(56): n is a, c, g, or t
agtgctgccaaggtccctaggcctgtctttacattcagaccttcccttgnctactngtaatccctgacagaagacattgtggtagtgggtactcaggagagaagcaacaagaatgggacaattctcccagggcaaacactgaatcctctctttctgttacagagtaaagttccctgagtcctggtcttgattgttcatgtagacagaatgataactattgaaactgtccctaatttagtaattctctctgagctcccttaagagggcccaagtactcttattttccatttctcttgacaaagagtaaaaaatgagactaagagccttgactatcatatgtctgttgagcacttgatacctgaaaaatttagatgactgggggtggggaagctttgaataaccagatatatacatatagatagatagctaaaggaatctcatcactacactttcatttttttatttataaagtactccttatgtatcaactcttgtgctaggcacagaagatgcaatgctgaataaaacagacagcttagattcctttttgtgaagtgtaacatgtacccttcccaaatgttttattaatcacagattcctatcattgggtgcctcataattttgtattctttcaccacttctaaagtcaagctctacatggtaactttcctcagtttggagacactagacatgcttcccttcttctgtggagtttctggtgtctaagaaggctcgatcgcctactaaagtttctcttgcataagctacatgtataaggctgctcacctgtgtgagttctctggtgtttaataaggtgggagttctgaatgaatctttttccacattcatcacatttaaagggcttctctcctgtgtgaatatcccgaaaatccggaccggtccagc

SEQ ID NO: 361110 - DNA, 3092 bp, Homo Sapiens
  misc_feature (2791)..(2791): n is a, c, g, or t
  misc_feature (2941)..(2941): n is a, c, g, or t
  misc_feature (2947)..(2956): n is a, c, g, or t
  misc_feature (3078)..(3078): n is a, c, g, or t
tcaaaggggcaagagctgagcggaacaccggcccgccgtcgcggcagctgcttcacccctctctctgcagccatggggctccctcgtggacctctcgcgtctctcctccttctccaggtttgctggctgcagtgcgcggcctccgagccgtgccgggcggtcttcagggaggctgaagtgaccttggaggcgggaggcgcggagcaggagcccggccaggcgctggggaaagtattcatgggctgccctgggcaagagccagctctgtttagcactgataatgatgacttcactgtgcggaatggcgagacagtccaggaaagaaggtcactgaaggaaaggaatccattgaagatcttcccatccaaacgtatcttacgaagacacaagagagattgggtggttgctccaatatctgtccctgaaaatggcaagggtcccttcccccagagactgaatcagctcaagtctaataaagatagagacaccaagattttctacagcatcacggggccgggggcagacagcccccctgagggtgtcttcgctgtagagaaggagacaggctggttgttgttgaataagccactggaccgggaggagattgccaagtatgagctctttggccacgctgtgtcagagaatggtgcctcagtggaggaccccatgaacatctccatcatcgtgaccgaccagaatgaccacaagcccaagtttacccaggacaccttccgagggagtgtcttagagggagtcctaccaggtacttctgtgatgcaggtgacagccacgggatgaggatgatgccatctacacctaccaatggggggggtggcttactccatccatagccaagaaacaaaggacccacacgacctcatgttcaccattcaccggagcacaggcaccatcagcgtcatctccagtggcctggaccgggaaaaagtccctgagtacacactgaccatccaggccacagacatggatggggacggctccaccaccacggcagtggcagtagtggagatccttgatgccaatgacaatgctcccatgtttgacccccagaagtacgaggcccatgtgcctgagaatgcagtgggccatgaggtgcagaggctgacggtcactgatctggacgcccccaactcaccagcgtggcgtgccacctaccttatcatgggcggtgacgacggggaccattttaccatcaccacccaccctgagagcaaccagggcatcctgacaaccaggaagggtttggattttgaggccaaaaaccagcacaccctgtacgttgaagtgaccaacgaggccccttttgtgctgaagctcccaacctccacagccaccatagtggtccacgtggaggatgtgaatgaggcacctgtgtttgtcccaccctccaaagtcgttgaggtccaggagggcatccccactggggagcctgtgtgtgtctacactgcagaagaccctgacaaggagaatcaaaagatcagctaccgcatcctgagagacccagcagggtggctagccatggacccagacagtgggcaggtcacagctgtgggcaccctcgaccgtgaggatgagcagtttgtgaggaacaacatctatgaagtcatggtcttggccatggacaatggaagccctcccaccactggcacgggaacccttctgctaacactgattgatgtcaatgaccatggcccagtccctgagccccgtcagatcaccatctgcaaccaaagccctgtgcgccaggtgctgaacatcacggacaaggacctgtctccccacacctcccctttccaggcccagctcacagatgactcagacatctactggacggcagaggtcaacgaggaaggtgacacagtggtcttgtccctgaagaagttcctgaagcaggatacatatgacgtgcacctttctctgtctgaccatggcaacaaagagcagctgacggtgatcagggccactgtgtgcgactgccatggccatgtcgaaacctgccctggaccctggaagggaggtttcatcctccctgtgctgggggctgtcctggctctgctgttcctcctgctggtgctgcttttgttggtgagaaagaagcggaagatcaaggagcccctcctactcccagaagatgacacccgtgacaacgtcttctactatggcgaaaaggggggtggcgaagaggaccaggactatgacatcacccagctccaccgaggtctggaggccaggccggaggtggttctccgcaatgacgtggcaccaaccatcatcccgacacccatgtaccgtcctcggccagccaacccagatgaaatcggcaactttataattgagaacctgaaggcggctaacacagaccccacagccccgccctacgacaccctcttggtgttcgactatgagggcagcggctccgacgccgcgtccctgagctccctcacctcctccgcctccgaccaagaccaagattacgattatctgaacgagtggggcagccgcttcaagaagctggcagacatgtacggtggcggggaggacgactaggcggcctgcctgcagggctggggaccaaacgtcaggccacagagcatctccaaggggtctcagttccccccttcagctgaagacttcggacctggtcaggaaaggggccgtaccaactttggcggagacaggctatgagtctgacgttagagtggttgcttccttagcctttcaggatggaggaatgtgggcagtttgacttcagcactgaaaacctctccacctngggccagggttgcctcagaggccaagtttccagaagcctcttacctgccgtaaaatgctcaaccctgtgtcctgggcctgggcctgctgtgactgacctacagtggactttctctctggaatggaaccttcttaggcctcctggtgcaancttaannnnnnnnnnaatgctatcttcaaaaccgttagagaaagttcttcaaaagtgcagccccagagctgctggggcccactggccgtccctgcatttctggtttccagaccccaatgccttcccattcggatggnatctctgcgttttt

SEQ ID NO: 361111 - DNA, 252 bp, Homo Sapiens
aatgctatcttcaaaacgttagagaaagttcttcaaaagtgcagcccagagctgctgggcccactggccgtcctgcatttctggtttccagaccccaatgcctcccattcggatggatctctgcgtttttatactgagtgtgcctaggttgccccttattttttattttccctgttgcgttgctatagatgaagggtgaggacaatcgtgtatatgtactagaacttttttattaaagaaacttttcccaga

SEQ ID NO: 361112 - DNA, 1618 bp, Homo Sapiens
  misc_feature (1135)..(1135): n is a, c, g, or t
gggctccttctggtggctcatccccctgctcctcctcctcctgccgctcctggccctgctactgctgctatgctggaagtactgtgcctgctgcaaggcctgcctggcacttctcccgtgctgcaaccgaggtcacatggtgggctttaaggaagaccactacatgctgcgggagaacctgatggcctctgaccacttggacacgcccatgctgcgcagcgggaacctcaagggccgtgacgtggtccgctggaaggtcaccaacaacatgcagcggcctggctttgccactcatgccgccagcatcaaccccacagagctggtgccctacgggctgtccttgcgcctggcccgcctttgcaccgagaacctgctgaagcctgacactcgggagtgcgcccagctgcgccaggaggtggaggagaacctgaacgaggtctacaggcagatctccggtgtacacaagctccagcagaccaagttccggcagcagcccaatgccgggaaaaagcaagaccacaccattgtggacacagtgctgatggcgccccgctcggccaagccggccctgctgaagcttacagagaagcaggtggaacagagggccttccacgacctcaaggtggcccccggctactacaccctcactgcagaccaggacgcccggggcatggtggagttccaggagggcgtggagctggtggacgtacgggtgcccctctttatccggcctgaggatgacgacgagaagcagctgctggtggaggccatcgacgtgcccgcaggcactgccaccctcggccgccgcctggtaaacatcaccatcatcaaggagcaagccagagacgtggtgtcctttgagcagcctgagttctcggtcagccgcggggaccaggtggcccgcatccctgtcatccggcgtgtcctggacggcgggaagtcccaggtctcctaccgcacacaggatggcaccgcgcagggcaaccgggactacatccccgtggagggtgagctgctgttccagcctggggaggcctggaaagagctgcaggtgaagctcctggagctgcaagaagttgaccccctctctggcggggccgccaggtccgccgtttccacgtccagctcagcaacncctaagtttggggcccacctgggccagccccactccaccaccatcatcatcagggaaccagatgaactggaccggagcttcacgagtcagatgttgtcatcacagccaccccctcacgggcgacctgggccgccccgcagaacccccaatgctaaaggccgctgggtccaggaagatccatttcaactggctgcccccttctggcaagccaatggggtacagggtaaagtactggattcaggttgactccgaatccgaagccacctgctcgacagcaggtgccctcaggggagctcaccaacctgtacccggattgcgactattagatgaaggtgtggcgcctacggggcttcagggcgagggaaccctaacggctcccctgggggtcctggccgcacccaccagggaaggggccagcgaagcccaaggcggcttgggcccttcaagggtcctcctcccctccccggggggaacccagcgtgc

SEQ ID NO: 361113 - DNA, 2195 bp, Homo Sapiens
gctcctggcagccttgatcagcgtcagcctctctgggaccttggcaaaccgctgcaagaaggccccagtgaagagctgcacggagtgtgtccgtgtggataaggactgcgcctactgcacagacgagatgttcagggaccggcgctgcaacacccaggcggagctgctggccgcgggctgccagcgggagagcatcgtggtcatggagagcagcttccaaatcacagaggagacccagattgacaccaccctgcggcgcagccagatgtccccccaaggcctgcgggtccgtctgcggcccggtgaggagcggcattttgagctggaggtgtttgagccactggagagccccgtggacctgtacatcctcatggacttctccaactccatgtccgatgatctggacgtacgggtgcccctctttatccggcctgaggatgacgacgagaagcagctgctggtggaggccatcgacgtgcccgcaggcactgccaccctcggccgccgcctggtaaacatcaccatcatcaaggagcaagccagagacgtggtgtcctttgagcagcctgagttctcggtcagccgcggggaccaggtggcccgcatccctgtcatccggcgtgtcctggacggcgggaagtcccaggtctcctaccgcacacaggatggcaccgcgcagggcaaccgggactacatccccgtggagggtgagctgctgttccagcctggggaggcctggaaagagctgcaggtgaagctcctggagctgcaagaagttgactccctcctgcggggccgccaggtccgccgtttccacgtccagctcagcaaccctaagtttggggcccacctgggccagccccactccaccaccatcatcatcagggacccagatgaactggaccggagcttcacgagtcagatgttgtcatcacagccaccccctcacggcgacctgggcgccccgcagaaccccaatgctaaggccgctgggtccaggaagatccatttcaactggctgcccccttctggcaagccaatggggtacagggtaaagtactggattcagggtgactccgaatccgaagcccacctgctcgacagcaaggtgccctcagtggagctcaccaacctgtacccgtattgcgactatgagatgaaggtgtgcgcctacggggctcagggcgagggaccctacagctccctggtgtcctgccgcacccaccaggaagtgcccagcgagccagggcgtctggccttcaatgtcgtctcctccacggtgacccagctgagctgggctgagccggctgagaccaacggtgagatcacagcctacgaggtctgctatggcctggtcaacgatgacaaccgacctattgggcccatgaagaaagtgctggttgacaaccctaagaaccggatgctgcttattgagaaccttcgggagtcccagccctaccgctacacggtgaaggcgcgcaacggggccggctgggggcctgagcgggaggccatcatcaacctggccacccagcccaagaggcccatgtccatccccatcatccctgacatccctatcgtggacgcccagagcggggaggactacgacagcttccttatgtacagcgatgacgttctacgctctccatcgggcagccagaggcccagcgtctccgatgacactgagcacctggtgaatggccggatggactttgccttcccgggcagcaccaactccctgcacaggatgaccacgaccagtgctgctgcctatggcacccacctgagcccacacgtgccccaccgcgtgctaagcacatcctccaccctcacacgggactacaactcactgacccgctcagaacactcacactcgaccacactgccgagggactactccaccctcacctccgtctcctcccacggcctccctcccatctgggaacacgggaggagcaggcttccgctgtcctgggccctggggtcccggagtcgggctcagatgaaagggttccccccttccaggggcccacgagactctataatcctggctgggaggccagcagcgccctcctggggcccagactctcgcctgactgctggtgtgcccgacacgcccacccgcctggtgttctctgccctggggcccacatctctcagagtgagctggcaggagccgcggtgcgagcggccgc

SEQ ID NO: 361114 - DNA, 3936 bp, Homo Sapiens
  misc_feature (3239)..(3302): n is a, c, g, or t
  misc_feature (3533)..(3542): n is a, c, g, or t
gacaaaaggccactcctttcctcgtgcgggcacctggctggctggtgagccctcctccctgcccacagcctgcccccacggggactttccccagcgctaatctatgcacaacgagacttggcccgtccgtgccctggctctcttttaggccctcagcatcctctcctccagatgcccaagagagctgctccatgcgctgtggcgccctggacgggccatgttcctgccacccgacgtgctctggccttggcacctgctgcttggatttccgggacttctgcctggagatattgccctactcaggatccatgatgggcggcaaggactttgtggtgcggcacttcaagatgtccagccccacagacgccagtgtgatctgcaggtttaaggacagcatccagaccctcggccatgtggactcctccgggcaagtgcactgtgtgtcacctctgctctatgagagcggccgcatccccttcactgtgtcactggacaacggccactccttccctcgtgcgggcacctggctggctgtgcaccccaacaaagtgtcaatgatggagaagagcgagttggtgaacgagacgcgttggcaatactacggcaccgccaacacctcaggcaacctcagcctgacctggcatgtcaagtcgctgcccacgcagaccatcaccatcgaactgtggggctacgaagagacaggaatgccctactcacaggagtggactgcaaagtggtcgtacctgtaccccctggccacacacatccccaactccggctctttcactttcaccccaaaacctgctcctcccagctaccagagatggcgagtgggtgcacttcggatcatcgacagcaaaaattacgcagggcagaaggacgtgcaggcgctctggaccaacgaccacgcactggcctggcacctgagcgatgacttccgagaggaccctgtggcctgggcacgaactcagtgccaggcctgggaggagctggaggatcagctgcccaacttcctggaggagctgccggactgcccctgcaccctgacccaggcccgggctgactccggccgcttcttcacggactacggctgtgacatggagcagggcagcgtgtgcacctaccaccccggggccgtgcactgtgtgcgttctgtgcaggccagcctccggtacggctcaggtcagcagtgctgctacacagcggacgggacgcagctcctgacagctgactccagcggcggcagcactcccgaccgcggccatgactggggcgcacccccgttccgcacgccaccccgagtgcccagcatgtcccactggctctacgatgtcctcagcttctattactgctgcctctgggcacccgactgcccccgctacatgcaacggcggccctccaatgactgccgcaactaccggcccccaagactggcctccgccttcggagacccacactttgtgaccttcgacggcaccaacttcacattcaatgggcgcggagagtacgtgctgctggaggcagcgctgaccgacctgagggtgcaggcgcgggcccagcccgggacgatgtccaacggcacggagacccgtggcactgggctgaccgcagtggccgtccaggagggcaactcagatgtggtggaagtcaggctggccaacaggaccggaggtctggaggtgctgctgaaccaggaggtgctgagcttcaccgagcagagctggatggacctgaaaggaatgttcctgtcggtggctgccggggacagggtctccatcatgctggcatcaggggccggcctggaggtcagcgtgcagggcccgttcctgagtgtgtccgtcctgctgcctgagaagttcctcacccacacccacggcctcctcgggacactcaacaacgaccccaccgacgacttcaccctgcacagcgggcgcgtcctgcccccaggcaccagtccccaggagctgttcctgtttggggccaactggaccgtgcacaatgcgtcctccctgctcacctacgattcctggttcctggtccacaacttcctgtaccaacccaagcacgaccccaccttcgagcccctcttccccagtgagaccaccctcaaccccagcctggcacaagaggcagccaaactatgtggggacgatcatttctgcaactttgatgtggcagccactgggagcctgagcacgggcactgccactcgggtggcccaccagctgcaccagcgtcgcatgcagagcctgcagccagtggtgtcctgtggctggctggccccacctcccaacggacaaaaggagggcaacaggtacctggcgggttccaccatctacttccactgtgacaacggctacagcctggccggggcagagaccagcacctgccaggctgacggcacctggtcctcacccaccccgaagtgccagccaggacgcagctacgcggtgctgttgggcatcatctttgggggcctcgcggtggtggcggcggttgcgctcgtctatgtgctgctgcgccgcaggaagggcaacacgcacgtctggggtgcacagccctgatgggagcagcttggctgtgagcaccaggccaagactcctgagaacaggcagcccagtcctgcgactcccgcatccccaggaccagacacctggggacctggatacttgatacctgggcatttaaccccctactctgtcatctcagaccccaggcaggaggcccagtgtttcaacacccaagccccgtggctagcaagcgctccgtgctcttcccccaaatactcacggctctaattccccaaacctgaaacttcataccctgggattctaatacctatgtcctgagccctgacactcccacacctgagcctcagattccaatagctcactccctagagcctgacgccggggcccctgacccctgagcctcagattccaatacctcactccccagagcctgatgccggggcccctgacccctgatctacggaggcctgctcccggaccgtgcgggcaccagtgcagtgctgccttggttcctggacccctgggcccatcctgggaccccagatggggtaaggagaggccccagaaccccaaagcagacagcgagacccccagcggcagaggcctccctcggcactccaggcttataatttcgaactcttctggaaggtcactcaggaacaccctccctgcctgtgcaaagagaaaacaagcgccttgtttccttcnnnnnnnnnnnnnnnnnnnnnnnnnnnnnnnnnnnnnnnnnnnnnnnnnnnnnnnnnnnnnnnncacaagaattccccggggggggccacacaatataagcggaggcaccccgagctttctgcgggtacccaagagggggcgcccaatagaggggagagcaggctaataaaaagagcagaaggcgcgaggggcgcgcagcggataacaacacgcagccggggacagcgggagacaacacggggagcggcggggagaaccacttggagaacggggacacccccatacgaaccggcnnnnnnnnnnagagacaccactatcgtgctggggaacaaacatcatcccctcgagacgagaagcatattgaagacgccccatctgaggagggagggacacaattacagaccacttgctagaggggcacgaatgacagcgtggtgtcaccaacaccgaccaggcggcaaatatagtgccgcgcgagcgtgatagacacagaattcgcgggccacgcgcgcagaatagttaggacttagtagaaccaaacttatttcccggcgggagcgagtagtagaccagtataatacgccgccaacggcgccaagactagcagcccgcagccaccgccgaggcagccaccagcggcgccacgacgtgggcacacctacaccaactaccacccgaacgaatcgcccccgctccc

SEQ ID NO: 361115 - DNA, 1932 bp, Homo Sapiens
  misc_feature (1267)..(1267): n is a, c, g, or t
  misc_feature (1271)..(1271): n is a, c, g, or t
  misc_feature (1304)..(1304): n is a, c, g, or t
tggaccggtccggaattcccgggatcgccccaccttgggacacacccggaagcggcggcggcgcccctcggggaagatggcgccctcggggctgaaggcggtggtgggggaaaaaattctgagcggagttattcggagtgtcaagaaggatggggagtggaaggtgcttatcatggatcacccaagcatgcgcatcttgtcttcctgctgcaaaatgtcagatatcctggctgagggcatcaccattgttgaagacatcaacaaacggcgggaacccattcccagtctggaggccatttatttgctgagccccacggagaagtcggttcaggccctgatcaaagacttccaggggaccccgactttcacctacaaagcggcccatatcttcttcaccgacacctgccccgagcccctgttcagtgagctaggccgctctcgtctggcaaaggtggtgaagacgttgaaggagattcaccttgccttcctcccctacgaggcccaggtgttctccctcgatgctccccacagcacctacaacctctactgccccttccgggcagaggagcgcacgcggcagctcgaggtgctggcccagcagattgccacgctgtgcgccaccctgcaggagtacccggccatccgctaccgcaagggcccagaggacacagcccagttggcccacgccgtcctggccaagctgaacgccttcaaggcagacactcccagtctgggcgagggcccagagaaaacccgctcccagctgctgataatggaccgggcagctgaccccgtgtccccactactgcatgagctcacgttccaggccatggcgtatgatctgctggacatagagcaggacacatacaggtatgagaccaccgggctgaacgaggcgcgggaaaaaggccgtcttgctggacgaggacgatgacttgtgggtggagcttcgccacatgcatatcgcagatgtgtcccagaaggtcacggagctcctgaggaccttctgtgagagcaagaggctgaccacggacaaggcgaacatcaaagacctatcccagatcctgaaaaagatgcccgcagtaccagaaggagcctgaataagtattctacgcacctgcatctagcagatgattgtatgaagcactttcaagggctcggtggagaaactgtgtagtgtggagcaggacctggccatgggctccgacgcagaaggggggagaagaatcaaggactccatgaagctgatcgttccggtgctgcgggnacgncggcggtgcccgcctacaaaaaagatccggggncctcgctgctctacatcctccttcggaatggtgtgagtgaggagaacctggccaagctgatccagcatgccaatgtacaggcgcacagcagcctcatccgtaacctggagcagctgggaggcactgtcaccaaccccgggggctcggggacctccagccggctggagccgagagaacgcatggagcccacctatcagcggtcccgctggaccccggtcatcaaggacgaaatgaagaaccccgtggaggaccggctggacagaaacctgtggcccttcgtatccgaccccgcccccacggccagctcccaggccgctgtaagtgcccgcttcggtcactggcacaagaacaaggctggcgtaaaagcccgggcgggcccccggctcatcgtgtatgtcatgggcggtgtggccatgtcaaaaatgagggccgcctacaaggtgaccagggccaccgagggcaagtggaaggtgctcattggctcctcacacatcctcaccccgacccgcttcctgaatgacctgaaggcactggacaaaaagctggaggacattgccctgccctgaccccgggccccgccccctacccctccctttccagagaaataaacttttcccgtcgttttgcc

SEQ ID NO: 361116 - DNA, 491 bp, Homo Sapiens
  misc_feature (435)..(435): n is a, c, g, or t
aagttggggtgggaccttgagagacctggtgctgagatgaggtaggacccaaatgtcctcttgccgaggatcctggggatgtccttggcccgcctctcccatccccttccctgacacatagcggccggtggacggctgaccccatgcccgcaggacctggccatgggctccgacgcagagggggagaagatcaaggactccatgaagctgatcgttccggtgctgctggacgcggcggtgcccgcctacgacaagatccgggtccggctgctctacatcctccttcggaatggtgtgagtgaggagaacctggccaagctgatccagcatgccaatgtacaggcgcacagcagctctcatccgtaacctggagcaactgggaggcactgtcaccaaccccggggtacgccaggagcgggcgtggggggaccctgngagagggtgcggatcacagccggggctctgcaaggcagagggccgttggtgcacag

SEQ ID NO: 361117 - DNA, 1670 bp, Homo Sapiens
aggctggaccggtccggattcccgggatcacgtggctgtgaagaaggtcccgtatgtggatgaggaggggaatctggtaaagccgctaaaaccgaacgggataaagatggagaagtttgtgtttgatgtgttccggtttgctaagaactttgctgccttggaagtgctgcgggaggaggaattttccccactgaagaacgcagagccagccgacagggacagtccccgcaccgctcgccaggccctgctcacccagcactaccggtgggctctgcgggccggggcccgcttcctggatgcccatggggcctggctcccagagctgcccagcttgcccccaaatggagaccctccggccatctgtgagatatcgcccttggtgtcttactctggagagggtttagaagtgtacctgcaaggccgggagttccagtccccgctcatcctggatgaagaccaggccagggagccgcagctgcaggagtcctgacccgcccagactgcccccagactcccccgagacctgccagccccggcaatcctggaagtcccgactccccccagacctgccagccccggcgtcctggagctgggggctacagcccagcctgagctctgggtgggaaagcagcctgccccatgcttccagcctgcagaacacagaatgaaacatgctggtagactccacgagggcagggcctctcctgtcgcctctggacacaagtggcgacagcctgctgggggctctgtggctccattcctggctgtggggtctagtcaagaggcagagggacttgggacctgggagaatggggctgagaggaggcttcgggttggggcccaaggggaggtgtggtgtcatctggggagaacaggagggcatgtccctttgggagcccgccttgtggatccaccacaccccaccgagcactagaagctgcataagctacacaggatgtgcttctgcagcctacagatgcagaaccagaatgagggggacaattccacccactcgatgggctgccccctcttccttagcagacgaaccagtaatgggtggcaaggctggggcatcccagcccacacaccctggatgcccagcaaggccacagaaagagcctgatgtccatgatccaggtggctctgagaatgattgtgcctggacaacgcatgaagcactgaggcaggtactcctgcccgtctccccatctatccccaaggactctgactctaagcgctcttacatggtcggttaaggctagctgagtttacttgtgctttcaccaaagaaacagagggaatccatgccaggaggacctctgtgatggttgatgaactaatcccgggatgatgagtaagagggaccaaaccatcaacccagaagccatggagcaactgacaggacaatgaagcacagtgactgacatgcacccgagagaagacgaacagatccaaattaggagcacacaagcatgggaggggaaaggcagatgagcaaaagacatccaccgagagaacacacgaaacacaaaccaagggaagatagggacacacacctcaggaaaagaaacaagaataatgccatcgagcacaaacaagaccacagaaaaacacaaagaggcacaacacatgatccgaaggtaaggagaaaacaaacacaaaaacgacca

SEQ ID NO: 361118 - DNA, 920 bp, Homo Sapiens
  misc_feature (203)..(203): n is a, c, g, or t
  misc_feature (209)..(209): n is a, c, g, or t
gggccaggaactcgggttgaggggccctctgtgggtgcccacccatgggggtaggaaagttaaagaggagaccctgggttccaggcctgggaacccagtgggtgccctgaagggagggggaggcctcagggagttcgggacaggagtgtgcatggtactgggcggcccatgggggctcctggcctcttggttcaggcaatccntgagcntggggacacattccatcttaggtccaagagacggaggtcagaagcaatccctagaacgacctccccaaggcaacgaggaaggcccgggccagggccgggcagcagcgttggctgggcttcagtaacccttcgggcatcttgaatcctgccactctgggactgcaaagggatctgcgggcgcctctgcttgagtcaatccgtctggttaggcactacggtcctgagaagacccaaggaaaccagtgtggaccaaggagcgtcacccccgcgctcaccggtacatgtggtagacgaagcagcaggagagcggcttgagcagcaagctgaggatggccatgcccacgccaaagcggcccgtgtccgtgaggctgacccgcgagtagaagatgctgatgtgcacgatgtccaggaagatggttggccagcaagccacccagaaacatgcttatggcgtcgatggagtcccgctgagccacagcccacacgcccaaggccaggatggtgaagttggccacaggcataggagcctgagaatacaatgcagccccaggttgtcagcagccagtgacctaggagaatcaccttcaggttcacagcaggcagctccatcccgactcaggccgagggcacatgcgccgcatgccgcggggggctcctaggctccgaactcggggaacaaacattgcccggccccgccccgcccgttgcagc

SEQ ID NO: 361119 - DNA, 1122 bp, Homo Sapiens
  misc_feature (960)..(960): n is a, c, g, or t
gagttcggagcctaggagccccccgcggctgcggcgcaggtgccctcggcctgagtcgggatggagctgcctgctgtgaacctgaaggtgattctcctaggtcactggctgctgacaacctggggctgcattgtattctcaggctcctatgcctgggccaacttcaccatcctggccttgggcgtgtgggctgtggctcagcgggactccatcgacgccataagcatgtttctgggtggcttgctggccaccatcttcctggacatcgtgcacatcagcatcttctacccgcgggtcagcctcacggacacgggccgctttggcgtgggcatggccatcctcagcttgctgctcaagccgctctcctgctgcttcgtctaccacatgtaccgggagcgcgggggtgagctcctggtccacactggtttccttgggtcttctcaggaccgtagtgcctaccagacgattgactcagcagaggcgcccgcagatccctttgcagtcccagagggcaggagtcaagatgcccgagggtactgaagccagccacgctgcgcccggccctgccccgggccttcctcgtgcctgggaggtcgttctagggatgctcctgacctccgtctcttggacctaagatggaatgtgtccccagctcagggattgcctgaaccaagaggccaggagcccccatgggccgcccagtaccatgcacactcctgtcccgaactccctgaggcctcccctcccttcagggcacccactggttcccaggctggaaccagggtctctctttacctcctaccccatggtggcaccacagaggccctcagccgagtccctggcctgagtgttgcaagctcaggcctttaaggactgctgatgccccctcaggccctccccccaagtttgcttgggcttttggtgggaaacccctggaaaagcttcaggtcctggctcagnccccgaggagcagtcctggggccttgtggaaaatgaagggcccccggttcctttctctactggcctgggtcacatgggtgcccccaaagggaataaaccacaggggccttgaaaaagccccacaaaaagggttttcaacccaaaaccacttggtgaaaccca

SEQ ID NO: 361120 - DNA, 1561 bp, Homo Sapiens
  misc_feature (1123)..(1356): n is a, c, g, or t
  misc_feature (1372)..(1380): n is a, c, g, or t
  misc_feature (1416)..(1428): n is a, c, g, or t
gggggggcaagtttgttccccgagttcggagcctaggagccccccgcggctgcggcgcaggtgccctcggcctgagtcgggatggagctgcctgctgtgaacctgaaggtgattctcctaggtcactggctgctgacaacctggggctgcattgtattctcaggctcctatgcctgggccaacttcaccatcctggccttgggcgtgtgggctgtggctcagcgggactccatcgacgccataagcatgtttctgggtggcttgctggccaccatcttcctggacatcgtgcacatcagcatcttctacccgcgggtcagcctcacggacacgggccgctttggcgtgggcatggccatcctcagcttgctgctcaagccgctctcctgctgcttcgtctaccacatgtaccgggagcgcgggggtttccttgggtcttctcaggaccgtagtgcctaccagacgattgactcagcagaggcgcccgcagatccctttgcagtcccagagggcaggagtcaagatgccccgagggtactgaaagccagccacgctgcgcccggtccctgccccgggcctttcctcgttgcctgggaggtcgttctagggatgctcctgacatccgtctcttggacctaagatggaatgtgtccccagctcagggattgcctgaaccaagaggccaggagcccccatgggccgcccagtaccatgcacactcctgtcccgaactccctgaggcctcccctcccttcagggcacccactggttcccaggctggaaccagggtctctctttacctcctaccccatggtggcaccacagaggccctcagccgagtcctgcctgagtgttgcaagctcaggcctttaaggactgctgatgccccctcaggcctcccccaagtttgctgggctttggtggaagccctgagagcttcaggtcctgctcagcccgaggagcagtctggcatgggagtgaggccccgtccttctcactgcctggtcacatggtgcctagggatgcagggctggaggccagaggtgtcagcaacactgtgacccaccacaacctccagcctcccttttcagagcacagcattaaagtttggggaattctgtannnnnnnnnnnnnnnnnnnnnnnnnnnnnnnnnnnnnnnnnnnnnnnnnnnnnnnnnnnnnnnnnnnnnnnnnnnnnnnnnnnnnnnnnnnnnnnnnnnnnnnnnnnnnnnnnnnnnnnnnnnnnnnnnnnnnnnnnnnnnnnnnnnnnnnnnnnnnnnnnnnnnnnnnnnnnnnnnnnnnnnnnnnnnnnnnnnnnnnnnnnnnnnnnnnnnnnnnnnnnnnnnnnnnnnnnnggaccgggggtaaccnnnnnnnnnaaaaaaacccggcggggaatctggggtggttccccnnnnnnnnnnnnnccccgggggcaccccatttttttaaaaaacccccaaagggcgtttgagggttttattgtgttattccataaagggtccggccaccttgaaataaatttaaccccccccgcggacccctaaaagggaagggggg

SEQ ID NO: 361121 - DNA, 1954 bp, Homo Sapiens
  misc_feature (1229)..(1295): n is a, c, g, or t
ataggaagcgaggcctgagtggcgaattcggcacgagggccacccctgcccgcccgacagcgccgccgcctgccccgccatgggtcgacagaaggagctggtgtcccgctgcggggagatgctccacatccgctaccggctgctccgacaggcgctggccgagtgcctggggaccctcatcctcgtgatgtttggctgtggctccgtggcccaggttgtgctcagccggggcacccacggtggtttcctcaccatcaacctggcctttggctttgctgtcactctgggcatcctcatcgctggccaggtctctggggcccacctgaaccctgccgtgacctttgccatgtgcttcctggctcgtgagccctggatcaagctgcccatctacaccctggcacagacgctgggagccttcttgggtgctggaatagtttttgggctgtattatgatgcaatctggcacttcgccgacaaccagctttttgtttcgggccccaatggcacagccggcatctttgctacctacccctctggacacttggatatgatcaatggcttctttgaccagttcataggcacagcctcccttatcgtgtgtgtgctggccattgttgacccctacaacaaccccgtcccccgaggcctggaggccttcaccgtgggcctggtggtcctggtcattggcacctccatgggcttcaactccggctatgccgtcaaccctgcccgggactttggcccccgcctttttacagcccttgcgggctggggctctgcagtcttcacgaccggccagcattggtggtgggtgcccatcgtgtccccactcctgggctccattgcgggtgtcttcgtgtaccagctgatgatcggctgccacctggagcagccccaccctccaacgaggaagagaatgtgaagctggcccatgtgaagcacaaggagcagatctgagtgggcaggggccatctccccactccgctgccctggccttgagcatccactgactgtccaagggccactcccaagaagcccccttcacgatccaccctttcaggctaaggagctccctatctaccctcaccccacgagacagccccttcaggatttccactggaccttgcccaaatagcaccttaggccactgcccctaagctggggtggaaccggaatttgggtcaatacatccttttgtctcccaagggaagagaatgggcagcaggtannnnnnnnnnnnnnnnnnnnnnnnnnnnnnnnnnnnnnnnnnnnnnnnnnnnnnnnnnnnnnnnnnnttcccagatattcagggcaagggaccagtcggaagggattctggctattgggggagcccagagacagggcgacaggcagcctgtccatctgtgcataaggagaggaaaggttccaggatgtgtatgttccaggggcttccacatggacggagctggccagatagatatgctgtttctgtgtatgtgtaatgtctgccttctccctaacggtgggggcgccttctacaggcttttgggaaagtaaggcgtgcgcatgtgggatcagcggctggcaggaggggcgcacaacgcctcaagagtacagcgagctccggatgtacagtaaataagctagcgaagccagcgcggaaggtgtttgcctgcaataaatttgaaggaatcaaggcggtggagtgaacgcacagcgtcctaaacgtacccaccggctgcgccacacaggacccagacgcaagcgcccaacccgtcaccgtccgccacatgcacaacaggcactacagagcatccaagggcgggggacgaggcccagcctgtgaccaaaggggggcgcgaccatccacccaactagccctaagtgcagacgtggtaggtggactaccacgagacctacacacaacgcacatacgcgatgctgactacccaaccacgcgcaaacacacgtc

SEQ ID NO: 361122 - DNA, 1158 bp, Homo Sapiens
  misc_feature (365)..(382): n is a, c, g, or t
ttcccgccccaggggtgagccactggatttttaaaaaccctgaaagtgaatggtggaaaatatgataaaaaatgggggatggttaatttagggcacacttaaaccacaattttaatcttgcaaaaaccatggttttctttctggtagtcaaccctgggaaaaagctaaacctgcaagtgttggtggttcccagaaacccacacacccatggctttttccactgtctagatgttaactctctcttgtccctcgcctttgtctacacattaactcactttgcccttaagctggggccctgaaaggagatatcatatctacagctgagaagggggaaaaaagaaaatctggttacaatccaggctttnnnnnnnnnnnnnnnnnnctgggcaagagaagaggaaatcaggaaaatctgcattttgtagatttccagggtcagtctgcaaagcgacgggactgaccccatctgagagtcgggtcaggcctggcttcaagaaccaggaacctcaaaagccagaatcaggcctggaattttgctttcggctttgagtttcctccctttgcggtgacactgccccgtaattaaaatgaccacgggaaggtgggaggaatgaggaacaccaggatgactcttcagcaatgcatgtaatacccactcccccaccacacacacacttataatcattcccagcaagatcaccacagcatacaccacatattgcagaaacagtgcagggcagcacttggcataaaatggattccgtcaaatctctttcaaggagtaaaaccattacgtaaggcagtttcagcaaaagaagggccccaatgtcatagaatcaggggtaggtcagggcatagctctttagagatcatctcaataaatgcactaatggccaatttttacaaagcagaacaaatatctgcaaaccagccaggcacacttatgaccaaggttgggtaatgggaggagagatgctttttgagcagagtaaaaagagagggggagaagttattgtgggtcaaatctatgtctccattgttgaaaaaaatgaattttgtcaaaataaaagcactttatgctgctatccatatttccattccaaacccaaacaagaagcaataaaagccaaccccactggagaggagaaaataaaaggt

SEQ ID NO: 361123 - DNA, 1531 bp, Homo Sapiens
  misc_feature (155)..(163): n is a, c, g, or t
  misc_feature (468)..(495): n is a, c, g, or t
aggctggaccggtccggattcccgggatggaagctacacagcaacacgtataggagactctccccgagatcttctagggagtgacccatctatttttgtttgggaagaggaaactccgaaatgggatcgcggaagacttaaagggccaggctgannnnnnnnncctactgcaggtctctgaggctgtggttgctacagggtcaccacgagcttggcttacttgtctcatccttcccttgcctggtatcattttctcagttctcccaaaagccatgtcccggcccttgctcatcaccttcaccccagccactgaccccagcgacctctggaaggatgggcagcagcagccacagcccgagaagccagagtccaccctggatggggctgcagcccgagctttctatgaggccctgattggggatgagagcagcgctcctgactcccagagatctcagactgaacctgccnnnnnnnnnnnnnnnnnnnnnnnnnnnntaatgaaggcaccagcagcagaagcagtggcagaaggagcatcaggaagacatggacaagggagatcccttgaggctgaggataagatgactcaccggatactgagggcagcccaggagggggacctgccagaacttaggagactgctggaaccgcatgaggcaggaggagctggggggaatatcaacgcccgggatgccttctggtggaccccactgatgtgtgctgctcgagcgggccagggggcagctgtgagctatctcctgggccgtgggggctgcctgggtgggggtctgtgagctgagtggcagggatgcggctcagctcgctgaagaagctggcttccttgaggtagcccgcatggtcagggagagccatggagagacaaggagcccggaaaaccggtctcctactccctccctccagtactgcgagaactgtgacacccacttccaagattccaaccaccgcacatccactgctcacctgctgtcactgtcgcagggtcctcagcctcccaaccttccacttggggtgcccatctccagcccgggcttcaaactgctgctgagggggggctgggagccaggaatggggctgggaccccggggtgagggccgtgccaatcccatccccactgtcctcaagagagaccaggaaggactaggctacagatcagcaccccagccccgagtgacacatttcccagcttgggatacccgagctgtggctgggagggagagaccccctcgggtggccacactgagctggagggaggagagaaggagggaggagaaagacagggcttgggagcgggatctaaggacttacatgaacctcgagttctgactttggtaaagtctgaccctagtctgctgctgaagtctgaacttgggcctctgacctgggccctttgacttccccttcctgggatctgcccagatgcagatcctgaagtttttggtcaataggctctgtcttcgtgagagacgggctgagagtcagaaataaatcaaccatttgtggttaaaaaaaa

SEQ ID NO: 361124 - DNA, 1003 bp, Homo Sapiens
  misc_feature (316)..(324): n is a, c, g, or t
  misc_feature (629)..(656): n is a, c, g, or t
  misc_feature (789)..(789): n is a, c, g, or t
  misc_feature (947)..(957): n is a, c, g, or t
ggggggcaatacagttttgtgctcactgggtgaagaggctgacttagggcggcgaaaggagggagccaggctggatctctttccgcagctctcctcacgttcccctctagtcccggcgcggcgctgctgcccaggggactggcctatcctcggccaatccgctgggtccttattgcctgttgggcccctagtgcgaatcagtcccgacagagacccttgacgggcatactgtttcctccgggctcctgcctcatgaggggagaggaaaaggaaactccgaaatgggatcgcggaagacttaaagggccaggctgannnnnnnnncctactgcaggtctctgaggctgaggttgctacagggtcaccacgagcttggcttacttgtctcatccttcccttgcctggtatcattttctcaggtctcccaaaagccatgtcccggcccttgctcatcaccttcaccccagacactgaccccaacgacctctggaaggatgggcagcagcagccacagcccgagaagccagagtccaccctggatggggctgcagcccgagctttctatgacgccctgattggggatgagagcagcgctcctgactcccagagatctcagactgaacctgccnnnnnnnnnnnnnnnnnnnnnnnnnnnntaatgaaggcaccagcagcagaagcagtggcagaaggagcatcaggaagacatggacaagggagatccccttgaggctgaggataagatgactcaccggatactgagggcagcccaggagggggacctgccanaacttaggagactgctggaaccgcatggaggcagaggagctgggggggatatcaacgcccgggatgcctttctggtggacccacctggagtgtgctgctccaagcggggccagggggcacttggtgagctaatctcctgggccgtgggggctgccctnnnnnnnnnnntctggggaccttaatggcgcaggaatgccggcttcaccttcgcttc

SEQ ID NO: 361125 - DNA, 1634 bp, Homo Sapiens
  misc_feature (1549)..(1549): n is a, c, g, or t
  misc_feature (1561)..(1561): n is a, c, g, or t
  misc_feature (1568)..(1568): n is a, c, g, or t
  misc_feature (1619)..(1619): n is a, c, g, or t
cggtccggaattcccgggatcaagaggctgggaagccatcacccaccttgcactgagaaagaagacaaaggccagtatgcacagctttcctccactgctgctgctgctgttctggggtgtggtgtctcacagcttcccagcgactctagaaacacaagagcaagatgtggacttagtccagaaatacctgggaaaaatactacaacctgaagaatgatgggagccaagttgaaaagcggagaaatagtggcccagtggttgaaaaattgaagcaaatgcaggaattctttgggctgaaagtgactgggaaaccagatgctgaaaccctgaaggtgatgaagcagcccagatgtggagtgcctgatgtggctcagtttgtcctcactgaggggaaccctcgctgggagcaaacacatctgacctacaggattgaaaattacacgccagatttgccaagagcagatgtggaccatgccattgagaaagccttccaactctggagtaatgtcacacctctgacattcaccaaggtctctgagggtcaagcagacatcatgatatcttttgtcaggggagatcatcgggacaactctccttttgatggacctggaggaaatcttgctcatgcttttcaaccaggcccaggtattggaggggatgctcattttgatgaagatgaaaggtggaccaacaatttcagagagtacaacttacatcgtgttgcggctcatgaactcggccattctcttggactctcccattctactgatatcggggctttgatgtaccctagctacaccttcagtggtgatgttcagctagctcaggatgacattgatggcatccaagccatatatggacgttcccaaaatcctgtccagcccatcggcccacaaaccccaaaagcgtgtgacagtaagctaacctttgatgctataactacgattcggggagaagtgatgttctttaaagacagattctacatgcgcacaaatcccttctacccggaagttgagctcaatttcatttctgttttctggccacaactgccaaatgggcttgaagctgcttacgaatttgccgacagagatgaagtccggtttttcaaagggaataagtactgggctgttcagggacagaatgtgctacacggataccccaaggacatctacagctcctttggcttccctagaactgtgaagcatatcgatgctgctctttctgaggaaaacactggaaaaacctacttctttgttgctaacaaatactgggaggtatgatgaatataaacgatctatggatccaggttatcccaaaatgatagcacatgactttcctggaattggccacaaagttgatgcagttttcatgaaagatggatttttctatttctttcatggaacacagacaatacaaatttgatcctaaaacgaagaaaattttgactctccagaaagctaatagctggttcaactgcagggaaaaattgaacattactaatttgaatgaaaaacacatggtgtgagtcccaaaaggaggtggttttccntgaaagaactgntctattntttctcagtcattttttaaccctctagaagtcactgggatacacagaatantaatcttaattttat

SEQ ID NO: 361126 - DNA, 1200 bp, Homo Sapiens
  misc_feature (914)..(914): n is a, c, g, or t
  misc_feature (942)..(942): n is a, c, g, or t
  misc_feature (956)..(956): n is a, c, g, or t
ggcctgacgtcggcggagggaagccggcccaggctcggtgaggaggcaaggttctgaggggacaggctgacctggaggaccagaggcccccggaggagcactgaaggagaagatctgccagtgggtctccattgcccagctcctgcccacactcccgcctgttgccctgaccagagtcatcatgcctcttgagcagaggagtcagcactgcaagcctgaagaaggccttgaggcccgaggagaggccctgggcctggtgggtgcgcaggctcctgctactgaggagcaggaggctgcctcctcctcttctactctagttgaagtcaccctgggggaggtgcctgctgccgagtcaccagatcctccccagagtcctcagggagcctccagcctccccactaccatgaactaccctctctggagccaatcctatgaggactccagcaaccaagaagaggaggggccaagcaccttccctgacctggagtctgagttccaagcagcactcagtaggaaggtggccaagttggttcattttctgctcctcaagtatcgagccagggagccggtcacaaaggcagaaatgctggggagtgtcgtcggaaattggcagtacttctttcctgtgatcttcagcaaagcttccgattccttgcagctggtctttggcatcgagctgatggaagtggaccccatcggccacttgtacatctttgccacctgcctgggcctctcctacgatgggcctgctgggtgacaatcagatcatgcccaagacaggcttcctgataatcatcctggccataatcgcaaaagagggcgactgtgcccctgaggagaaaatctgggaaggagcctgagtgtgttagaaagtgttttgaggggaggggagacagtatcctggggggatcccnagaagctgctcacccaacatttcgtgcnaggaaactacctgnagtaccggcaggtccccggcagtgatcctgcatgtatgaaattcccgggggggtccaagggccctcgtttgaaacacgcttatgtgaaggcctgcaccctatgggaaaaaatccctgggagaaccctccatttcctaccacccctggaataaaggggggtttttaaaaaaagggggaaaaatggattctaaaccccaaatttccaccacggcccccatgggggaaaggggttcttgggcccaat

SEQ ID NO: 361127 - DNA, 1067 bp, Homo Sapiens
  misc_feature (940)..(940): n is a, c, g, or t
tgggtggcgaattcggcacgagggttagagagaagcgagctgctctgaccagcagcttgggacttggcggaaggaagcaggccaggccctgtgaggagtcaaggttctgagcagacaggccaaccggaggacaggattccctggaggccacagaggagcaccaaggagaagatctgcctgtgggtccccattgcccagcttttgcctgcactcttgcctgctgccctgaccagagtcatcatgtcttctgagcagaagagtcagcactgcaagcctgaggaaggcgttgaggcccaagaagaggccctgggcctggtgggtgcacaggctcctactactgaggagcaggaggctgctgtctcctcctcctctcctctggtccctggcaccctggaggaacgtgcctgctgctgagtcagcaggtcctccccagagtcctcagggagcctctgccttacccactaccatcagcttcacttgctggaggcaacccaatgagggttccagcagccaagaaccaggagggggccaagcacctcgcctgacgcagagtccttgttccgagaagcactcagtaaccaaggtggatgacttggctcattttctgctccgcaagtatcgagccaaggagctggtcacaaaggcagaaatgctggagagagtcatcaaaaattacaagcgctgctttcctgctgatcttcggccaaagcctccgagtccctgaaggatgatctttgcgcattgacgtgaaagaagtggaccccaccagcaacacctacacccttgtcacctgcctgggccctttctatgatggcctgctggggtaataatcagatctttcccaagacaggcccttctgattatcgtcctgggcacaattgccaatgggagggcgacagcgcctcctgaaggaggaaatctgggaaggacctggggtgtnaaatgggggtgtgttttttaaagccgagtgttaccacacttttctcttgtggcgagtacactgtcaaacactctctccacccccactatgcggcgacgtatgggaaacatctccggggcgcatcaat

SEQ ID NO: 361128 - DNA, 1743 bp, Homo Sapiens
tgtgtgaacacactgggctccttccactgctacaaggcactcacctgtgagccaggctatgccctcaaggatggcgagtgcgaagacgtggatgagtgtgcgatgggcacgcacacctgccagccgggcttcttgtgccagaacaccaagggctccttctactgccaggccaggcagcgctgcatggatggcttcctgcaggatcctgaaggcaactgtgtggacatcaacgagtgcacgtcactgtccgagccatgtcggccaggcttcagctgcatcaacacggtgggctcctacacatgccagaggaacccgctgatctgcgcgcgcggctaccacgccagcgatgatgggaccaagtgtgtggacgtgaatgagtgtgagacaggtgtgcaccgctgcggtgagggccaagtgtgccacaacctccctggctcctaccgctgtgactgcaaagccggctttcagcgggatgccttcggccggggctgcatcgacgtgaatgagtgctgggcctcgccaggccgcctgtgccagcacacgtgtgagaacacactcggctcctaccgctgttcctgcgcctccgggttcctgctagcagcggacggcaagcgctgtgaagacgtgaatgagtgtgaggcccagcgctgcagccaggagtgtgccaacatctatggctcctaccagtgctactgccgccagggctaccagctggctgaggatgggcacacctgcacagacatcgacgagtgtgctcaaggcgccggcatcctctgcaccttccgctgtctcaacgtgccagggagctaccagtgtgcatgccctgagcagggctacaccatgacggccaacgggaggtcctgcaaggacgtggatgagtgtgcactgggtacccacaactgttccgaggctgagacctgccacaacatccagggtagcttccgctgcctgcgcttcgagtgtcctcccaactatgtccaagtctccaaaacgaagtgcgagcgcaccacgtgccatgacttcctggagtgccagaactcgccagcgcgcatcacgcactaccagctcaacttccagacgggcctcctggtgcctgcgcatatcttccgcattggccccgcgccagccttcacaggggacaccatcgccctgaacatcatcaagggcaatgaggagggctactttggcacgcgcaggctcaatgcctacacgggtgtggtctacctgcagcgggccgtgctggagccccgggactttgccctggacgtggagatgaagctctggaggcagggctccgtcaccaccttcctggccaagatgcacatcttcttcaccacctttgccctgtgaggtgccagcacgggcccacctgcgggtgtggcgcagcccagggctcacactgcgtgggagggactgggtcactattgtggtttttactataactttgtaaattaacttaattttgctgacttgactcctgtggcttctggacccctcctctgccccgcaggaggaagttccacggcaggtggtgcgttcccacgcaggcaccaagtggaacctttgcacggtgggccacgggcccgtggcgggtgcccctgtggggtgaggcctggggtgatgacctgaggacccagagacacgccaaccatgttggggggctcttaggacttcctctgggatgacccccgtcccccaaaggttggaccatttccattttccttgtttcccaactggggaata

SEQ ID NO: 361129 - DNA, 481 bp, Homo Sapiens
  misc_feature (365)..(405): n is a, c, g, or t
cagcacgggccacctgcgggtgtggcgcagcccagggctcacactgcgtgggagggactgggtcactattgtggtttttactataactttgtaaattaacttaattttgctgacttgactcctgtggcttctggacccctcctctgccccgcaggaggaagttccacggcaggtggtgcgttcccacgcaggcaccaagtggaagcttgcacggtgggccacggccgtggcgggtgccctgtgggtgaggctgggtgatgaccagaggacaagagacacgcgaacatgttggggctcttggactcctctggatgacccgtccccaaagttgacattccatttcatgttccactgtgattaattcnnnnnnnnnnnnnnnnnnnnnnnnnnnnnnnnnnnnnnnnntataaagtagtacatgtacattataaaaaaaagttcaactagtatgaaagggttataaagtaacagaggaaaacgc

SEQ ID NO: 361130 - DNA, 1019 bp, Homo Sapiens
  misc_feature (804)..(804): n is a, c, g, or t
  misc_feature (843)..(843): n is a, c, g, or t
acacattggtgcttctgtccatctggagagttttgcattaacagtaaagaggaagtttggcttgtgtttaaaatgatgtcactgcaatgaagtatctcaagttgatgctggcataacagactgccactgtcacagctgttagcagtaatgcattacaaccctgaagttaatcactatttcctgcttccttaggaatatgtgtgtcttctgatcaaaatcatttccgaggagaaattgaggaaaccatcactgaaagctttggtaatgatcatagcaccttggatgggtattccagaagaaccaccttgtcttcaaaaatgtatcacaccaaaggtaaggatgttaagactcattcttagcacatcagaagtgtcttttgaattattttagtgaaacgatgcaggtttagcagtaactatgtacttttttcctactgtcttctccttcgtaggacaagaaggttctgtttgtctccggtcatcagactgtgcctcaggattgtgttgtgctagacacttctggtccaagatctgtaaacctgtcctgaaagaaggtcaagtgtgtaccaagcataggagaaaaggctctcatggactagaaatattccagcgttgttactgtggagaaggtctgtcttgccggatacagaaagatcaccatcaagccagtaattcttctaggcttcacacttgtcagagacactaaaccagctatccaaatgcagtgaactccttttatataatagatgctatgaaaaccttttatgaccttcatcaactcaatcctaaagatataccaagttcntgggggtttcagttaagcatttccaataacaccttccanaaacctggagtgtaagagctttgtttctttatggaactcccctgtgattgcagtaaattactgtattgtaaattctcagtgtggcacttacctgtaaatggcatgaaacttttaattatttttctaaaggtgctgcactgcctattttttcctcttggtaatggaaaatttttgaa

SEQ ID NO: 361131 - DNA, 1126 bp, Homo Sapiens
ggtttcgtggggacccaggcttgcaaagtgacggtcattttctctttctttctccctcttgagtccttctgagatgatggctctgggcgcagcgggagctacccgggtctttgtcgcgatggtagcggcggctctcggcggccaccctctgctgggagtgagcgccaccttgaactcggttctcaattccaacgctatcaagaacctgcccccaccgctgggcggcgctgcggggcacccaggctctgcagtcagcgccgcgccgggaatcctgtacccgggcgggaataagtaccagaccattgacaactaccagccgtacccgtgcgcagaggacgaggagtgcggcactgatgagtactgcgctagtcccacccgcggaggggacgcaggcgtgcaaatctgtctcgcctgcaggaagcgccgaaaacgctgcatgcgtcacgctatgtgctgccccgggaattactgcaaaaatggaatatgtgtgtcttctgatcaaaatcatttccgaggagaaattgaggaaaccatcactgaaagctttggtaatgatcatagcaccttggatgggtattccagaagaaccaccttgtcttcaaaaatgtatcacaccaaaggacaagaaggttctgtttgtctccggtcatcagactgtgcctcaggattgtgttgtgctagacacttctggtccaagatctgtaaacctgtcctgaaagaaggtcaagtgtgtaccaagcataggagaaaaggctctcatggactagaaatattccagcgttgttactgtggagaaggtctgtcttgccggatacagaaagatcaccatcaagccagtaattcttctaggcttcacacttgtcagagacactaaaccagctatccaaatgcagtgaactccttttatataatagatgctatgaaaaccttttatgaccttcatcaactcaatcctaaggatatacaagttcctgtgggttccgcttaagcattccaataacaccttccaaaaatcctggagtgtacagagctttgttttctttatgggactcctcctggcgattgcagtaaaattactggtattggaaaatttctcaggggtgggcaccttaccctggtaaatggc

SEQ ID NO: 361132 - DNA, 945 bp, Homo Sapiens
aggactctgggaccgcagggggctcccggaccctgactctgcagccgaaccggcacggtttcgtggggacccaggcttgcaaagtgacggtcattttctctttctttctccctcttgagtccttctgagatgatggctctgggcgcagcgggagctacccgggtctttgtcgcgatggtagcggcggctctcggcggccaccctctgctgggagtgagcgccaccttgaactcggttctcaattccaacgctatcaagaacctgcccccaccgctgggcggcgctgcggggcacccaggctctgcagtcagcgccgcgccgggaatcctgtacccgggcgggaataagtaccagaccattgacaactaccagccgtacccgtgcgcagaggacgaggagtgcggcactgatgagtactgcgctagtcccacccgcggaggggacgcaggcgtgcaaatctgtctcgcctgcaggaagcgccgaaaacgctgcatgcgtcacgctatgtgctgccccgggaattactgcaaaaatggaatatgtgtgtcttctgatcaaaatcatttccgaggagaaattgaggaaaccatcactgaaagctttggtaatgatcatagcaccttggatgggtattccagaagaaccaccttgtcttcaaaaatgtatcacaccaaaggacaagaaggttctgtttgtctccggtcatcagactgtgcccccagggattgtgtttgtgctagacacttcctgggtccaagatctgtaaacctgtccctgaaagaaaggtccagtggtgtacccagcaatagggagaaaaaggctctcatgggactagaaaatattcccagcggttggtaacctggggggaaaaagggcctgtccttgcccggaattccggaaaggaacccccctttcagggcccaggaaattccttctaagggcttt

SEQ ID NO: 361133 - DNA, 982 bp, Homo Sapiens
ctaggtgcgaggcccggctgttaatcggcacgaggccctgccctcaggactctgggaccgcagggggctcccggaccctgactctgcagccgaaccggcacggtttcgtggggacccaggcttgcaaagtgacggtcattttctctttctttctccctcttgagtccttctgagatgatggctctgggcgcagcgggagctacccgggtctttgtcgcgatggtagcggcggctctcggcggccaccctctgctgggagtgagcgccaccttgaactcggttctcaattccaacgctatcaagaacctgcccccaccgctgggcggcgctgcggggcacccaggctctgcagtcagcgccgcgccgggaatcctgtacccgggcgggaataagtaccagaccattgacaactaccagccgtacccgtgcgcagaggacgaggagtgcggcactgatgagtactgcgctagtcccacccgcggaggggacgcaggcgtgcaaatctgtctcgcctgcaggaagcgccgaaaacgctgcatgcgtcacgctatgtgctgccccgggaattactgcaaaaatggaatatgtgtgtcttctgatcaaaatcatttccgaggagaaattgaggaaaccatcactgaaagctttggtaatgatcatagcaccttggatgggtattccagaagaaccaccttgtcttcaaaaatgtatcacaccaaaggacaagaaggttctgtttgtctccggtcatcagactgtgcctcaaggattgtgttgtgctagacacttctggtccaagatctgtaaacctgttcctggaaagaaggtcaagtgtgtaccaaagcatagggagaaaaaggctctcatggactagaaatattccagcgttgttaactgtgggagaaagtctgtcttgccgggatacaggaaagaatcacccatcaagcccagtaatttcttctagggcctccccctctctcgg

SEQ ID NO: 361134 - DNA, 1021 bp, Homo Sapiens
gccaggggaaccagtttggatatccgggacccaaaaggggccaagggaaaggtcctgggggcctgaaagtggggaacaaggggcaccaaaaaaagccaagtgggggcaggtggtgcttggccaaaggtcagaggctgatgcaaacagggccctctttctcccccagggcccagcctcctgtcccagcctgggcactgcccagagtggatggcattggtccggatgctgttctgtctctgcttggacaccttcgcaaaagatttctttcaggacagtctcaaaggctagctcaacattggtagagtccagggctgaggtctccaggaagagcagtccattgttttcagcgaacattcgggcctcctcagtgggcacttcccgggcctggctgaggtcacttttgttacccacgagcatgacgacgatcgtggcttcagcatggtcatagagctccttcagccatcgctccaccacagcataggtctggtgcttggttaggtcaaacaccaggagggcccccactgcaccacgatagtacgccgaggtgatggctcggtaccgctccaggccagctgtgtcccagatctgagccttgacagcagcggtgcccaacatcacagtgcgggtggagaactcaaccccgatggtggtgcggctgtcgtggctgaactcattgcgcgtgaatcgggagagtagattggtcttccccacacctgattcgccgatcagcaccaccttgaagacaaagttataatcttcctcagttccattccccatcttggctccgcatggagggtgcaggtgtcttcggggacagaggcgacaaatctgtgtgttggctcaatgccctcaaccctcagctctcaaaagatctggtcctgcccctcctctcattgggggtaaggggacttctgcagccagagggattgggggccaactcaaggttaggcagggcctagggaggatcagctctggcaggtgggggtgctgtaaggaagcagagaggacggaagctgagccc

SEQ ID NO: 361135 - DNA, 900 bp, Homo Sapiens
gggagcttccgtcctctctgcttccttacagcacccccacctgccagagctgatcctccctaggccctgcctaaccttgagttggcccccaatccctctggctgcagaagtccccttacccccaatgagaggaggggcaggaccagatcttttgagagctgagggttgagggcattgagccaacacacagatttgtcgcctctgtccccgaagacacctgcaccctccatgcggagccaagatggggaatggaactgaggaagattataactttgtcttcaagggtactatcgtggtgcagtgggggccctcctggtgtttgacctaaccaagcaccagacctatgctgtggtggagcgatggctgaaggagctctatgaccatgctgaagccacgatcgtcgtcatgctcgtggggtaacaaaagtgacctcagccaagcccgggaagtgcccactgaggaggcccgaatgttcgctgaaaacaatggactgctcttcctggagacctcagccctggactctaccaatgttgagctagcctttgagactgtcctgaaaggttagagcctacctttattctgcacccctattccatccccgtggcttctacaggcagcagtaggaatgcagacactcagccctcaccccagctaatttctcagctcctctgtgggtcctggcaccactgcctgtccccctcagtccctccccagtgcctcccactcagtctggagctcagggagggaacaggccacactccccatggggctgactcttggttccttctccacccaagtaagtagaaggggacccctatgtccacacttcatttccttcctgcaaaacctcctgcaagtgtggccaccccccatgctcagaaggggcatgcagtagttgat

SEQ ID NO: 361136 - DNA, 1034 bp, Homo Sapiens
ggtccgaattccctgcatcactgtgtggggctggcggccggcgggagaggcggccggcctggactggcccgagagggatcccggttcccagaacagacctaggaggcggcctcgagggcggacggcagggagggccagcatgccccgactgctgcaccccgccctgccgctgctcctgggcgccacgctgaccttccgggcgctccggcgcgcgctctgtcgcctgcccctacccgtgcacgtgcgcgccgaccccctgcgcacctggcgctggcacaacctgctcgtctccttcgctcactccattgtgtcggggatctgggcactgctgtgtgtatggcagactcctgacatgttagtggagattgagacggcgtggtcactttctggctatttgctcgtttgcttctctgcggggtatttcatccacgatacggtggacatcgtggctagcggacagacgcgagcctcttgggaataccttgtccatcacgtcatggccatgggtgccttcttctccggcatcttttggagcagctttgtcggtgggggtgtcttaacactactggtggaagtcagcaacatcttcctcaccattcgcatgatgatgaaaatcagtaatgcccaggatcatctcctctaccgggttaacaagtatgtgaacctggtcatgtactttctcttccgcctggcccctcaggcctacctcacccatttcttcttgcgttatgtgaaccagaggaccctgggcaccttcctgctgggtatcctgctcatgctggacgtgatgatcataatctacttttcccgcctcctccgctctgacttctgccctgagcatgtccccaagaagcaacacaaagacaagttcttgactgagtgaggggcacagagcctgggacaacaaaaacggacaaggccagaaacagcttcatatggacactgggacttagccccaagcctgggtgtcctctgaggccagcctctccaccttctgagcctgcgcccacactattgaaaacactaatgaaagt

SEQ ID NO: 361137 - DNA, 1370 bp, Homo Sapiens
ctgatgatgagaagtccactgccaagagtcttctggtgaaggctgagaagcgcaagtctcctcccaaggagtatatggatgaggaaggtgtgagatatgtcccagtgcgtccaagaccccccattactttgcttcgtcactatcggaacccctggaaagctgcttaccaccactttcagaggtacagtgacgtccgggtcaaagaggagaagaaagctatgctgcaggaaatagctaatcagaaaggagtatcctgtcgtgctcaaggctggaaagtccacctctgtgctgcccagttactacagctgacgaatctagaacatgatgtctatgaaagacttactaacctgcaggaagggattatcccaaagaaaaaagcagcaacagatgatgatctccaccgaataaacgaactgatacagggaaatatgcagaggtgtaaacttgtgatggatcaaatcagtgaagccagagactccatgcttaaggttttagatcataaagaccgtgtcctgaagctgcttaacaagaacgggactgtcaaaaaagtgtccaaattgaagcgaaaggaaaaagtctagacccagaacaatcaggagattggaagcaaatttatgaagaatgatggtgggggtgggggaagggttcgggttttttccaaagtggaacattgaaataaaggaagtgttccttagttcccgtgtgaaagcagaggaacccatgaacatccaagggcgtgaacaggatcagagctgactggacatagtgagctgccttcttgcgttcgggtgcacccctgttaaacctgatctgtgtcataagtgactccggatgcatcagtgtccaccagttggaagcaatgacaaggatggctggctggtgtttttcagccttccggtttatagactgtatttatctagtggattcctgcaggccccatactgagcctggactgaaagtatccactcggaccatctgttatctctctacactgaaaataaaacctcttccacccaccccattcggttcttctgcctgaccttcaaatgcccatgttggccttttacagcagtgccacggcaccaagcgagctgccacatctcacactctaaagggtttgaactattagttcttgtcattttttaaaaaaaaccattcccaagtgaaattgttatatcgtctgtcttgcgtgtgtcagaactgggtttttgtggaggttcagagcaggcaacaccataagttgctctcagatccttgttctgaagtacattcttggttatctgtacttctgtagctggtgtgatgctgttaattgtatgtaccacacatctccagacgttaataaaggactcaaagaggtttttgtaaaa

SEQ ID NO: 361138 - DNA, 2616 bp, Homo Sapiens
  misc_feature (835)..(835): n is a, c, g, or t
gctgggtggcgattcggacgagggacattgccgggaccacaccgaaggcaagaactgtgagcggtgtcagctgcactatttccggaaccggcgcccgggagcttccattcaggagacctgcatctcctgcgagtgtgatccggatggggcagtgccaggggctccctgtgacccagtgaccgggcagtgtgtgtgcaaggagcatgtgcagggagagcgctgtgacctatgcaagccgggcttcactggactcacctacgccaacccgcagggctgccaccgctgtgactgcaacatcctggggtcccggagggacatgccgtgtgacgaggagagtgggcgctgcctttgtctgcccaacgtggtgggtcccaaatgtgaccagtgtgctccctaccactggaagctggccagtggccagggctgtgaaccgtgtgcctgcgacccgcacaactccctcagcccacagtgcaaccagttcacagggcagtgcccctgtcgggaaggctttggtggcctgatgtgcagcgctgcagccatccgccagtgtccagaccggacctatggagacgtggccacaggatgccgagcctgtgactgtgatttccggggaacagagggcccgggctgcgacaaggcatcaggccgctgcctctgccgccctggcttgaccgggccccgctgtgaccagtgccagcgaggctactgcaatcgctacccggtgtgcgtggcctgccacccttgcttccagacctatgatgcggacctccgggagcaggccctgcgctttggtagactccgcaatgccaccgccagcctgtggtcagggcctggngctggaggaccgtggcctggcctcccggatcctagatgcaaagagtaagattgagcagatccgagcagttctcagcagccccgcagtcacagagcaggaggtggctcaggtggccagtgccatcctctccctcaggcgaactctccagggcctgcagctggatctgcccctggaggaggagacgttgtcccttccgagagacctggagagtcttgacagaagcttcaatggtctccttactatgtatcacaggaagagggagcagtttgaaaaaataagcagtgctgatccttcaggagccttccggatgctgagcacagcctacgagcagtcagcccaggctgctcagcaggtctccgacagctcgcgccttttggaccagctcagggacagccggagagaggcagagaggctggtgcggcaggcgggaggaggaggaggcaccggcagccccaagcttgtggccctgaggctggagatgtcttcgttgcctgacctgacacccaccttcaacaagctctgtggcaactccaggcagatggcttgcaccccaatatcatgccctggtgagctatgtccccaagacaatggcacagcctgtggctcccgctgcaggggtgtccttcccagggccggtggggccttcttgatggcggggcaggtggctgagcagctgcggggcttcaatgcccagctccagcggaccaggcagatgattagggcagccgaggaatctgcctcacagattcaatccagtgcccagcgcttggagacccaggtgagcgccagccgctcccagatggaggaagatgtcagacgcacacggctcctaatccagcaggtccgggacttcctaacagaccccgacactgatgcagccactatccaggaggtcagcgaggccgtgctggccctgtggctgcccacagactcagctactgttctgcagaagatgaatgagatccaggccattgcagccaggctccccaacgtggacttggtgctgtcccagaccaagcaggacattgcgcgtgcccgccggttgcaggctgaggctgaggaagccaggagccgagcccatgcagtggagggccaggtggaagatgtggttgggaacctgcggcaggggacagtggcactgcaggaagctcaggacaccatgcaaggcaccagccgctcccttcggcttatccaggacagggttgctgaggttcagcaggtactgcggccagcagaaaagctggtgacaagcatgaccaagcagctgggtgacttctggacacggatggaggagctccgccaccaagcccggcagcagggggcagaggcagtccaggcccagcagcttgcggaaggtgccagcgagcaggcattgagtgcccaagagggatctgagagacataaaacaaaagtatgctgagttgaaggaccggttgggtcagagttccatgctgggtgagcagggtgcccggatccagagtgtgaagacagaggcagaggagctgtttggggagaccatggagatgatggacaggatgaaagacatggagttggagctgctgcggggcagccaggccatcatgctgcgctcagcggacctgacaggactggagaagcgtgtggagcagatccgtgaccacatcaatgggcgcgtgctctactatgccacctgcaagtgatgctacagctttcagcccgttgccccactcatctgccgccctttgctttttggttggggggaaaaattgggttggaaatgctttcccatcctccagggagac

SEQ ID NO: 361139 - DNA, 1109 bp, Homo Sapiens
ccaaacgtgaatagaaaggaatggaagacacacttcaccagcagctggcatcccaggaccagggaaagaagttcctggtcacaatggaatcatttccccgtagtgactgccgtgattgtgctccagtgcccatctcgtgcagatgctcatctcggtctctcgaggagaagtttcaagagatggaaagcaggagggacctggtttaagcaagcagcaagacacagctccttcacaccctctgcagcagcatctgcttggtgttatacaaagagcggacacattttcaaaacgttcattcccccaatccttccttgttctccatcgtacatctggttagcatcactgtagctagtctcacccatggattattggttatgacatattcacttttcataggtggccaagcttgcaaaagtaaaaccaagtgctgaaattcagcctcgtggtgactagattccaggagttccatgaatagacagtagcggttctcttcattctcaatgtcagctatgtctacctgtctctggggccaggaggctttgagaatggcttcagttctaaagaacacgaggagcttgctgtcctcctcagtcaggtgaaatgattgccccaaaatctgcagcacgtgaatgcggggccgcaccggccaggcgtcatcagcacagaaaggccgcagccactccagcaggtcctcaggtgaaaccagctcctcacccttgtccacactggcgtggactgctgcaacaacaccttccaggaccttcagtgggtcccttggccccaccaaggtcagcactgccaccactcaatgcagaaattattttcatgattgcactctgcactatatccttgggtgagatgtcaagagggccaactgccacctctagcagctgctgaatcattgctagaggctgaccatctaaacaaatagccacagcttcatcatgaagtttctctttgtctgatcgggacagatcatagaggtgactgtatttttgcagtgtttcctgctcactattcttcagagaaaggatgaagctgtggctcagggtttccaggtgggcaagtgatttctccagatgattcaaagtatctgccataggtaactt

SEQ ID NO: 361140 - DNA, 1164 bp, Homo Sapiens
  misc_feature (152)..(172): n is a, c, g, or t
  misc_feature (1124)..(1124): n is a, c, g, or t
  misc_feature (1130)..(1130): n is a, c, g, or t
  misc_feature (1146)..(1146): n is a, c, g, or t
catcctaggactcagctgctgcattggtcatggggacagggggatggagtacacaacacagtcatatattaatcgtcccatcagtaatttgtttctccagcggtcattcctttacttttagggtatgctgtagcactctcgttctgagcagnnnnnnnnnnnnnnnnnnnnngtttaagttcccatggcattgcctaaaagttttattttacacgttagtaacacatttccatcctatgtgtcttttacttcagaaacaaagaaaagagtggtagccagcccgcctgcctggatcacatgcaggacagaagagccttgtccctcaaagcccaccagtcagagagctacctgccgattggctgcaagctgccacctcagtcctcgggtgtggacacaagcccctgcccaaactcacctgtgttcaggacgggaagcgagcctgccctgagcccagcagtggttcggagggtctcctcagacgccagggctggggaggcgctgaggggatcagacagtcaactgtgccctaagcccccgcctaagccctgcaaggtgccgttcctcaaggttccctcgtctccctctgcctggctcaactcagaggccaactactgtgaactgaacccagcgtttgccacaggctgcggcaggggagcaaagctaccctcatgttgcccaggggtaagccacacagaactgcttcacagccaagcagaatgaggcgccaggtccccggaactctggcgtcaactacttgatccttgatgatgatgacagggaaagaccttgggaacctgcggcactcagatggagaaggggcagtgggacaagggcgagtttgtgacgcccctcctggagactgtctcctccttcaggcccaacgagtttgagtcaaagttccttccccctgagaataagcccctggaaacagcaatgttgaaacgtgcaaaagaactgttcaccaacaacgaccccaaggtcattcgcccagcacgtacttgaggcatgggacttgcagggttgctaggatacttgggagtctcttgaagagatgagggaggaacatggggggtgagctcaggcctgggaacttcattgacctttgccttcacgggacacccagntgcgcntggggacattattttnaaaaggacacaacacatt

SEQ ID NO: 361141 - DNA, 1376 bp, Homo Sapiens
atattttcaggttgcccgatgttatcgagatgaaggttcaagaccagacagacagcctgagtttactcagattgacatagagatgtcatttgtagaccagactgggatccagagtttaattgagggtttgctccagtattcctggcccaatgacaaagatcctgtggttgttccttttcctactatgacttttgctgaggtgctggccacctatggaactgataaacctgacactcgctttggaatgaagattatagatatcagtgatgtgtttagaaacacagagattggatttcttcaagatgcacttagtaagccccatggaactgtgaaagccatatgtatccctgaaggagcaaaatacttaaaaaggaaagacattgaatccattagaaactttgcagctgaccattttaatcaggaaatcttacctgtattccttaacgccaatagaaactggaattctccagttgctaatttcataatggagtcacaaagactggaattaatcagactaatggagacccaagaggaagatgtggtcctactaactgctggagagcacaataaagcatgctctttgttaggaaaattacgactggaatgtgctgaccttctagaaacaagaggagtggtgctccgtgaccccactctgttctctttcctttggggtggtagattttcccactcttcctgcccaagggaggaaaatcccagaagagctggaatcggcccaccacccatttactgctccccaccccagtgacatacatctcctgtacactggagcccaaaaaggcccgtagccaacactatgacctgggtttaaatggcaatgaaataggaggtggttcaattcgaattcacaatgcagagctgcagcgttatatcctggcaaccttactaaaggaggatgtgaaaatgctctcccatctgctccaggctttagattatggggcaccccctcatggaggaattgccttagggttagacagactgatatgccttgtcactggatctccaagcatcagagatgtcatagccttcccaaagtccttccggggacatgacctcatgagcaataccccagattctgtccctcctgaggaactgaagccctatcatatccgagtctccaagccaacagactcccaagcagaaagagctcatttgaatcatgcataccatgcagaaagttgagcttttaggttttggtcctctttgcttccccaggctaaagtcagatcctagagttctgccccaggtctaacaatccagccttttagatggaaagaatcccaggcaacattctttcccccccaacgaaaaaacccgataaaagaataccccaattttgaacttgatttcatggcctt

SEQ ID NO: 361142 - DNA, 968 bp, Homo Sapiens
aatgttggatgattgactctgaatgtcggccaagattccgggagttggtgtctgaattctcccgcatggccagggacccccagcgctttgtggtcatccagaatgaggacttgggcccagccagtcccttggacagcaccttctaccgctcactgctggaggacgatgacatgggggacctggtggatgctgaggagtatctggtaccccagcagggcttcttctgtccagaccctgccccgggcgctgggggcatggtccaccacaggcaccgcagctcatctaccaggagtggcggtggggacctgacactagggctggagccctctgaagaggaggcccccaggtctccactggcaccctccgaaggggctggctccgatgtatttgatggtgacctgggaatgggggcagccaaggggctgcaaagcctccccacacatgaccccagccctctacagcggtacagtgaggaccccacagtacccctgccctctgagactgatggctacgttgcccccctgacctgcagcccccagcctgaatatgtgaaccagccagatgttcggccccagcccccttcgccccgagagggccctctgcctgctgcccgacctgctggtgccactctggaaaggcccaagactctctccccagggaagaatggggtcgtcaaagacgtttttgcctttgggggtgccgtggagaaccccgagtacttgacacccccagggaggagctgcccctcagccccaccctcctcctgccttcagcccagccttcgacaacctctattactgggaccaggacccaccagaagcggggggctccacccagcaccttcaaagggacacctacggcagagaacccagagtacctggggtctgggacgtgcccagtgtggaacccagaaggcccaagtccgcaaaaacccctgaaggggtcctcagggaaacagggaaagcctt

SEQ ID NO: 361143 - DNA, 1290 bp, Homo Sapiens; identical to SEQ ID NO: 123656
  misc_feature (964)..(1002): n is a, c, g, or t
  misc_feature (1028)..(1028): n is a, c, g, or t
  misc_feature (1042)..(1042): n is a, c, g, or t
  misc_feature (1126)..(1128): n is a, c, g, or t
  misc_feature (1137)..(1137): n is a, c, g, or t
  misc_feature (1220)..(1230): n is a, c, g, or t

SEQ ID NO: 361144 - DNA, 1916 bp, Homo Sapiens; identical to SEQ ID NO: 251968
  misc_feature (607)..(607): n is a, c, g, or t
  misc_feature (1770)..(1770): n is a, c, g, or t

SEQ ID NO: 361145 - DNA, 1066 bp, Homo Sapiens; identical to SEQ ID NO: 251969
  misc_feature (849)..(849): n is a, c, g, or t

SEQ ID NO: 361146 - DNA, 963 bp, Homo Sapiens
  misc_feature (384)..(384): n is a, c, g, or t
atgcccctctagcccttccggtcaaagttgggagatcacttcccagttttcagacccccgtgtgcgggcactcccctcaggggtgtccttcaacccccatcccaacacctgccagggtgcaggggtggctgaagtctttataaagctgttcagcgatgggggctacagcctgagcatcctggacacccgccagggtggaaggtctgcaggaccacatcccagcccaccactggcgggaggttaggccgtggctcaggccgtagtgggggaagctgtgggctctgaaccccgtaggcctgccggaagccttgttccagggccgagggctccacctccagccccaggggcccgggcctgggtggcataggcctcccctaaggggtnggcggagcctgagcagcgtgtccttcacatcccacgtcagcagtcgtatctgcagccggtgtgccatggaggaggccaagtccaccccagttctgcctcaggtcccacggtgggtcccaggggaagctgagctggataagaccacctctgcgcaacctaacaatcacctctttccaggccttgtgggtcagatttgctggctaacatgaagcacttgggaaatgtcttcacagcacaagatcccaaggtcacagtgagtcagtggcacagccaggaccagaacccaaacttccagactctctggccagttcttccacttttctccccacctccagggctcgggaaaggcgaagtccaggagcccggacctgacgcagaatgtctatagctgccgtcggcagcgtgagctggggcggcggtcctaggggccttggccgcggccgaccccttgggtccccttctcagctgtagggcgtccacggctccgggccggttcctgggcccaggacccacctgactcacaaggaagcagattgaaaacgcagccgcaaggcccgcgatcccggaaattccggaccg

SEQ ID NO: 361147 - DNA, 1144 bp, Homo Sapiens
tatctggtttccccatatgagagccaaacccgccaagggccctccctggaaaaaatgcgggggggtttcgggctttggggcccagccacagcaagccttgggagggttcagccaccaaaggttgaaaggttgttcaacgcaggcccaagggcccttcccggggatgccccttcttagccgttccggtccaaaagttgggagatccactgcccagtcttcagaacccccgtgtggggacactccctcaggggtgtccttcagcccccatcccaacacctgcccaggtgcaggggtggctgaagtctttataaagctgttcagcgatgggggctacagcctgagcatcctggacaccccgccaggttggaaggtttgcaggaccacatccaggccaccactggcgggaggttaggccgtggctcaggccgtagttggggaagctgtggctctgagccctgtatgcctgcctgaagccttgttccagggctgagggctccacctccagcccatgggcccgggccttggtggcataggcctcccctaaggggtggcggagcctgagcagcgtgtccttcacatcccacgtcagcagtcgtatctgcagccggtgtgccatggaggaggccaagtccaccccagttctgcctcaggtcccacggtgggtcccaggggaagctgagctggataagaccacctctgcgcaacctaacaatcacctctttccaggccttgtgggtcagatttgctggctaacatgaagcacttgggaaatgtcttcacagcacaagatcccaaggtcacagtgagtcagtggcacagccaggaccagaacccaaacttccagactctctggccagttcttccactgtaccatgagatatatttggattttaaaaattggtgaaccttttctccccacctccagggctcgggaaaggcgaagtccaggagcccggacctgacgcagaatgtctatagctgccgtcggcagcgtgagctggggcggcggtcctaggggccttggccgcggccgaccccttgggtccccttctcagctgtagggcgtccacggctccgggccggttcctaggccaaggagacaccggaatcacaaggaagcagatgaaatccggaaatccggacc

SEQ ID NO: 361148 - DNA, 922 bp, Homo Sapiens
gggccttgcggctgcgttttcatctgcttccttgtgagtcaggtgggtcctgggcccaggaaccggcccggagccgtggacgccctacagctgagaaggggacccaaggggtcggccgcggccaaggcccctaggaccgccgacccagctcacgctgccgacggatgaatagacattctgcgtcaggtccgggctcctggacttcgcctttcccgagccctggaggtggggagaaaaggatcttgtgctgtgaagacatttcccaagtgcttcatgttagccagcaaatctgacccacaaggcctggaaagaggtgattgttaggttgcgcagaggtggtcttatccagctcagcttcccctgggacccaccgtgggacctgaggcagaactggggtggacttggcctcctccatggcacaccggctgcagatacgactgctgacgtgggatgtgaaggacacgctgctcaggctccgccaccccttaggggaggcctatgccaccaaggcccgggcccatgggctggaggtggagccctcagccctggaacaaggcttcaggcaggcatacagggctcagagccacagcttccccaactaccgcctgagccacggcctaacctccccgccagtggtggctggatgtggtcctgcagaccttccacctggcgggtgtccaggatgctcaggctgtagccccccatcgctgaacagcttttataaagacttcagccacccctgcacctggcaggtggttggatgggggctgaggacacccctgaaggagtgccgcacacgggggtcttgagactgggcagtgatctccaaactttgaacgaacggctaaaagggcatccctggaagggcctttggccctggctgaaccacttcgactttgtggctgaacttccgaaggctgct

SEQ ID NO: 361149 - DNA, 946 bp, Homo Sapiens
gcttacctgcagagactctctgggctcaccagggaggctgcccagaccacagttgcaccaaccactgctaacaagatagctcccactgtttggaaattggcagatcgctccaagatctacatggctgacctggaatctgcactgcactacatcctgcggatagaagtgggcaggttcccggtcctggaagggcagcgcctggtggccctgaaaaagtttgtggcagtgctggccaagtatttccctggccggcccttagtccagaacttcctgcactccgtgaatgaatggctcaagaggcagaagagaaataaaattccctacagtttctttaaaactgccctggacgacaggaaagagggtgccgttcttgccaagaaggtgaactggattggctgccaggggagtgagccgcatttccggggctttccctgctccctgtgggtcctcttccacttcttgactgtgcaggcagctcggcaaaatgtagaccactcacaggaagcagccaaggccaaggaggtcctcccagccatccgaggctacgtgcactacttcttcggctgccgagactgcgctagccacttcgagcagatggctgctgcctccatgcacccgggtggggagtcccaacgccgctgtcctctggctctggtctagccacaacagggtcaatgctcgccttgcaggtgcccccagcgaggaccccccagttccccaaggtgcagtggccacccccgtgaactttgttctgcctggccacaatgaaacgcctggatgtgccccgtgtggggacgtggaaaccaccctcaaacttcctcaaggcccaactttctcccccaagcaacattcatcccgggacttcccctggcagcctggggtcaacctggccccgggagggaatgtgtgcaaaaatggtgggcaaaccgccccccaaaagactggc

SEQ ID NO: 361150 - DNA, 1417 bp, Homo Sapiens
  misc_feature (1290)..(1290): n is a, c, g, or t
  misc_feature (1348)..(1348): n is a, c, g, or t
tgggctcaccagggaggctgcccagaccacagttgcaccaaccactgctaacaagatagctcccactgtttggaaattggcagatcgctccaagatctacatggctgacctggaatctgcactgcactacatcctgcggatagaagtgggcaggttcccggtcctggaagggcagcgcctggtggccctgaaaaagtttgtggcagtgctggccaagtatttccctggccggcccttagtccagaacttcctgcactccgtgaatgaatggctcaagaggcagaagagaaataaaattccctacagtttctttaaaactgccctggacgacaggaaagagggtgccgttcttgccaagaaggtgaactggattggctgccaggggagtgagccgcatttccggggctttccctgctccctgtgggtcctcttccacttcttgactgtgcaggcagctcggcaaaatgtagaccactcacaggaagcagccaaggccaaggaggtcctcccagccatccgaggctacgtgcactacttcttcggctgccgagactgcgctagccacttcgagcagatggctgctgcctccatgcaccgggtggggagtcccaacgccgctgtcctctggctctggtctagccacaacagggtcaatgctcgccttgcaggtgcccccagcgaggacccccagttccccaaggtgcagtggccaccccgtgaactttgttctgcctgccacaatgaacgcctggatgtgcccgtgtgggacgtggaagccaccctcaacttcctcaaggcccacttctccccaagcaacatcatcctggacttccctgcagctgggtcagctgcccggagggatgtgcagaatgtggcagccgccccagaagctggcgatgggagccctggagctggaaagccggaattcaactctggaccctgggaagcctgagatgatgaagtcccccacaaacaccaccccacatgtgccggctgagggacctgaggcaagtcgacccccgaagctgcaccctggcctcagagctgcaccaggccaggagcctcctgagcacatggcagagcttcagaggaatgagcaggagcagccgcttgggcagtggcacttgagcaagcgagacacaggggctgcattgctggctgagtccagggctgagaagaaccgcctctggggccctttggaggtcaggcgcgtgggccgcagctccaagcagctggtcgacatccctgagggccagcttggagccccgagctggacggggcccgaagcantggctgcagggtgccttgggagggggccttctcttacctggacatcagccttctgtgntgggggctcctatcccctgtcccttcatgggccctgctgcccatgtacacctacttcccaggccagaaa

SEQ ID NO: 361151 - DNA, 1075 bp, Homo Sapiens
  misc_feature (90)..(116): n is a, c, g, or t
aagcaggctgtactggtctggaatatataggatgtgagcgcagcgccgaggatgaggaggtgcaacagcggctccgggccgccgccgtcnnnnnnnnnnnnnnnnnnnnnnnnnnncgcggttcccggcgctaacgcggccccgcggtcggcgctctattcgccttccgacccgctgacgctgctgcaggcggacacggtgcgcggcgcggtgctgggctcccgcagcgcctgggccgtggagttcttcgcctcctggtgcggccactgcatcgccttcgccccgacgtggaaggcgctggccgaagacgtcaaagcctggaggccggccctgtatctcgccgccctggactgtgctgaggagaccaacagtgcagtctgcagagacttcaacatccctggcttcccgactgtgaggttcttcaaggcctttaccaagaacggctcgggagcagtatttccagtggctggtgctgacgtgcagacgctgcgggagaggctcattgacgccctggagtcccatcatgacacgtggcccccagcctgtcccccactggagcctgccaagctggaggagattgatggattctttgcgagaaataacgaagagtacctggctctgatctttgaaaagggaggctcctacctgggtagagaggtggctctgggacctgtcccagcacaaaggcgtggcggtgcgcagggtgctgaacacagaggccaatggtggtgagaaagtttggtgtcaccgacttcccctcttgctaccttgctgttccggaatggctctgtcctaccgagtccccgtgcctcatggaaacccaggtccttctatacccccttacctggcaaaaacttctccgggcctcacccagggagggcttgcccaaaaccacaggcgggccccaatcccccgtgctaccaaagatcgcccccccactgttttggagaattgcgcataaacccctccaagaatcttcgagtgggtggcacctgggaatcttcgaactggggtcaaacatctcgccggcgacaagaaaatcggcacaacctctccgtcgcgctcaccgtaaacg

SEQ ID NO: 361152 - DNA, 1239 bp, Homo Sapiens
cagggccgggggcgccttccccggcggctgctgctgctgctggcgctctgtggtgcacgcggcgcggcccatgggctatttcgagctgcagctgatgcgcgctgcggaacgtgaacggggagctgctgagcggcgcctgctgtgacggcgacggccggacaacgcgcgcggggggctgcggccacgacgagtgcgacacgtacgtgcgcgtgtgccttaaggagtaccaggccaaggtgacgcccacggggccctgcagctacggccacggcgccacgcccgtgctgggcggcaactccttctacctgccgccggcgggcgctgcgggggaccgagcgcgggcgcgggccctgggccggcggcgaccaggacccgggcctcgtcgtcatccccttccagttcgcctggccgcgctcctttaccctcatcgtggaggcctgggactgggacaacgataccaccccgaatgaggagctgctgatcgagcgagtgtcgcatgccggcatgatcaacccggaggaccgctggaagagcctgcacttcagcggccacgtggcgcacctggagctgcagatccgcgtgcgctgcgacgagaactactacagcgccacttgcaacaagttctgccggccccgcaacgactttttcggccactacacctgcgaccagtacggcaacaaggcctgcatggacggctggatgggcaaggagtgcaaggaagctgtgtgtaaacaagggtgtaatttgctccacgggggatgcaccgtgcctggggagtgcaggtgcagctacggctggcaagggaggttctgcgatgagtgtgtcccctaccccggctgcgtgcatggcagtatgtgtggagccctggcagtgcaactgtgagaccaactggggcggcctgctctgtgacaaagacctgaactactgtggcagacaccacccctgcaacaaacggaggcacgtgcatcaacgccgagccatgaccagtaccagctgcacctgccctgacggactactcgggcaggaactgtgagaaagctgagcaacgcctgcacctccgaacccgtatgccaacgggggctcttggccatgaggtgccgtccggcttcgaatgcactgcccatcggggctggagcggggcccacctgtgcccttgacatcgatgaatgtggcttcaaaccctggtgcgggccggtggccacctgtgtggaaccaagtgggaccgcttttaatggcatc

SEQ ID NO: 361153 - DNA, 929 bp, Homo Sapiens
  misc_feature (529)..(537): n is a, c, g, or t
  misc_feature (895)..(895): n is a, c, g, or t
  misc_feature (903)..(903): n is a, c, g, or t
gccgtaatatgccagcatctacgccctctccatggcagtcatgctgatcctgaaagccattcgaggagttgtctttgtcaagggcacgctgcgagcttcctcccggctgcatgacgagcttttccgaaggatccttcgaagccctatgaagtattttgacacgacccccacagggaggattctcaacaggttttccaaagacatggatgaagttgacgtgcggctgccgttccaggccgagatgttcatccagaacgttatcctggtgttcttctgtgtgggaatgatcgcaggagtcttcccgtggttccttgtggcagtggggccccttgtcatcctcttttcagtcctgcacattgtctccagggtcctgattcgggagctgaagcgtctggacaatatcacgcagtcacctttcctctcccacatcacgtccagcatacagggccttgccaccatccacgcctacaataaagggcaggagtttctgcacagataccaggagctgctggatgacaaccaagctccnnnnnnnnngtttacgtgtgcgatgcggtcggctggctgtgcggctggacctcatcagcatcgccctcatcaccaccacgggggctgatgatcgttcttatgcacgggcagattcccccagcctatgcgggtctcgccatctcttatgctgtccagttaacggggctgttccagtttacggtcagactggcatctgagacagaagctcgattcacctcgggtggagaggatcaatcactacattaagactctgtccttggaagcacctgccagaattaagaacaaggctccctcccctgactgggcccaggaagggaaaggtgaccttttgagaacgccagagatgaggtacccagaaaacctcccncttgtccnaaagaaagtatccctcacgatttaac

SEQ ID NO: 361154 - DNA, 1839 bp, Homo Sapiens
  misc_feature (1709)..(1709): n is a, c, g, or t
  misc_feature (1799)..(1799): n is a, c, g, or t
  misc_feature (1803)..(1803): n is a, c, g, or t
ggctggaccggtccggattcccgggatcacgtcttcccgtttctgcagcaggaggaggcccgcctcggggccctgcagcagctgcaacagcagagccaggagctgcaggaggtcctcggggagacagagcggttcctgagccaggtgctaggccgggtgctgcagctgctgccgccagggcaggtgcaggtccacaagatgaaggccgtgtacctggccctgaaccagtgcagcgtgagcaccacgcacaagtgcctcattgccgaggcctggtgctctgtgcgagacctgcccgccctgcaggaggccctgcgggacagctcgatggaggagggagtgagtgccgtggctcaccgcatcccctgccgggacatgccccccacactcatccgcaccaaccgcttcacggccagcttccagggcatcgtggatgcctacggcgtgggccgctaccaggaggtcaaccccgctccctacaccatcatcaccttccccttcctgtttgctgtgatgttcgggggatgtgggccacgggctgctcatgttcctcttcgccctggccatggtccttgcggagaaccgaccggctgtgaaggccgcgcagaacgagatctggcagactttcttcaggggccgctacctgctcctgcttatgggcctgttctccatctacaccggcttcatctacaacgagtgcttcagtcgcgccaccagcatcttccccctcggggctggagtgtggccgccatggccaaccagtctggctggagtgatgcattcctggcccagcacacgatgcttaccctggatcccaacgtcaccggtgtcttcctgggaccctacccctttggcatcgatcctatttggagcctggctgccaaccacttgagcttcctcaactccttcaagatgaagatgtccgtcatcctgggcgtcgtgcacatggccttttggggtgggtcctcggagtcttcaaccacgtgcactttggccagaggcaccggctgctgctggagacgctgccggagctcaccttcctgctgggactctttcggttacctcgtgttcctagtcatctacaagtggctgtgtgtctgggctgccagggccgcctcggcccccagcatcctcatccacttcatcaacatgttcctcttctcccacagccccagcaacaggctgctctacccccggcaggtgggctgcggctggtgggggccgggctcacacggcctcatggggaccccgcggtcacagggccactgggagctgcaagatcctcgtccgagaaacggggatgcaggccccgggccgtgcagacagggccgtcagaggtgatggtgtgcatctttagcaggtggcacaactggcactgggaaccgggggtcccttccctcaggagtccttatggaggcagaccctcacccagtgagggcacggagcccccgggggccctggagggaggagcgaccgcaggctctctgggccccgtgactgctgtgactcaggttcctttgcaggtgtgcacagcagggacgccctgactctcgccctctccctggcaggaggtggtacaggccacgctggtggtcctggccttggccatggtgcccatcctgctgcttggcacacccctgcacctgctgcaccgccaccgccgccgcctgcggaggaggcccgctgaccgacaggaggaaaaacaaggccgngtttgctggggacctgcctgacgcatctggtgaatggctgggagctcccgatgaggaaaaagggcaggggggccctgggatgaatgaaanaggnaggcccgcaaggtgggggtgcccagtggccctttca

SEQ ID NO: 361155 - DNA, 1258 bp, Homo Sapiens
attcccggatctcggcggacccggagcttcggcccaccggggcgcggagagtcccaggcccggccgggaccgggacggcgtccgagtgccaatggctagctctaggtgtcccgctccccgcgggtgccgctgcctccccggagcttctctcgcatggctggggacagtactgctacttctcgccgactgggtgctgctccggaccgcgctgccccgcatattctccctgcggggtcctcagggcaacggttggctccaagagcgaaaacgcaggtgcccagggctggctggctgctttgaagccattagctgcggcactgggcttggccctgccgggacttgccttgttccgagagctgatctcatggggagcccccgggtccgcggatagcaccaggctactgcactggggaagtcaccctaccgccttcgttgtcagttatgcagcggcactgcccgcagcagccctgtggcacaaactcgggagcctctgggtgcccggcggtcagggcggctctggaaaccctgtgcgtcggcttctaggctgcctgggctcggagacgcgccgcctctcgctgttcctggtcctggtggtcctctcctctcttggggagatggccattccattctttacgggccgcctcactgactggattctacaagatggctcagccgataccttcactcgaaacttaactctcatgtccattctcaccatagccagtgcagtgctggagttcgtgggtgacgggatctattaacaacaccatgggccacgtgcacagccacttgccagggagaggtgtttggggctgtcctgcgccaggagacggagtttttccaacagaaccagacaggtaacatcatgtctcgggtaacagaggacacgtccaccctgagtgattctctgagtgagaatctgagcttatttctgtggtacctggtgcgaggcttatgtctcttggggatcatgctctggggatcagtgtccctcaccatggtcaccctgatcaccctgcctctgcttttccttctgcccaaaaaagcgggaaaatggcaccagttgcttgaaaatgcaagttgcgggaaatctctgggcaaagttccacacaggtgggccatttgaggcttctgtcgagccatgccctaccacttctcaagttttgcccaccaaggacggcccaaggccccgaaagtttaagggaaaaaattgtctgcaacttaaagaccctcgttcctagaaagaaagctccctgga

SEQ ID NO: 361156 - DNA, 1300 bp, Homo Sapiens
cattgtgtcacaatttggcgtttccttcggtagcacgtgttgttgctgtgtctgtcagtgacatggttctctgtgtgttgtctgctatgttttccgcaggtcgttttcgacttggtgaacttttaccaccacctgtggtactagggtatacactcgtgcgttgttgtagcacggtgttcacttgtgggggacccttgtccctccgggcctagttgccctcatgtgaccattgggcctttgcaccttggttctcccaggtattatcgtctccgagtgtttttcaccacaagtggaatttctctacagggtggaccgtgtccttctgtttcgctgggagcctgtgatggtaccaggtctggtttctttttgggaaaatgtcctttgtctgggcccaaggtccgtccccttacacctgtgtcccttgcaaagtgggctgttgcaacgtggccacaatggtgttgcttatagatccgcgtcaacccacgactccagcactgcactggctatggtgagaatggacatgagagttaagtttcgagtgaaggtatcggctgagccatcttgtagaatccagtcagtgaggcggcccgtaaagaatggaatggccatctccccaagagaggagaggacacaccaggaccaggaacagcgagaggcggcgcgtctccgagcccaggcagcctagaagccgacgcacagggtttccagagccgccctgaccgccgggcacccagaggctcccgagtttgtgccacagggctgctgcgggcagtgccgctgcataactgacaacgaaggcggtagggtgacttccccagtgcagtagcctggtgctatccgcggacccgggggctccccatgagatcagctctcggaacaaggcaagtcccggcagggccaagcccagtgccgcagctaatggcttcaaagcagccagccagccatgggcacctgcgttttcgctcttggagccaaccgttgccctgaggaccccgcaggcccccagccagagcacggcccagcggctcaggcccaccgcccagacccggagcagtggcagcgcggtgggcaccagcagggagaatatgcggggcagcgcggtccggagcagcacccagtcggcgagaagtagcagtactgtccccagccatgcgagagaagctccggggaggcagcggcacccgcggggagcgggacacctagagctagccattggcactcggacgccgtcccggtcccgccgggcctggccgctccgacgcgtggtcgacgatatcccgtaattccgaccgtaccagcg

SEQ ID NO: 361157 - DNA, 1131 bp, Homo Sapiens
cttctcgccagcgcaggatcagcctgttcctgggactttccgagagccccgccctcgttccctcccccagccgccagtaggggaggactcggcggtacccggagcttcaggccccaccggggcgcggagagtcccaggcccggccgggaccgggacggcgtccgagtgccaatggctagctctaggtgtcccgctccccgcgggtgccgctgcctccccggagcttctctcgcatggctggggacagtactgctacttctcgccgactgggtgctgctccggaccgcgctgccccgcatattctccctgctggtgcccaccgcgctgccactgctccgggtctgggcggtgggcctgagccgctgggccgtgctctggctgggggcctgcggggtcctcagggcaacggttggctccaagagcgaaaacgcaggtgcccagggctggctggctgctttgaagccattagctgcggcactgggcttggccctgccgggacttgccttgttccgagagctgatctcatggggagcccccgggtccgcggatagcaccaggctactgcactggggaagtcaccctaccgccttcgttgtcagttatgcagcggcactgcccgcagcagccctgtggcacaaactcgggagcctctgggtgcccggcggtcagggcggctctggaaaccctgtgcgtcggcttctaggctgcctgggctcggagacgcgccgcctctcgctgttcctggtcctggtggtcctctccgtctcttgggcgagatggccattccattctttacgggccgctcactgactggattctacaagatggtcagccgataccttcactcgaaacttaactctcatgtccatttctcaccatagccagttgcagtgctggagtccggggtgaccggacctataacacaccatggcccacgtgccaggcactttgccggagacgtgcttgggggcgtcctgcgcccagggacggggttttcccacgaaccgaaggttcctcctggctcggtacacaggccgtcccccgggtggctctgggggactagcgattttgtgggaccggtgcaggccagtatcggggacaagctgggcggggctccccggtgccgtaaca

SEQ ID NO: 361158 - DNA, 1437 bp, Homo Sapiens
  misc_feature (67)..(67): n is a, c, g, or t
  misc_feature (80)..(80): n is a, c, g, or t
  misc_feature (140)..(140): n is a, c, g, or t
  misc_feature (201)..(201): n is a, c, g, or t
ttgcagtttcccgggggccagcggggcttctggccagtgtctccctccacccggcaggagcagcaancaggctccacggnttcggccaccccaccaggagccagaggtcaaaattaaggggcatttcgtctggcacttgnccagtatgaagtcgaccatcagggaggggtctctgctccgcagacaggcgttcaggaggcncctgaagaagtgggcagtgatgtcctgtgtcagggcacctccgtgggagcagaagtttctcatctcagagttgaccaagtggaagaactgctcgcatctggcagtgatgggctgttctgcctggaagctgctgccgcagaggacagacgaaggcaggcggaggaggatccgtttgtacattagcagctccctctgtctctgaaggctggcagccacgctccacccgcttgtcagagcctggagccgtctgcggaaaatctcaaagaggaagtgctcctgggaaggggtgtggccgagaggcactatgaggtcttgctgcagctccaggtcagctaccatctcctgcaatctggaaataatatcctcatttcctgtgcggccaccaaagaccaaatcagaattttctgagtggtcataactccttgagctttggtggaaatccatcagtgcgttgacaagaatggtacacgcagcctgcaggtctccgtcacagccccctgaagccgaagactcagggagaaagtgctcatggatcgcccactggtggaagtcctgccgttcagtatctgaaagagcatcagcttcaggttgaatttccagctccaggtgtaaccagtcttggtaagttaagtgaacatcttcctctttcaacacctctcggaaggttctgtgtgtccagagagagagggcagctctctgccagtctgcagaaggaaggtgcaagggtctccaggaaaggctggctacgtcctcctcagaaagaggctgtcgggcctctgagaacaatctgaacatgaggaactgaaactttttaataaggcctggagataagcagctgcacaaagtatctcgtgactgggaagaaaacttgcagagagagtaagaaattgctgctgtacaaaatttcaggcagaagaacaaggaatccctcgtcctacaggtcaggaggctgtcaaagagcgcagggacaggaaggccagcaccaggtgcaggaggacccacatccacctctgggagcgcagacctggactcacccaggtgcacggccagggcagccaaccccagcacatgtggggcactcaggctcgggcctggtgacggagcagctggcagagccgggtgagcactgcagggagcacacgtccacacatggtcctcacgaagagggcagcccagggacctgcctctccgggggagcgacactggaggcagccatcaggttctgacagaaagacc

SEQ ID NO: 361159 - DNA, 1187 bp, Homo Sapiens
  misc_feature (87)..(87): n is a, c, g, or t
  misc_feature (263)..(263): n is a, c, g, or t
  misc_feature (345)..(345): n is a, c, g, or t
ggtgcccccacttcctacagcctaaggggtttccggggccccggccaagatgggcccagcttccacaggggcccttgccccttgttnggtggcaggatttcccaaggccgccccttgcctggctttccccactttccccaggacccttcttcctcttcgtgtctggcttcgaccccttcggacctggtttggtgaagatgaccctcccccttcccccacagctggagggatcctggttgaaggaggacacgcagtcagtgggnggcagccaggctctgggagcccaggaaggccagggcggtggcctgattgctctgctcgctgacctcggtcacatcttccagngctgtacttggtccagcgctcggggtgtgccacgtagtcggggaccggaggcacccttggtgaggcagggctccggatgggccctgcccaggcccctccactggagaccgccctgagggcgctaggggccgcttgaagcctccgtggtcactcatgctggtgtgggccacagaggatggagcccgtctggccgccccctccaggcagtcaaaagatgtcacggctgcgctgggagaaggtggagctcatgcctctcagatggaatggctgcaccgtggctgggaggaggcctgttcctgcctcagccatgcgtccccagggccacgccacacctctcttggctgctgggtgccagtggttgacactggagtgtgattggacagccaagcgggccaagtggacggagccctgatgaaggtcctcagcggcacaggcgtggtcgtctcaggcctcggagtgccccggcacggcctctgttcagctgctcaactcatttaatggtgccaaccctctgcaggcaggcttggagctactgagcgattttggtagtaagcagccacccagggcttgaacccagggctgaaatcaggcaggagggccacttataagctgcttgctgtgcggggtgagcagtcgtattccacaaagagcgtgcaccttccggctcaaggctgctcggcagtctccatcttggtcggcgccgcacctccgtgcggcgcgctcagccctctgggaaaccgagtgctatgccggccgagcaccacggcttccgcgcctgcagaactacagctcccacaaggaactgggccgccgctcccgacgcatcgcaggaattccggacc

SEQ ID NO: 361160 - DNA, 1135 bp, Homo Sapiens
atgccgtcgtttccggggctgcttccgagccggacccaagggccggggcgtggaggagtagaggggcgagcgcatgcgcacaggactacacgtcccgacaggcgtcgggagcggcggcccagttccttgtgggagctgtagttctgcaggcgcggaagccgtggtgctcggccggcagagcactcggtttcccagagggctgagcgcgccgcacggaggtgcggcgccgaccaagatggagactgccgagcagccttgagccgttgagcagctgaacagaggccatgccggggcactccgaggcctgagacgaccacgcctgtgccgctgaggaccttcatcagggctccgtccacttggcccgcttggctgtccaatcacactccagtgtcaaccactggcacccagcagccaagagaggtgtggcgtggccctggggacgcatggctgaggcaggaacaggtgagccgtcccccagcgtggagggcgaacacgggacggagtatgacacgctgccttccgacacagtctccctcagtgactcggactctgacctcagcttgcccggtggtgctgaagtggaagcactgtccccgatggggctgcctggggaggaggattcaggtcctgatgagccgccctcacccccgtcaggcctcctcccagccacggtgcagccattccatctgagaggcatgagctccaccttctcccagcgcagccgtgacatctttgactgcctggagggggcggccagacgggctccatcctctgtggcccacaccagcatgagtgacaacggaggcttcaagcggcccctagcgccctcaggccggtctccagtggaaggcctgggcagggcccatcggagccctgcctcaccaagggtgcctccggtccccgactacgtggcacaccccgagcgctggaccaagtacagcctggaagatgtgaccgaggtcagcgagcagagcaatcaggccaccgccctggccttcctgggctcccagagcctggctgcccccactgactgcgtgtcctccttcaaccaggatccctccagctgtggggaggggaagggtcatcttcaccaaacagtccgaggggtcgaagccagacacgaaggaaaagggtc

SEQ ID NO: 361161 - DNA, 1134 bp, Homo Sapiens
  misc_feature (710)..(710): n is a, c, g, or t
  misc_feature (883)..(901): n is a, c, g, or t
ggaattctcgggatcgccgaccaagatggagactgccgagcagccttgagccgttgagcagctgaacagaggccatgccggggcactccgaggcctgagacgaccacgcctgtgccgctgaggaccttcatcagggctccgtccacttggcccgcttggctgtccaatcacactccagtgtcaaccactggcacccagcagccaagagaggtgtggcgtggccctggggacgcatggctgaggcaggaacaggtgagccgtcccccagcgtggagggcgaacacgggacggagtatgacacgctgccttccgacacagtctccctcagtgactcggactctgacctcagcttgcccggtggtgctgaagtggaagcactgtccccgatggggctgcctggggaggaggattcaggtcctgatgagccgccctcacccccgtcaggcctcctcccagccacggtgcagccattccatctgagaggcatgagctccaccttctcccagcgcagccgtgacatctttgactgcctgggagggggcggccagacgggctccatcctctgtggcccacaccagcatgagtgacaacggaggcttcaagcggcccctagcgccctcaggccggtctccagtggaaagggcctggggcagggccccatccggagccctgccctcaccaaagggtggcctcccggtcccccgactacngtggcacacccccgagcggctggaacaagtaccagccctgggaagatgggaccggaggtcaccgagcagaacaattcaggccaccgcccctgggccttccttgggctcccagaacctggcctgcccccccctgacttgctggtcctccttcaacccaagatcccttcagactnnnnnnnnnnnnnnnnnnnttatttttcccccaaacccaattcccaaaggggtccgaaactcccaaacacccaaaaaggaaaaacggtccccttggggagaaagggggggaaaaaaccacgacaaaggggccgggccttttgggggaaaacccggcacccaaaaaacaggggcacagaagagccctcgggggggaaaatttgggcccccaattctgggcgcgcgggcaccggggaaaccccaccaaagagcc

SEQ ID NO: 361162 - DNA, 1266 bp, Homo Sapiens
  misc_feature (164)..(177): n is a, c, g, or t
atgggtggtgccacgacccgtaccctctgccggcgtctgcgtcctggccgcatcgcggggtggtcgtgctttcacggcatgcgtcgtgggcgctagtatcgctgctcggcgcgtcctacgcgcaccggaggcttcttggtgaatatgacttaggtgggagtgannnnnnnnnnnnnntgagtaggggccaagcctcgggcgtcgggtgtgcgaacgtacgagggggtcaccccagggtagggcgggcggcccatagaacggctcgagcggggcctataagtgcccggctcatcactgtggggccccgcgggtggtgttcgtgttttgagtggggcgcgctgttgtgtgggttgagggtggggtcgtagtgagattgaagggggtggggggaggcctcgacgcggaggagaggggtgtttcggcggggccgggatggggtgggggggatagaggttgccccgtggccccctcttttgtgtgtggtagtgtggattgtctacgggtaccgttgttttgaggatttgaattcccttctctttgaaggggatccgcccccggggccagaggcagcttggtcagcggggcactccgacgggtagcggggatcgggctgcaagatagggactccggtagtccgtttctcggggttctcggcgaaagccggcaacgagtggaaggtagagttgactccttcatgtccgtaggctgaaggaagccgtctctttctccacatgaacgcagagcccggcctttctccactatatgtgccagcaagacctccccgccagagaacaaacgaactctcggtgccaagctggctctcggtgcccctcggcactgtccagtcgggctggacaggcctccgggcctcacaaggatgctgtgggtcccaagggcccggccgcgaggtacgggggtcggcgagcacagcggggccttcgagctcaggtattaaagctgcgctcggtgacctcccggaggctcggccggcccgcgcggcccgtcctccctcaccacaaacctaccggctcaaggctgctcggcagtctccatcttggtcggcgccgcacctccgtgcggcgcgctcagccctctgggaaaccgagtgctctgccggccgagcaccacggcttccgcgcctgcagaactacagctcccacaaggaactgggccgccgctcccgacgcctgtcgggacgtgtagtcctgtgcgcatgcgctcgcccctctactcctccacgccctcgtgccgaattcgccacccagc

SEQ ID NO: 361163 - DNA, 943 bp, Homo Sapiens; identical to SEQ ID NO: 99413

SEQ ID NO: 361164 - DNA, 1224 bp, Homo Sapiens
  misc_feature (1107)..(1115): n is a, c, g, or t
  misc_feature (1123)..(1124): n is a, c, g, or t
  misc_feature (1129)..(1129): n is a, c, g, or t
  misc_feature (1131)..(1131): n is a, c, g, or t
tgcacccggagagctgtgtcaccatgtgggtcccggttgtcttcctcaccctgtccgtgacgtggattggtgctgcacccctcatcctgtctcggattgtgggaggctgggagtgcgagaagcattcccaaccctggcaggtgcttgtggcctctcgtggcagggcagtctgcggcggtgttctggtgcacccccagtgggtcctcacagctgcccactgcatcaggaacaaaagcgtgatcttgctgggtcggcacagcctgtttcatcctgaagacacaggccaggtatttcaggtcagccacagcttcacacacccgctctacgatatgagcctcctgaagaatcgattcctcaggccaggtgatgactccagccacgacctcatgctgctccgcctgtcagagcctgccgagctcacggatgctatgaaggtcatggacctgcccacccaggagccagcactggggaccacctgctacgcctcaggctggggcagcattgaaccagaggagttcttgaccccaaagaaacttcagtgtgtggacctccatgttatttccaatgacgtgtgtgcgcaagttcaccctcagaaggtgaccaagttcatgctgtgtgctggacgctggacagggggcaaaagcacctgctcgggtgattctgggggcccacttgtctgtaatggtgtgctgcaaggtatcacgtcatggggcagtgaaccatgtgccctgcccgaaaggccttccctgtacaccaaggtggtgcattaccggaagtggatcaaggacaccatcgtggccaacccctgagcacccctatcaactccctattgtagtaaacttggaaccttggaaatgaccaggccaagactcaaggcctccccagttctactgacctttgtccttaggtgtgaggtccagggttgctaggaaaagaaatcagcagacacaggtgtagaccagagtgtttcttaaatggtgtaattttgtcctctctgtgtcctggggaatactggccatgcctggagacatatcactcaatttctctgaggaacagattaggaatggggtgtctgtgttattttgtggggtacagagatgaaaaaannnnnnnnnatccacannctgananagtggagaagtgacatgtggctgggacactggtccatgaaagcactgaagcagaaagctggagggaccaacgccaccagacacttcaccagca

SEQ ID NO: 361165 - DNA, 948 bp, Homo Sapiens; identical to SEQ ID NO: 99416

SEQ ID NO: 361166 - DNA, 905 bp, Homo Sapiens; identical to SEQ ID NO: 262247

SEQ ID NO: 361167 - DNA, 905 bp, Homo Sapiens; identical to SEQ ID NO: 99417

SEQ ID NO: 361168 - DNA, 865 bp, Homo Sapiens; identical to SEQ ID NO: 99418

SEQ ID NO: 361169 - DNA, 967 bp, Homo Sapiens; identical to SEQ ID NO: 72871
  misc_feature (206)..(206): n is a, c, g, or t

SEQ ID NO: 361170 - DNA, 1350 bp, Homo Sapiens
tcttaaaagcccaggttacccgcggaaatttatgctgtccggtcaccgtgacaatgcagctgaggaacccagaactacatctgggctgcgcgcttgcgcttcgcttcctggccctcgtttcctgggacatccctggggctagagcactggacaatggattggcaaggacgcctaccatgggctggctgcactgggagcgcttcatgtgcaaccttgactgccaggaagagccagattcctgcatcagtgagaagctcttcatggagatggcagagctcatggtctcagaaggctggaaggatgcaggttatgagtacctctgcattgatgactgttggatggctccccaaagagattcagaaggcagacttcaggcagaccctcagcgctttcctcatgggattcgccagctagctaattatgttcacagcaaaggactgaagctagggatttatgcagatgttggaaataaaacctgcgcaggcttccctgggagttttggatactacgacattgatgcccagacctttgctgactggggagtagatctgctaaaatttgatggttgttactgtgacagtttggaaaatttggcagatggttataagcacatgtccttggccctgaataggactggcagaagcattgtgtactcctgtgagtggcctctttatatgtggccctttcaaaagcccaattatacagaaatccgacagtactgcaatcactggcgaaattttgctgacattgatgattcctggaaaagtataaagagtatcttggactggacatcttttaaccaggagagaattgttgatgttgctggaccagggggttggaatgacccagatatgttagtgattggcaactttggcctcagctggaatcagcaagtaactcagatggccctctgggctatcatggctgctcctttattcatgtctaatgacctccgacacatcagccctcaagccaaagctctccttcaggataaggacgtaattgccatcaatcaggaccccttgggcaagcaagggtaccagcttagacagggagacaactttgaagtgtgggaacgacctctctcaggcttagcctgggctgtagctatgataaaccggcaggagattggtggacctcgctcttataccatcgcagttgcttccctgggtaaaggagtggcctgtaatcctgcctgcttcatcacacagctcctccctgtgaaaaggaagctagggttctatgaatggacttcaaggttaagaagtcacataaatcccacaggcactgttttgcttcagctagaaaatacaatgcagatgtcattaaaagacttactttaaaatgtta

SEQ ID NO: 361171 - DNA, 2125 bp, Homo Sapiens
  misc_feature (791)..(791): n is a, c, g, or t
tagaagatggcaagcagaaactggagaagaaggatgaagaaatcagtagactgaaaaatcaaattcaagaccaagagcagcttgtctctaaactgtcccaggtggaaggagagcaccaactttggaaggagcaaaacttagaactgagaaatctgacagtggaattggagcagaagatccaagtgctacaatccaaaaatgcctctttgcaggacacattagaagtgctgcagagttcttacaagaatctagagaatgagcttgaattgacaaaaatggacaaaatgtcctttgttgaaaaagtaaacaaaatgactgcaaaggaaactgagctgcagagggaaatgcatgagatggcacagaaaacagcagagctgcaagaagaactcagtggagagaaaaataggctagctggagagttgcagttactggttggaagaaataaagagcagcaaagatcaattgaaggagctcacactagaaaatagtgaattgaagaagagcctagattgcatgcacaaagaccaggtggaaaaggaagggaaagtgagagaggaaatagctgaatatcagctacggcttcatgaagctgaaaagaaacaccaggctttgcttttggacacaaacaaacagtatgaagtagaaatccagacataccgagagaaattgacttctaaagaagaatgtctcagttcacagaagctggagatagaccttttaaagtctagtaaagaagagctcaataattcattgaaagctactactcagattttgggaagaattgaagaaanaccaagaatggacaatctaaaatatgtaaatcagttgaagaaggaaaatgaacgtgcccaggggaaaatgaagttgttgatcaaatcctgtaaacagctggaagaggaaaaggagatactgcagaaagaactctctcaacttcaagctgcacaggagaagcagaaaacaggtactgttatggataccaaggtcgatgaattaacaactgagatcaaagaactgaaagaaactcttgaagaaaaaaccaaggaggcagatgaatacttggataagtactgttccttgcttataagccatgaaaagttagagaaagctaaagagatgttagagacacaagtgggcccatctgtgttcacagcaatctaaacaagattcccgagggtctcctttgctaggtccagttgttccaggaccatctccaatcccttctgttactgaaaagaggttatcatctggccaaaataaagcttcagggcaagaggcaaagatccagtggaatatgggagaatggtggaggaccaacacctgctaccccagagagcttttctaaaaaaagcaagaaagcagtcatgagtggtattcaccctgcagaagacacggaaggtactgagtttgagccagagggacttccagaagttgtaaagaaagggtttgctgacatcccgacagaaaagactagcccatatatcctgcgaaggaacaacaatggcaactcgaacaagcccccgcctggctgcacagaagttagcgctatccccactgagtctcgccaaagaaaatcttgcagagtcctccaaaccaacagctggtggcagcagatcacaaaaggtcaaagttgctcagcggagcccagtagattcaggcaccatcctccgagaacccaccacgaaatccgtcccagtcaataatcttcctgagagaagtccgactgacagccccagagagggcctgagggtcaagcgaggccgacttgtccccagccccaaagctggactggagtccaaaggcagtgagaactgtaaagtccagtgaaggcactttgtgtgtcagtaccccctgcgaaggtgccagtcattgaataaataagcctgtgcctacaggaccttctctttagtcagggcatgctttattagtgaggaaaaaacaattccttaaaagtccttaaatatattgtactctttagatctcccatgtgtaggtattgaaaaagtttggaagcactgatcacctgttagcattgccattcctctactgcaatgtaaatagtataaagctatgtatataaagctttttggtaatatgttacaattaaaatgacaagcactatatcaca

SEQ ID NO: 361172 - DNA, 916 bp, Homo Sapiens
gaagaacagcgctcccgaggccgcgggagcctgcagagaggacagccggcctgcgccgggacatgcggccccaggagctccccaggctcgcgttcccgttgctgctgttgctgttgctgctgctgccgccgccgccgtgccctgcccacagcgccacgcgcttcgaccccacctgggagtccctggacgcccgccagctgcccgcgtggtttgaccaggccaagttcggcatcttcatccactggggagtgttttccgtgcccagcttcggtagcgagtggttctggtggtattggcaaaaggaaaagataccgaagtatgtggaatttatgaaagataattaccctcctagtttcaaatatgaagattttggaccactatttacagcaaaattttttaatgccaaccagtgggcagatatttttcaggcctctggtgccaaatacattgtcttaacttccaaacatcatgaaggctttaccttgtgggggtcagaatattcgtggaactggaatgccatagatgaggggcccaagagggacattgtcaaggaacttgaggtagccattaggaacagaactgacctgcgttttggactgtactattccctttttgaatggtttcatccgctcttccttgaggatgaatccagttcattccataagcggcaatttccagtttctaagacattgccagagctctatgagttagtgaacaactatcagcctggaggttctggtggtcggatggtgaacggaggagcaccggaatcaatactggaaacagcacagggcttcttgggcctgggttatataaatgaaaagcccagtttccggggcacaggtaatcaccaattgaatccgttggggaaagctggtaaccatcttggtaagcatgggtgggctttctattaccc

SEQ ID NO: 361173 - DNA, 2177 bp, Homo Sapiens
  misc_feature (2167)..(2167): n is a, c, g, or t
ggcggcatactcagcggcagagacggaagaacagcgctcccgaggccgcgggagcctgcagagaggacagccggcctgcgccgggacatgcggccccaggagctccccaggctcgcgttcccgttgctgctgttgctgttgctgctgctgccgccgccgccgtgccctgcccacagcgccacgcgcttcgaccccacctgggagtccctggacgcccgccagctgcccgcgtggtttgaccaggccaagttcggcatcttcatccactggggagtgttttccgtgcccagcttcggtagcgagtggttctggtggtattggcaaaaggaaaagataccgaagtatgtggaatttatgaaagataattaccctcctagtttcaaatatgaagattttggaccactatttacagcaaaattttttaatgccaaccagtgggcagatatttttcaggcctctggtgccaaatacattgtcttaacttccaaacatcatgaaggctttaccttgtgggggtcagaatattcgtggaactggaatgccatagatgaggggcccaagagggacattgtcaaggaacttgaggtagccattaggaacagaactgacctgcgttttggactgtactattccctttttgaatggtttcatccgctcttccttgaggatgaatccagttcattccataagcggcaatttccagtttctaagacattgccagagctctatgagttagtgaacaactatcagcctgaggttctgtggtcggatggtgacggaggagcaccggatcaatactggaacagcacaggcttcttggcctggttatataatgaaagcccagttcggggcacagtagtcaccaatgatcgttggggagctggtagcatctgtaagcatggtggcttctatacctgcagtgatcgttataacccaggacatcttttgccacataaatgggaaaactgcatgacaatagacaaactgtcctggggctataggagggaagctggaatctctgactatcttacaattgaagaattggtgaagcaacttgtagagacagtttcatgtggaggaaatcttttgatgaatattgggcccacactagatggcaccatttctgtagtttttgaggagcgactgaggcaaatggggtcctggctaaaagtcaatggagaagctatttatgaaacccatacctggcgatcccagaatgacactgtcaccccagatgtgtggtacacatccaagcctaaagaaaaattagtctatgccatttttcttaaatggcccacatcaggacagctgttccttggccatcccaaagctattctgggggcaacagaggtgaaactactgggccatggacagccacttaactggatttctttggagcaaaatggcattatggtagaactgccacagctaaccattcatcagatgccgtgtaaatggggctgggctctagccctaactaatgtgatctaaagtgcagcagagtggctgatgctgcaagttatgtctaaggctaggaactatcaggtgtctataattgtagcacatggagaaagcaaatgtaaaactggataagaaaattattttggcagttcagccctttccctttttcccactaaattttttcttaaattacccatgtaaccattttaactctccagtgcactttgccattaaagtctctttcacattgatttgtttccccagagcagggaaataacgcgaaaaatggggtgaaaaatttgcggcagcatgcccaaatgttttatccgaagatggaaatcatccttggctcgccccaccccatttagccccccccttgcataaaccccgtttatcgcaaacaccaccttttgattttgaggggcctccggttgagccacaacggtgaagtgttatgataccccacaaaaagaaaggttcaaaaaacgagtagcgccccccaaccatgtgagaatcccctcgcccccaacatagaacaaaggacggggtatcagggagatttctgggcggccgccatagagaaaaataagtcttattctagggccgcggggacacttcatattcgggccgctttttattaagacaccgacaaacctcacacaatgagccggggcggtatcacaaagcaaagagaatccctttatgntctcctgcgg

SEQ ID NO: 361174 - DNA, 441 bp, Homo Sapiens
tccagtaaggtgtgccaaaaataagttccatctttaatgtgctaatatgtggcatttatatatttatacatgtatatatagtcacggcctagaagaacaaacacaggatagaacaatgtcctatatttataggccattgagccatagaagaaataattcctacatgaccacactattaagaatattatgttaatagccaccagacatttcactgtaccttcaccaattcttcaatggtaagatagtcagagattccagcttccctcctatagccccaggacagttggtctatggtcatgcagttttcccatttatgtggcaaaagatgtcctgggttataacgatcactgcaggtatagaagccaccatgcttacagatgctaccagctccccaacgatcatgggtgactactgtgccccgaactgggcacacattatgga

SEQ ID NO: 361175 - DNA, 437 bp, Homo Sapiens
gggagcaccgagcagcttggctaaaagtaagggtgtcgtgctgatggccctgtgcgcactgacccgcgctctgcgctctctgaacctggcgcccccgaccgtcgccgcccctgccccgagtctgttccccgccgcccagatgatgaacaatggcctcctccaacagccctctgccttgatgttgctcccctgccgcccagttcttacttctgtggcccttaatgccaactttgtgtcctggaagagtcgtaccaagtacaccattacaccagtgaagatgaggaagtctgggggccgagaccacacaggtgggaacaaggacagggggatttaagcagtcaaaaggaaaaacatgttaagaccctagacttgtatattgacacacttgtaccttgtaaggcagaggaatgtaattaaaaagcacttatttggctcct

SEQ ID NO: 361176 - DNA, 1093 bp, Homo Sapiens
tcccgggatccagcttgggctccagttttctgcccgcctccttttacgttattgcggagcgacggcgccggacagtcaacgtcatctaggagcaccgagcagcttggctaaaagtaagggtgtcgtgctgatggccctgtgcgcactgacccgcgctctgcgctctctgaacctggcgcccccgaccgtcgccgcccctgccccgagtctgttccccgccgcccagatgatgaacaatggcctcctccaacagccctctgccttgatgttgctcccctgccgcccagttcttacttctgtggcccttaatgccaactttgtgtcctggaagagtcgtaccaagtacaccattacaccagtgaagatgaggaagtctgggggccgagaccacacaggccgaatccgggtgcatggtattggcgggggccacaagcaacgttatcgaatgattgactttctgcgtttccggcctgaggagaccaagtcaggaccctttgaggagaaggttatccaagtccgctatgatccctgtaggtcagcagacatagctctggttgctgggggcagccggaaacgctggatcatcgccacagaaaacatgcaggctggagatacaatcttgaactctaaccacataggccgaatggcagttgctgctcgggaaggggatgcgcatcctcttggggctctgcctgtggggaccctcatcaacaacgtggaaagtgagccaggccggggtgcccaatatatccgagctgcagggacgtgtggtgtgctactgcggaaggtgaatggcacagccattatccagctgccctctaagaggcagatgcaggtgctggaaacgtgcgtagcaacagtaggccgagtatccaacgttgatcataacaaacgggtcattggcaaggcaggtcgcaaccgctggctgggcaagaggcctaacagtgggcggtggcaccgcaaggggggctgggctggccgaaagattcggccactaccccccatgaagagttacgtgaagctgccttctgcttctgcccaaagctgatatccctgtactctaataaaatgccccccaccccgtcgggtggag

SEQ ID NO: 361177 - DNA, 1410 bp, Homo Sapiens
ggggagaaaacaaatggctaggtacgaggctgggtggtgaatcggcacgagggcggccgggaggccggagcagcacggccgcaggacctggagctccggctgcgtcttcccgcagcgctacccgccatgcgcctgccgcgccgggccgcgctggggctcctgccgcttctgctgctgctgccgcccgcgccggaggccgccaagaagccgacgccctgccaccggtgccgggggctggtggacaagtttaaccaggggatggtggacaccgcaaagaagaactttggcggcgggaacacggcttgggaggaaaagacgctgtccaagtacgagtccagcgagattcgcctgctggagatcctggaggggctgtgcgagagcagcgacttcgaatgcaatcagatgctagaggcgcaggaggagcacctggaggcctggtggctgcagctgaagagcgaatatcctgacttattcgagtggttttgtgtgaagacactgaaagtgtgctgctctccaggaacctacggtcccgactgtctcgcatgccagggcggatcccagaggccctgcagcgggaatggccactgcagcggagatgggagcagacagggcgacgggtcctgccggtgccacatggggtaccagggcccgctgtgcactgactgcatggacggctacttcagctcgctccggaacgagacccacagcatctgcacagcctgtgacgagtcctgcaagacgtgctcgggcctgaccaacagagactgcggcgagtgtgaagtgggctgggtgctggacgagggcgcctgtgtggatgtggaccagtgtgcggccgaaccgcctccctgcagcgctgcgcagttctgtaagaaacgccaacggctcctacacgtgcgaagagtgtgactccagctgtgtgggctgcacaggggaaggcccaggaaactgtaaagagtgtatctctggctacgcgagggagcacggacagtgtgcagatgtggacgagtgctcactagcagaaaaaacctgtgtgaggaaaaacgaaaactgctacaatactccaggggagctacgtctgtgtgtgtcctgacggcttcgaagaaacggaagatgcctgtgtgccgccggcagaggctgaagccacagaaggagaaagcccgacacagctgccctcccgcgaagacctgtaatgtgccggacttaccctttaaattattcagaaggatgtcccgtggaaaatgtggccctgaggatgccgtctcctgcagtggacagcggcggggagaggctgcctgctctctaacggttgattctcatttgtcccttaaacagctgcatttcttggttgttcttaaacagacttgtatattttgatacagttctttgtaataaaattgaccattgtaggta

SEQ ID NO: 361178 - DNA, 1076 bp, Homo Sapiens
gcggccgctgcagggctacagtgtggagtaccagctgctgaacggcggtgagctgcatcggctcaacatccccaaccctgcccagacctcggtggtggtggaagacctcctgcccaaccactcctacgtgttccgcgtgcgggcccagagccaggaaggctggggccgagagcgtgagggtgtcatcaccattgaatcccaggtgcacccgcagagcccactgtgtcccctgccaggctccgccttcactttgagcactcccagtgccccaggcccgctggtgttcactgccctgagcccagactcgctgcagctgagctgggagcggccacggaggcccaatggggatatcgtcggctacctggtgacctgtgagatggcccaaggaggagggccagccaccgcattccgggtggatggagacagccccgagagccggctgaccgtgccgggcctcagcgagaacgtgccctacaagttcaaggtgcaggccaggaccactgagggcttcgggccagagcgcgagggcatcatcaccatagagtcccaggatggaggacccttcccgcagctgggcagccgtgccgggctcttccagcacccgctgcaaagcgagtacagcagcatcaccaacacccacaccagcgccaccgagcccttcctagtggatgggccgaccctgggggcccagcacctggaggcaggcggctccctcacccggcatgtgacccaggagtttgtgagccggacactgaccaccagcggaacccttagcacccacatggaccaacagttcttccaaacttgaccgcaccctgccccacccccgccatgtcccactaggcgtcctcccgactcctctcccggagcctcctcagctactccatccttgcacccctgggggcccagcccacccgcatgcacagagcaggggctaggtgtctcctgggaggcatgaagggggcaaggtccgtcctctgtgggcccaaacctatttgtaaccaaagagctgggagcagcacaaggacccagcctttgttctgcacttaataaatggttttgctactgctaaaaaa

SEQ ID NO: 361179 - DNA, 1049 bp, Homo Sapiens
  misc_feature (1028)..(1028): n is a, c, g, or t
ccatttctgagttggggccagctccccacccgcaaaaggccccacattccgggccagcagcccagaaagtccctccccgcaggcggagacagccccaagaagtcgacgccccggtcccgccgcccggccactacccagagggctgccgccgcctctccaagttcttgtggcccccgcggtgcggagtatggggcgctgatggccatggagggctactggcgcttcctggcgctgctggggtcggcactgctcgtcggcttcctgtcggtgatcttcgccctcgtctgggtcctccactaccgagaggggcttggctgggatgggagcgcactagagtttaactggcacccagtgctcatggtcaccggcttcgtcttcatccagggcatcgccatcatcgtctacagactgccgtggacctggaaatgcagcaagctcctgatgaaatccatccatgcagggttaaatgcagttgctgccattcttgcaattatctctgtggtggccgtgtttgagaaccacaatgttaacaatatagccaatatgtacagtctgcacagctgggttggactgatagctgtcatatgctatttgttacagcttctttcaggtttttcagtctttctgcttccatgggctccgctttctctccgagcatttctcatgcccatacatgtttattctggaattgtcatctttggaacagtgattgcaacagcacttatgggattgacagagaaactgattttttccctgagagatcctgcatacagtacattcccgccagaaggtgttttcgtaaatacgcttggccttctgatcctggtgttcggggccctcattttttggatagtcaccagaccgcaatggaaacgtcctaaggagccaaattctaccattcttcatccaaatggaggcactgaacaggggagcaagaggttccatgcccagcctactctggcaacaacatgggacaaatcagattcagagttaaacaatgaagtagcagcaaggaaaaagaaacttancttctggatgaaggctggggc

SEQ ID NO: 361180 - DNA, 3122 bp, Homo Sapiens
tgggtggcgaattcggcacgaggccgatgccagctttgggaagcagtggtcctcatcctcccgttcctcctactcatcccaacatggaggggctgtgtctccccagagcttgtctgagtggcgcatgcagaacattgcccgagactctgagaacagctccgaggaagagttctttgatgcccacgaaggcttctcggacagtgaggaggtcttccccaaggagatgaccaagtggaactccaatgacttcattgatgcctttgcctccccagtggaggcagagggaacgccagagcctggagccgaggcagctaaaggcattgaggatggggcccaagcacccagggactcagagggcctggatggagccggggagctgggggctgaggcatgcgcagtccacgccctcttccttatcctgcacagcggcaacatcctggactcaggccctggagacgccaactccaagcaggcggatgtgcagacgctgagctccgccttcgaggccgtcacccgcatccacttccctgaggccttgggccacgtggcgctgcgactggtgccctgtccacccatctgcgccgccgcctatgcccttgtctccaacctgagcccttacagccacgatggggacagcctgtctcgctcccaagaacacattccactggctgccctgccactgctggccacctcatcctcccgctaccaggggcgccgtggccaccgtcattgcccgcaccaaccaggcctactcagccttcctgcgctcacctgagggtgccggcttctgtgggcaggtcgcactgattggagatggtgttgctggcatcctgggctgtgatgcactcttgccacagtgctaacgcgggcaccgggagtcggggcagcagccgccgtgggagcatgaacaatgagctgctctctccggagtttggcccagtgcgggaccccctggcagatggtgtggaaggcctgggtcggggcagcccagaaccctcggccttgcctccccagcgcatccccagcgacatggccagtcctgagcccgagggctctcagaacagccttcaggcagcccccgcaaccacctcctcctgggagccccggcgggcaagcacggccttctgcccacccgctgccagttccgaggcacctgacggccccagcagcactgcccgccttgacttcaaggtctctggcttcttcctcttcggctccccactgggcctggtgctggctctgcgcaaaactgtgatgcccgccctggaggcagcccagatgcgcccagcctgtgaacagatctacaacctcttccacgcggccgacccctgcgcctcacgcctcgagcccctgctggccccgaagttccaggccatcgccccactgaccgtgccccgctaccagaagttccccctgggagatggctcatccctgctgctggccgacactctgcagacgcactccagcctctttctggaggagctggagatgctggtgccctcaacacccacctctactagcggtgccttctggaagggcagtgagttggccactgaccccccggcccagccagccgcccccagcaccaccagtgaggtggttaagatcctggagcgctggtgggggaccaagcggatcgactactcgctgtactgccccgaggcgctcaccgcctttcccaccgtcacgctgccccacctcttccacgccagctactgggagtccgccgacgtggtggcgttcatcctgcgccaggtgatcgagaaggagcggccacagctggcggaatgcgaggagccgtccatctacagcccggccttccccagggagaagtggcagcgaaaacgcacgcaggtcaagatccggaacgtcacttccaaccaccgggcgagcgacacggtggtgtgcgagggccgcccccaggtgctaagcgggcgcttcatgtacgggcccctggacgtcgtcacgctcactggagagaaggtggatgtctacatcatgacgcagccgctgtcgggcaagtggatccactttggcaccgaagtcaccaatagctcgggccgcctcaccttcccagttcccccagaacgcgcgctgggcattggtgtctaccccgtgcgcatggtggtcaggggcgaccacacctatgccgaatgctgcctgactgtggtggcccgcggcacggaggctgtggtcttcagcatcgacggctccttcaccgccagcgtctccatcatgggcagcgaccccaaggtgcgagctggcgccgtggacgtggtcaggcactggcaggactccggctacctgatcgtgtatgtcacaggccggccggatatgcagaagcaccgcgtggtggcatggctgtcgcagcacaacttcccccacggcgtcgtctccttctgcgacggcctcacccacgacccactacgccagaaggcaatgtttctgcagagcctggtgcaggaggtagaactgaacatcgtggccggttatgggtctcccaaagatgtggctgtatacgcggcgctggggctgtccccgagccagacctacatcgtgggccgtgccgtgcggaagctacaggcgcagtgccagttcctgtcagacggctatgtggcccacctgggccagctggaagcgggctcgcactcgcatgcctcctcgggacccccgagagctgccttgggcaagagcagctatggtgtggctgcccccgtggacttcctgcgcaaacagagccagctgcttcgctcgaggggccccagccaggcggagcgtgagggcccgggaacaccacccacaccctggcacggggcaaagcacggagcatcagcctgaagctggacagcgaggagtgaggcccacaccagcctggacctgggttatttattgacacacccaaggggcccgaggggctgcgtgtgggaggctggggacccagacttttggccccagcgctggcccccccagccccacaccctatatctccgtgtgctcctcggtgttacttccctttcatatgaggggacccagcgccggggggagggaggagggcgtgggcatgggcgcagaggcttttccagtgtgtataaatccatgaaaataaacgccacctgcacccc

SEQ ID NO: 361181 - DNA, 836 bp, Homo Sapiens
  misc_feature (551)..(653): n is a, c, g, or t
  misc_feature (680)..(702): n is a, c, g, or t
  misc_feature (750)..(750): n is a, c, g, or t
ggatagatgggatgtctttgcaggtttgaggggatcatcgacctgcagagccccctttgacccagtacctcccaaagtgctgagattgtaggtgtgagccacagcatctggcccagagtgaggagaattaatgagattcttttttgtgtgtgttagataatattgatttaagccttttttttaaaaagtactctcaaccaaatacaaaattgaaaatgtgaggtttaatagaaatgtgttggctatttgcaatggattttcttcttgcccaagtgtttggagttctactttatgctctgtatttaaaaattagtgacctcaaagcagagttgatgacacaggctttggggccctcatgttcttgtctttagaacatatcactactaagtatcagcttatcttcagaacattacaacattcaccgtgttcatatgctttctgagaagtcaccacttgtaatttcagatcacatacacctgaaggcattttatagttcctaaagttaacatgttagatcttttttttccaccccatgagggtctcactctcannnnnnnnnnnnnnnnnnnnnnnnnnnnnnnnnnnnnnnnnnnnnnnnnnnnnnnnnnnnnnnnnnnnnnnnnnnnnnnnnnnnnnnnnnnnnnnnnnnnnnntggtgcacaccaccacacctggctaannnnnnnnnnnnnnnnnnnnnnnggaaaataggtatggctatgttgccttgggcccgtcatgaactcctancctcaggtgaccctccccactcaggccttcccaaagggttggggattacagggagtgagctactgcactggggccaacaggttaaa

SEQ ID NO: 361182 - DNA, 1146 bp, Homo Sapiens
atgctgacatcttcttcaacatagtatctataaaatggctcttcaggttcatcttctaattcatcattgtcagtggattcattacagtctttatcagtaactttaataatgttaaagtctttcagttcatctgtaggaatatcttctggctccatcgttaataatgaatccttttcctctcagcagctctgcttttctcttcgcttgctatttcagactccactgtgctactttttctgcttccagtggttgaagctgaatcatcagcagcctggcttgtgtctcctctgtatttgtccgtctgtgcagaaaatgttttggaagaatctttttcaccaaattcagctttgatgttactgtcttttccatctctaatatctactattctatggtaagatcttgtgttttggtataaatgtctgttagtacaggttagcacatgctcatctaataatttttcacagctaaagccaaatccacagctatcacaggtaaaactccgcccaaagcgtcttgacacacgttcttttggagtagataatttggacacggaactttttttacatacatcaaatagtggctcaggaaaattacctaattgtaaagactcttcatcagcctctctattatgtggtgtatttaccgttgaacttggctctgcacaccacctgttggcttcattgccatttcgagccacagtatcttcatacattcttaccccaaatatcattttgctgttctgtttgctggaagcagaagaggaacattttgaactagaacaatctgcatcctggatgtcttctaaacagtcaggaacattgtatagctgtaggtagttcattgccactttaaactgctcaaaactggagggagctgtcataatttttcctaaatacataaactgcaaaatgagatcaaaacattctgcactaattttcatgttgctgagattcagttgtgcagtactatgctgatggttcatgaaaaacactctaaaataggagctacaggcagctagaactgccttgtgtgcttgaaagtaaatgtcatcaattgcaatacagcagtcacagagaaaaccccactctctttggttgtttagctgctgaaggacatagctgctgtggctgggctttgcctcttctg

SEQ ID NO: 361183 - DNA, 1166 bp, Homo Sapiens
  misc_feature (808)..(982): n is a, c, g, or t
  misc_feature (988)..(1038): n is a, c, g, or t
  misc_feature (1052)..(1114): n is a, c, g, or t
ttccacccctgccaggcccagcagccaccacagcgcctgcttcctcggccctgaaatcatgcccctaggtctcctgtggctgggcctagccctgttgggggctctgcatgcccaggcccaggactccacctcagacctgatcccagccccacctctgagcaaggtccctctgcagcagaacttccaggacaaccaattccaggggaagtggtatgtggtaggcctggcagggaatgcaattctcagagaagacaaagacccgcaaaagatgtatgccaccatctatgagctgaaagaagacaagagctacaatgtcacctccgtcctgtttaggaaaaagaagtgtgactactggatcaggacttttgttccaggttgccagcccggcgagttcacgctgggcaacattaagagttaccctggattaacgagttacctcgtccgagtggtgagcaccaactacaaccagcatgctatggtgttcttcaagaaagtttctcaaaacagggagtacttcaagatcaccctctacgggagaaccaaggagctgacttcggaactaaaggagaacttcatccgcttctccaaatctctgggcctccctgaaaaccacatcgtcttccctgtcccaatcgaccagtgtatcgacggctgagtgcacaggtgccgccagctgccgcaccagcccgaacaccattgagggagctgggagaccctccccacagtgccacccatgcagctgctccccaggccaccccgctgatggagccccaccttgtctgctaaataaacatgtgccctcaggccnnnnnnnnnnnnnnnnnnnnnnnnnnnnnnnnnnnnnnnnnnnnnnnnnnnnnnnnnnnnnnnnnnnnnnnnnnnnnnnnnnnnnnnnnnnnnnnnnnnnnnnnnnnnnnnnnnnnnnnnnnnnnnnnnnnnnnnnnnnnnnnnnnnnnnnnnnnnnnnnnnnnnnnnnnnnnnnaggggnnnnnnnnnnnnnnnnnnnnnnnnnnnnnnnnnnnnnnnnnnnnnnnnnnntttttttgaaaaannnnnnnnnnnnnnnnnnnnnnnnnnnnnnnnnnnnnnnnnnnnnnnnnnnnnnnnnnnnnnnagggaggaaaaaacaccccccggggggaattttaggaaaaaaacccctcttt

SEQ ID NO: 361184 - DNA, 1746 bp, Homo Sapiens
  misc_feature (1426)..(1439): n is a, c, g, or t
ctgccgcaggcttggcatctttggggacacggaagacgtggcgggcaaggcctacacgggccgcgagtttgatgacctcagccccgagcagcagcgccaggcctgccgcaccgcccgctgcttcgcccgcgtggagcccgcacacaagtcccgcatcgtggagaacctgcagtcctttaacgagatcactgctatgactggcgatggagtgaacgacgcaccagccctgaagaaagcagagatcggcatcgccatgggctcaggcacggccgtggtcaagtcggcggcagagatggtgctgtcagatgacaactttgcctccatcgtggctgcggtggaggagggccgggccatctacagcaacatgaagcaattcatccgctacctcatctcctccaatgttggcgaggtcgtctgcatcttcctcacggcaattctgggcctgcccgaagccctgatccctgtgcagctgctctgggtgaacctggtgacagactgcctacctgccacggctctgggcttcaacccgccagacctggacatcatggagaagctgccccggagcccccgagaagccctcatcagtggctggctcttcttccgatacctggctatcggagtgtacgtaggcctggccacagtggctgccgccacctggtggtttgtgtatgacgccgagggacctcacatcaacttctgaccagctgaggaacttcctgaagtgctccgaagacaacccgctctttgccggcatcgactgtgaggtgttcgagtcacgcttccccaccaccatggccttgtccgtgctcgtgaccattgaaatgtgcaatgccctcaacagcgtctcggagaaccagtcgctgctgcggatgccgccctggatgaacccctggctgctggtggctgtggccatgtccatggccctgcacttcctcatcctgctcgtgccgcccctgcctctcattttccaggtgaccccactgagcgggcgccagtgggtggtggtgctccagatatctctgcctgtcatcctgctggatgaggccctcaagtacctgtcccggaaccacatgcacgaagaaatgagccagaagtgagcgctgggaacagggtggagtctccggtgtgtacctcagactgatggtgcccatgtgttcgcctccgccccccacccttgccaccacactcgcccacttgcccaccgggtcccgccggataaatgacaggcccgaggtcagaatggccatccccgggccccgtcctggggtctctgtccccacttccttctggcctgggaggtctgtaattcctgtctcctggactctcctgggaagttccctgctctgcagctctggcccaggagctgcaggctgggagggggcagccaagaagccggagctggcagcatacccagaagatccggggnnnnnnnnnnnnnnaaatcacgagtgcagctggagcttgctcccccttgttcggaagctggacgttcacttggtgactggtgcctctgcactgacggagagactctggggggtccttcttaccggctctgacctctctcttcgtgcctgggtctggggactgggtcagccctggggggatcagaaggggccatctgggcccagctgtgtacaagcgagggtggggcagcccccctccactccactctgctttcacaaaagtcgggctcccggagaagctcgaaggctggcttctggttaaatgttgccagggcccggggcc

SEQ ID NO: 361185 - DNA, 1211 bp, Homo Sapiens
  misc_feature (1171)..(1171): n is a, c, g, or t
tgccagggcacccgctgcctctgcctccctggcttctctggcccacgctgccaacaaggctctggacatggcatagcagagtccgactggcatcttgaaggcagcgggggcaatgatgcccctgggcagtacggagcctatttccacgatgatggcttcctcgccttccctggccatgtcttctccaggagcctgcccgaggtgcccgagaccatcgagctggaggttcggaccagcacagccagtggcctcctgctctggcagggtgtggaggtgggagaggccggccaaggcaaggacttcatcagcctcgggcttcaagacgggcaccttgtcttcaggtaccagctgggtagtggggaggcccgcctggtctctgaggaccccatcaatgacggcgagtggcaccgggtgacagcactgcgggagggccgcagaggttccatccaagtcgacggtgaggagctggtcagcggccggtccccaggtcccaacgtggcagtcaacgccaagggcagcgtctacatcggcggagcccctgacgtggccacgctgaccgggggcagattctcctcaggcatcacaggctgtgtcaagaacctggtgctgcactcggcccgacccggcgccccgcccccacagcccctggacctgcagcaccgcgcccaggccggggccaacacacgcccctgcccctcgtaggcacctgcctgccccacacggactcccgggccacgccccagcccgacaatgtcgagtatattattattaatattattatgaatttttgtaagaaaccgaggcgatgccacgctttgctgctaccgccctgggctggactggaggtgggcatgccaccctcacacacacagctgggcaaagccacaaggctggccagcaaggcaggttggatgggagtgggcacctcagaaagtcaccaggacttggggtcaggaacagtggctgggtgggcccagaactgcccccactgtccccctacccaccgatggagcccccagatagagctgggtggcctgtttctgcagcccttgggcagttctcactcctaggagagccaacctcggctttgtgggctggtgccccacagctacctgagacgggcatcgcaggagtctctgccacccactcaagatttgggaattgtctttantggccggctgtgggaccaaaagggcagctcaccccctggg

SEQ ID NO: 361186 - DNA, 902 bp, Homo Sapiens
  misc_feature (113)..(113): n is a, c, g, or t
cccccccagttgggggaccaggccccccgtggtttttcaggccacaaggcgggaaagcccggcctcccagcaaaccctaaaccaggctggggttgttgccctttttcctcctncctcagcccagagggtctcccagacaccctgaggcccatccacagaaggaagtggggccaggatgcgggtcaggcctcggtcgaaggggttgctggggcgctggcggagataggcgatgcggtgtgaggagatgaattcccagggtggtggtgtcgctggccaccaggtagaggtgcgagacgaggagcaggctggccaccaacgagaagagggacagcagcaggaaggtggcgaacaggagcccgctggaccgcaaccacagaccccagggctggaagaaccggaggcctgaccatgccaggtacaggccccacagaagcaccaccagctgcagcgccaggtagaccacaaagagtgggtggttgcgctctcccacacagttctccatccaggggcagtggtggtcgtagcggcggacgcaacggcggcactcacggcagtgccgagccctcaggggctgcagcaccaggcagtatctgcagcgccgaagagggatggctggaggaaccatggctgtctgctcctctttgagctcctcctgaggctggggctgcacattcacgtagccagggtccatgagtgacacagcgaggtagagcagcagggagcccagcaccaggagcaggaaggtgaggggcaggagcagctccccctgctcctcccattgccgcagctcggtatcgtgcaggaagagcaccagcgtgattccccaggtcagcacggtgtgcccggtccgcaccaggaccccagggctgaggagcgcccagggcgccatcgcctcggcccgg

SEQ ID NO: 361187 - DNA, 1110 bp, Homo Sapiens
ggggcgcttcttccgggtggggccccgggccgaggcgatggcgccctgggcgctcctcagccctggggtcctggtgcggaccgggcacaccgtgctgacctggggaatcacgctggtgctcttcctgcacgataccgagctgcggcaatgggaggagcagggggagctgctcctgcccctcaccttcctgctcctggtgctgggctccctgctgctctacctcgctgtgtcactcatggaccctggctacgtgaatgtgcagccccagcctcaggaggagctcaaagaggagcagacagccatggttcctccagccatccctcttcggcgctgcagatactgcctggtgctgcagcccctgagggctcggcactgccgtgagtgccgccgttgcgtccgccgctacgaccaccactgcccctggatggagaactgtgtgggagagcgcaaccacccactctttgtggtctacctggcgctgcagctggtggtgcttctgtggggcctgtacctggcatggtcaggcctccggttcttccagccctggggtctgtggttgcggtccagcgggctcctgttcgccaccttcctgctgctgtccctcttctcgttggtggccagcctgctcctcgtctcgcacctctacctggtggccagcaacaccaccacctgggaattcatctcctcacaccgcatcgcctatctccgccagcgccccagcaaccccttcgaccgaagcctgacccgcaacctggcccacttccttctgtggatggcccctcagggtcccggggagaccctctgggcttgagaaggaaggaaaaaggcaacagccccaactggtttaggggttgctgggaaagccggggctcaccgctcttgtgcccgaaaaaaccacggggccctggtcccccaacctggggtgaaaccgcctccaagggccccggggggccccccaaattcctgggccaccgcccgctgccaaaacccccaaaaccgggaattttcaaggctaaaacccgaatatcccgcctcctggcggccgcgaatcccctgccccttttcacgttatccaccggcgcccaaccaaagatacctcccttaccgctg

SEQ ID NO: 361188 - DNA, 800 bp, Homo Sapiens
ggccttccccccaccgggtcccaggctgggcacacagaaagggccagttcgtcagctcgtcgagggtctggcctgccggaatagcgatcgtgtgaggagatgattcccagtgtggtgttgcggccaccaggagaggtgcgagacgaggagcaggctggccaccaacgagaagagggacagcagcaggaaggtggcgaacaggagcccagctggaccgcaaccacagaccccagggctggaagaaccggaggcctgaccatgccaggtacaggccccacagaagcaccaccagctgcagcgccaggtagaccacaaagagtgggtggttgcgctctcccacacagttctccatccaggggcagtggtggtcgtagcggcggacgcaacggcggcactcacggcagtgccgagccctcaggggctgcagcaccaggcagtatctgcagcgcacgaagagggatggctggaggaaccatggctgtctgctcctctttgagctcctcactgaggctggggcatgcacattcacgtagcacagggtccatgagtgacacagcgaggtagagcagcagggagcccagcaccaggagcaggaaggtgaggggcaggagcagctccaccctgctcctcccattgccgcagctcaggtatcgtgcaggaagagcaccagcgtgattccccaggtcagcacggtgtgcccaggtccgcaccaggaccccagggctgaggagcgcccagggcgccatcgcctcggcccggcctcgtgccgattaacactcgtcctcgtactagcctaggtt

SEQ ID NO: 361189 - DNA, 2531 bp, Homo Sapiens
gacgcatgggatgcaatttctcatcactggggtgtgtccttggcttaggaggcagtatcatagtcactgtgagtctgcagcatcccacaagaggactctaacaagatgagatataacaatacattacagtacttgggttctaaacacctcctatacatagaactgaagtaggtaaacattctaatgagtcaacaatgtgacagtatcatgaaggatcaaaaatcatgacgtgtaaaagaatggttgaagtaactgaagatatttaatctagagaagatttgggaaacacatgatagctatggttaaatacttaacagggcaatcacagggaagatgactagatttcctaacatccatgagtgaaatttatagaagtatactctctgacttgatataaaggaagattttaaaaaacatgactgttcaggagtgttcaagtagggtcagatgaccagtgattgggaatacttcgtaagcaggagcaagtaagatctgagccactgttctatcggtagggtgtctgtggtattccttggtcaaagaagtactctaagcaacttcagtctcacgaattactatcaccctcgtgggcatacatgatggttaccctaaagaggaagtttcagaaggcagtaatattggatcctggaatagtcagacaggagccttcatgcagatacccttttcagttctccatacacccattcacaagtggtcacaaaaacacccagtacctttacttggctttacccacttaacaatatgctcaatatgagcagtttgactcccaagcctaggtcaggcctgagtgtttctcatgagccatagtcttaggctgaggagccttgagagttggtggagggagagcccccctgcccgcagggggctgtgatcacagaagtctgtagaaagagtgggatctaaggagtcctggggaggcaggcctaaaggtccaggcctggcatgatcactgtccagggaaggcccccagttcctatggctctgtgcataggggccatttgttcttgaccgacttcactccaaggatctggtgtgggccaaggctagggagtgggcagaaggcgatggctggttggagagaagccaggccgtctagtgggggaggatggttggaacatagcattgaagtgggctcggctttcaagctgcatacggtggcccagtggggaggcgagtccacggacaaaatggattcgaaccagccctgactgccccccagataccagccatccataggagtccaggtttgggctgaaacgtaccttatgaatagcctccagctgcagcctgtccaggcagagttgagaatgcccctctccctcctgcatgcgcagcattggttctctacggagcagatcatggaatgaacccaaatctgtgtcttgaaagagcaagtagtgatggttgacagtttcagtgtaagttcgagccttgggagggttggggaccccagatgaagcagaagaatggtctggaccttcaggactgtcctgatacggtatcagatctgctttatatataggaaatcttcgctctacaggtcgcttgacatttattggattcagtgccatatctggtaatatagcagcaatgagctccccggatatatctcctgcagctattgtcccaagccagtcggatcctgaaagactccaaacggtgccttttcgaggagcagtgaagtaggccttgaaaccaaggtaaccagcgtcaatataatgaatcccacagagtccataagaggcatagcagttgtcctgagccacagtgacaccattgtagggaagcagccaggccagttctgtactcaagaagcgcttgatagagtttatgggttcgtaaggacgtcgaaggtcccagaatttgattttccggtcactccccgcagagacaaggaaatggctgttagctttgcaccattgaagggtacgcacagcctggtcatgggctaggaaacactggaaggggtagagctttaaggagccatcagagagccgtatccgctgcaggggtgagttagtgggaaggttccagaaaaccaccatgccattataatatccagcagctaggtgttggtggggcctggtaggcatccagaccaggctaaggcactgaccacactcagaggggtctgtagcttgcatagaccccacctgcagagttgccacacattgtaccttatatatggcaggcttcactgcatatgggggttgctgagccagcacgccctccggatggggtagactgaatagcagtactttcccgtctgagcaggccagagccaagagacccaaccggggcaggagaggagccttccgaggggtgcctggaagttcccatgctccactggggcagaacttgaggtcccagatgcagccgttgtcacaagctattctatatacaaagtgggccttgatgccactacagttttcttgctgcaagggtctaatgctccacatctggaactatacgataccctaatgatgctggctacatgagtgtgtctcatt

SEQ ID NO: 361190 - DNA, 2228 bp, Homo Sapiens
  misc_feature (2029)..(2080): n is a, c, g, or t
  misc_feature (2149)..(2165): n is a, c, g, or t
cggtccggaattctcgggatgccgagcgctgcaagaagaaaatggcaaggctgagttctggctggacctgcagcctcaggccaaggtgttgatgtctgttcagtatttcctggaggacgtggattgcaaacagtctatgcgcagtgaggacgaggccaagttcccaacgatgaaccgccgcggagccatcaaacaggccaaaatccactacatcaagaaccatgagtttatcgccaccttctttgggcaacccaccttctgttctgtgtgcaaagactttgtctggggcctcaacaagcaaggctacaaatgcaggcaatgtaacgctgccatccacaagaaatgcatcgacaagatcatcggcagatgcactggcaccgcggccaacagccgggacactatattccagaaagaacgcttcaacatcgacatgccgcaccgcttcaaggttcacaactacatgagccccaccttctgtgaccactgcggcagcctgctctggggactggtgaagcagggattaaagtgtgaagactgcggcatgaatgtgcaccataaatgccgggagaaggtggccaacctctgcggcatcaaccagaagcttttggctgaggccttgaaccaagtcacccagagagcctcccggagatcagactcagcctcctcagagcctgttgggatatatcagggtttcgagaagaagaccggagttgctggggaggacatgcaagacaacagtgggacctacggcaagatctgggagggcagcagcaagtgcaacatcaacaacttcatcttccacaaggtcctgggcaaaggcagcttcgggaaggtgctgcttggagagctgaagggcagaggagagtactttgccatcaaggccctcaagaaggatgtggtcctgatcgacgacgacgtggagtgcaccatggttgagaagcgggtgctgacacttgccgcagagaatccctttctcacccacctcatctgcaccttccagaccaaggaccacctgttctttgtgatggagttcctcaacgggggggacctgatgtaccacatccaggacaaaggccgctttgaactctaccgtgccacgttttatgccgctgagataatgtgtggactgcagtttctacacagcaagggcatcatttacagggacctcaaactggacaatgtgctgttggaccgggatggccacatcaagattgccgactttgggatgtgcaaagagaacatattcggggagagccgggccagcaccttctgcggcacccctgactatatcgcccctgagatcctacagggcctgaagtacacattctctgtggactggtggtctttcggggtccttctgtacgagatgctcattggccagtcccccttccatggtgatgatgaggatgaactcttcgagtccatccgtgtggacacgccacattatccccgctggatcaccaaggagtccaaggacatcctggagaagctctttgaaagggaaccaaccaagaggctgggagtgaccggaaacatcaaaatccaccccttcttcaagaccataaactggactctgctggaaaagcggaggttggagccacctttcaggcccaaagtgaagtcacccagagactacagtaactttgaccaggagttcctgaacgagaaggcgcgcctctcctacagcgacaagaacctcatcgactccatggaccagtctgcattcgctggcttctcctttgtgaaccccaaattcgagcacctcctggaagattgaggttcctggacagatcaggctagccctgccctccacccacacctgcccgctccccacgataagcaccagtgggactgtggtgacttctgctgctggccccgcccctgcccccagagcgtccttggctgccgtctggccgggctctcatggtacttcctctgtgaactgtgtgtgaatctgcttttcctctgccttcggagggaaattgtaaatcctgtgtttcattacttgaatgtagttatctattgaaannnnnnnnnnnnnnnnnnnnnnnnnnnnnnnnnnnnnnnnnnnnnnnnnnnngctcagtagagaaaaaccatgggggactggtgatatgttgatctttttcaaaaaaatatatatatgccnnnnnnnnnnnnnnnnnggagcacaagctgtttgaaccaccaggtttatttgtgtgtctaaataaacaccaaatagtacc

SEQ ID NO: 361191 - DNA, 1412 bp, Homo Sapiens
  misc_feature (816)..(816): n is a, c, g, or t
  misc_feature (1228)..(1228): n is a, c, g, or t
aggctggaccggtccggattcccgggatgatggggccaatgggatgatgactgtaatacctgccagtgcctgaatggacggatcgcctgctcaaaggtctggtgtggccctcgaccttgcctgctccacaaagggcacagcgagtgccccagcgggcagagctgcatccccatcctggacgaccagtgcttcgtccacccctgcactggtgtgggcgagtgtcggtcttccagtctccagccggtgaagacaaagtgcacctctgactcctattaccaggataactgtgcgaacatcacatttacctttaacaaggagatgatgtcaccaggtcttactacggagcacatttgcagtgaattgaggaatttgaatattttgaagaatgtttccgctgaatattcaatctacatcgcttgcgagccttccccttcagcgaacaatgaaatacatgtggccatttctgctgaagatatacgggatgatgggaacccgatcaaggaaatcactgacaaaataatcgatcttgttagtaaacgtgatggaaacagctcgctgattgctgccgttgcagaagtaagagttcagaggcggcctctgaagaacagaacagatttccttgttcccttgctgagctctgtcttaactgtggcttggatctgttgcttggtgacggccttctactggtgcctgcggaagcggcggaagccgggcagccacacacactcagcctctgaggacaacaccaccaacaacgtgcgggagcagctgaaccagatcaaaaaccccattgagaaacatgggggccaacacggntccccatcaaggaattatgagaacaagaaactccaaaatggtctaaaataaagacacacaattctgaagtagaagaggacgacatggacaaacaccagcagaaagcccggtttgccaagcagccggcgtacacgctggtagacagagaagagaagccccccaacggcacgccgacaaaacacccaaactggacaaacaaacaggacaacagagacttggaaagtgcccagagcttaaaccgaatggagtacatcgtatagcagaccgcgggcactgccgccgctaggtagagtctgagggcttgtagttctttaaactgtcgtgtcatactcgagtctgaggccgttgctgacttagaatccctggtgttaatttaagttttgacaagctggcttacactggcaatggtagntttctgtggttggctggggaaatcgagtcccgcatctcacagctatgcaaaaagctagtcaacagtaccctggttgtgtgtccccttgcagccgacacggtctcggatcaggctcccaggagcctgcccagcccctggtctttgagctcccacttctgccgatctcctaatggtgagcgtctag

SEQ ID NO: 361192 - DNA, 1356 bp, Homo Sapiens
agtgtgtgaccaaccacacgctggtgctcacctgggctggagccgaacactctttactgcgtacacgtggagtccttcgtcccagggccccctcgccgtgctcagccttctgagaagcagtgtgccaggactttgaaagatcaatcatcagagttcaaggctaaaatcatcttctggtatgttttgcccatatctattaccgtgtttcttttttctgtgatgggctattccatctaccgatatatccacgttgggcaaagagaaacacccaggcaaatttgattttgatttatgggaaatgaatttgacaaaagattctttgtgcctgctggaaaaaatcgtgattaactttatcaccctcaatatctcgggatgattctaaaatttctcatcaggatatgagtttactgggaaaaagcagtgatgtatccagccttaatgatcctcagcccagcgggaacctgaggccccctcaggaggaagaggaggtgaaacatttagggtatgcttcgcatttgatggaaattttttgtgactctgaagaaaacaccggaaggtacttctctcacccagcaagagtccctcagcagaacaataccccccggataaaacagtcattgaatatgaatatgatgtcagaaccactgacatttgtgcggggcctgaagagcaggagctcagtttgcaggaggaggtgtccacacaaggaacattattggagtcgcaggcagcgttggcagtcttgggcccgcaaacgttacagtactcatacacccctcagctccaagacttagaccccctggcgcaggagcacacagactcggaggaggggccggaggaagagccatcgacgaccctggtcgactgggatccccaaactggcaggctgtgtattccttcgctgtccagcttcgaccaggattcagagggctgcgagccttctgagggggatgggctcggagaggagggtcttctatctagactctatgaggagccggctccagacaggccaccaggagaaaatgaaacctatctcatgcaattcatggaggaatgggggttatatgtgcagatggaaaactgatgccaacacttccttttgccttttgtttcctgtgcaaacaagtgagtcacccctttgatcccagccataaagtacctgggatgaaagaagttttttccagtttgtcagtgtctgtgagaattacttatttcttttctctattctcatagcacgtgtgtgattggttcatgcatgtaggtctcttaacaatgatgctgggcctctggagtccaggggctggccggttgttctatgcagagaaagcagtcaataaatgtttgccagacaaaaag

SEQ ID NO: 361193 - DNA, 1261 bp, Homo Sapiens
  misc_feature (112)..(371): n is a, c, g, or t
tccgggacgcggcgggactcgagtgtttcggaaaaggagcgtctccccaggcggtggttgtcttcactagcgatggggtaaaaggaggacgcaatacctggttcaacttgannnnnnnnnnnnnnnnnnnnnnnnnnnnnnnnnnnnnnnnnnnnnnnnnnnnnnnnnnnnnnnnnnnnnnnnnnnnnnnnnnnnnnnnnnnnnnnnnnnnnnnnnnnnnnnnnnnnnnnnnnnnnnnnnnnnnnnnnnnnnnnnnnnnnnnnnnnnnnnnnnnnnnnnnnnnnnnnnnnnnnnnnnnnnnnnnnnnnnnnnnnnnnnnnnnnnnnnnnnnnnnnnnnnnnnnnnnnnnnnnnnnnnnnnnnnnnnnnnnngtgtgagccaccgcgcctggccgagcatgttaatttaagcaaatgaatgtccctgggaatgatcttcaaggagaattaaagtgggatagagaagtcatctatctgcacctgtgtctgaaccagaatgacgaggcacttccatgtcagctagttactggagcaggcggagtaaggagtacccctgggcttctgccccgaaaccaccacggctacttcaaaacaatattacattaattttcctgcttgttcttgagaagcactggtttgaaaaattggatggggtgatacatgttttaatcagtatttacaaggctccttaatcacttcatcagacaattcattgagcacctactatgtgccaggcagtgtaattcattgagcacctgctgtgtgccaggcagtgtctgaagcacttctagctattattttcctaaggggtccagcagcccatggataaactttcaaagagtgtaagctcctaaaaattgttcgtattttctgcacatttttgtagttttggagaagagagttaatggagttcttgccattctcagaattatttgatccctttaggaatgagcatctctagcctctgcctgttcatctgggacaatctgcacctgggcgtggacctgctgcttcagatcagtaggtatcagaatgaactcagttggatggggcagttcaggacccctggcctccttttagtctggaccccactctcattcctcatattctcaattcactctttctactgagttactatcctagtaatgacaatgcctcctatcatctagagacttggtttgatacaatgcattcacatacaactggctcgttttgatttctataactgggggatacagaaagcaaatatgcggtggcaatgg

SEQ ID NO: 361194 - DNA, 1189 bp, Homo Sapiens
  misc_feature (1090)..(1099): n is a, c, g, or t
ttttctccatgcagatgtgtggagccggcttgcccgttgctggatctgggaccaacggaggtagtcttgtcttgggtggaattgaaccaagtttgtataaaggagacatctggtatacccctattaaggaagagtggtactaccagatagaaattctgaaattggaaattggaggccaaagccttaatctggactgcagagagtataacgcagacaaggccatcgtggacagtggcaccacgctgctgcgcctgccccagaaggtgtttgatgcggtggtggaagctgtggcccgcgcatctctgattccagaattctctgatggtttctggactgggtcccagctggcgtgctggacgaattcggaaacaccttggtcttacttccctaaaatctccatctacctgagagacgagaactccagcaggtcattccgtatcacaatcctgcctcagctttacattcagcccatgatgggggccggcctgaattatgaatgttaccgattcggcatttccccatccacaaatgcgctggtgatcggtgccacggtgatggagggcttctacgtcatcttcgacagagcccagaagagggtgggcttcgcagcgagcccctgtgcagaaattgcaggtgctgcagtgtctgaaatttccgggcctttctcaacagaggatgtagccagcaactgtgtccccgctcagtctttgagcgacgcccattttgtggattgtgtcctatgcgctcatgagcgtctgtggagccatcctccttgtcttaatcgtcctgctgctgctgccgttccggtgtcagcgtcgcccccgtgaccctgaggtcgtcaatgatgagtcctctctggtcagacatcgctggaaatgaatagccaggcctgacctcaagcaaccatgaactcagctattaagaaaatcacatttcccagggcagcagtccgggatcgatggtggcgctttctcctgtgcccacccgtcttcaatctctgttctgctcccagatgccttctagattcactgtcttttgattcttgattttcaagctttcaaatcctccctacttccaagaaaaataattnnnnnnnnnncttcattctaaaccaaaacagagtggattgggctgcaggctctatggggtttgttatgccaaagtgtctacatgtgcctccaacataaaa

SEQ ID NO: 361195 - DNA, 1473 bp, Homo Sapiens; identical to SEQ ID NO: 69989

SEQ ID NO: 361196 - DNA, 971 bp, Homo Sapiens
gtggcgacgtcggggccatggggctgggcccggtcttcctgcttctggctggcatcttcccttttgcacctccgggagctgctgctgagccccacagtcttcgttataacctcacggtgctgtcctgggatggatctgtgcagtcagggtttctcgctgaggtacatctggatggtcagcccttcctgcgctatgacaggcagaaatgcagggcaaagccccagggacagtgggcagaagatgtcctgggaaataagacatgggacagagagaccagggacttgacagggaacggaaaggacctcaggatgaccctggctcatatcaaggaccagaaagaaggcttgcattccctccaggagattagggtctgtgagatccatgaagacaacagcaccaggagctcccagcatttctactacgatggggagctcttcctctcccaaaacctggagactgaggaatggacagtgccccagtcctccagagctcagaccttggccatgaacgtcaggaatttcttgaaggaagatgccatgaagaccaagacacactatcacgctatgcatgcagactgcctgcaggaactacggcgatatctagaatccagcgtagtcctgaggagaacagtgccccccatggtgaatgtcacccgcagcgaggcctcagagggcaacatcaccgtgacatgcagggcttccagcttctatccccggaatatcacactgacctggcgtcaggatggggtatctttgagccacgacacccagcagtggggggatgtcctgcctgatgggaatggaacctaccagacctgggtggccaccaggatttgccaaggagaggagcagaggttcacctgctacatggaacacagcgggaatcacagcactcaccctgtgccctctgggaaagtgctggtgcttcagagtcattgggcaaacattccaagtttctgctgttgctgttgt

SEQ ID NO: 361197 - DNA, 1170 bp, Homo Sapiens
  misc_feature (702)..(710): n is a, c, g, or t
  misc_feature (1066)..(1066): n is a, c, g, or t
  misc_feature (1080)..(1081): n is a, c, g, or t
  misc_feature (1089)..(1089): n is a, c, g, or t
  misc_feature (1112)..(1112): n is a, c, g, or t
gctacacctacacgctgaccatcacaggcacacagaggcacatccacctcacatccacctcatacttgtgtactctcagggttcagtctttcatcctatccctctctgatctgtgcctcccaataccttccaagatgtttacagagacccttctccctgtgcagttaggagtgtaaggcaagagagcccctacttcatggggcagatcaagagctgagaccaaagatggtctatgttgctgaccttgtcctgtcctcctgctgtcttaaactatgatccctgctgcggtcactgaagcctttccctgagccaccatgcagtgcttcagcttcattaagaccatgatgatcctcttcaatttgctcatctttctgtgtggtgcagccctgttggcagtgggcatctgggtgtcaatcgatggggcatcctttctgaagatcttcgggccactgtcgtccagtgccatgcagtttgtcaacgtgggctacttcctcatcgcagccggcgttgtggtctttgctcttggtttcctgggctgctatggtgctaagactgagagcaagtgtgccctcgtgacggtgtgtgaaacccagctccacaggctgatgaccaagagtcccctcgcccttgacaccaggccctgggattcccaaaccctgctttggacccccctaggctcaggcttctgtctcacttttcccnnnnnnnnnattagggcaaggagggcatgagggactgtctctccctaaaacccagacccctgttccccactcagttcttctttcatcctcctcctcatcttcattgctgacgttgcagctgctgtggtccccttggtgtacaccacaatggtgagacactgggatggaggaagggaagaagattgggcaaaaccctgggagtgggctgtggcctgtgaatggccaccttctgtaccagcccctaaacactggcctgcctcacccaggctgagcacttcctgacgttgctggtagtgcctgccatcaagaaagattatggttcccaggaagacttcactcaagtgtggaacaccacccatgaaggngtagggttgctggnngagtttanggtgagagaaagagcaggcccanctcacctctctgtctcactcagtgtgtgctcacactatcgattgagatccctatcaaa

SEQ ID NO: 361198 - DNA, 1162 bp, Homo Sapiens
  misc_feature (326)..(326): n is a, c, g, or t
  misc_feature (390)..(390): n is a, c, g, or t
  misc_feature (961)..(961): n is a, c, g, or t
gctgaccatcacaggcacacagaggcacatccacctcacatccacctcatacttgtgtggtctcagggttcagtctttcatcctatccctctctgatctgtgcctcccaataccttccaagatgtttacagagacccttctccctgtgcagttaggagtgtaaggcaagagagcccctacttcatggggcagatcaagagctgagaccaaagatggtctatgttgctgaccttgtcctgtcctcctgctgtcttaaactatgatccctgctgcggtcactgaagcctttccctccaatccatcctccattaaggctgtcagcactntggggtgcctgccatcaggagtcccccatatatgtaggggtgctatttcacagagatcatcctntggcgtgcctaaacagaaccaggtgagcagtggtgtgtgagagccaggcgtccctctgcctgcccactcagtggcaacacccgggagctgttttgtcctttgtggagcctcagcagttccctctttcagaactcactgccaagagccctgaacaggagccaccatgcagtgcttcagcttcattaagaccatgatgatcctcttcaatttgctcatctttctgtgtggtgcagccctgttggcagtgggcatctgggtgtcaatcgatggggcatccctttctgaagatcttcgggccactgtcgtccagtgccatgcagtttgtcaacgtgggctacttcctcatcgcagccggcgttgtggtctttgctcttgggtttcctggggctgctatggtgctaagacttgagagcaagtgtgcccctcgtgacgtccttcttcatccctccctcctcatcttcactgctgagggtgcaagctgctgtggtcgccttggtgtacaccacaatggctgagcacttcctaacgttgctggtagtgcctgccatcaagaaaaattatggttcccagngaagacttccctcaagtgtggaacaccccccatgaaagggctcaagtgcttgtggcttcaccaactatacgggatttttgaagaactcaccctactttcaaagagaacagtggccctttccccccatttctggttgccatgaacaaaccgttacccaacaccagcccaaatggaaaacctggccccaagaccaaaaaggct

SEQ ID NO: 361199 - DNA, 1086 bp, Homo Sapiens
gggtccggaattcccgggatctcagacacacacaccagcagctacacctacacgctgaccatcacaggcacacagaggcacatccacctcacatccacctcatacttgtgtactctcagggttcagtctttcatcctatccctctctgatctgtgcctcccaataccttccaagatgtttacagagacccttctccctgtgcagttaggagtgtaaggcaagagagcccctacttcatggggcagatcaagagctgagaccaaagatggtctatgttgctgaccttgtcctgtcctcctgctgtcttaaactatgatccctgctgcggtcactgaagcctttccctgtgagcagtggtgtgtgagagccaggcgtccctctgcctgcccactcagtggcaacacccgggagctgtttagtcctttgtggagcctcagcagttccctctttcagaactcactgccaagagccctgaacaggagccaccatgcagtgcttcagcttcattaagaccatgatgatcctcttcaatttgctcatctttctgtgtggtgcagccctgttggcagtgggcatctgggtgtcaatcgatggggcatcctttctgaagatcttcgggccactgtcagtccagtgccatgcagttagtcaaacgtgggctacttcctcatccgcagccggcgtagtggtctttgctcatggttacctgggactgctatggtgctaaaactgagagcaagtgtgccctcgtgacggctgagcacttcctgacgttgctggtagtgcctgccatcaagaaagattatggttccccggaagacttcactcaagtgtggaacaccaccatgaaaaggctcaagtgctgtggcttcaccaactatacggattttgaggactcaccctacttcaaagaagacagtgcctttcccccattctgttgcaatgacaacgtcaccaacacagccaatggaaactgcaccaggcaaaaggctcacgaccaaaaagtaaagggttgcttcaatcagcttttgtatgacatccgaactatgcagtcacccttgggtggttgtggcacctggcaatggg

SEQ ID NO: 361200 - DNA, 1639 bp, Homo Sapiens
ggaattcccgggatcagaccacacaccagcagctacacctacacgctgaccatcacaggcacacagaggcacatccacctcacatccacctcatacttgtgtactctcagggttcagtctttcatcctatccctctctgatctgtgcctcccaataccttccaagatgtttacagagacccttctccctgtgcagttaggagtgtaaggcaagagagcccctacttcatggggcagatcaagagctgagaccaaagatggtctatgttgctgaccttgtcctgtcctcctgctgtcttaaactatgatccctgctgcggtcactgaagcctttccctgtgagcagtggtgtgtgagagccaggcgtccctctgcctgcccactcagtggcaacacccgggagctgttttgtcctttgtggagcctcagcagttccctctttcagaactcactgccaagagccctgaacaggagccaccatgcagtgcttcagcttcattaagaccatgatgatcctcttcaatttgctcatctttctgtgtggtgcagccctgttggcagtgggcatctgggtgtcaatcgatggggcatcctttctgaagatcttcgggccactgtcgtccagtgccatgcagtttgtcaacgtgggctacttcctcatcgcagccggcgttgtggtctttgctcttggtttcctgggctgctatggtgctaagactgagagcaagtgtgccctcgtgacgttcttcttcatcctcctcctcatcttcattgctgaggttgcagctgctgtggtcgccttggtgtacaccacaatggctgagcacttcctgacgttgctggtagtgcctgccatcaagaaagattatggttcccaggaagacttcactcaagtgtggaacaccaccatgaaagggctcaagtgctgtggcttcaccaactatacggattttgaggactcaccctacttcaaagagaacagtgcctttcccccattctgttgcaatgacaacgtcaccaacacagccaatgaaacctgcaccaagcaaaaggctcacgaccaaaaaagtagagggttgcttcaatcagcttttgtatgacatccgaactaatgcagtcacccgtgggttggtgtggcagctggaattggggggcctcgaagctggctgccatgattgtgtccatgtatctgtactgcaatctacaataagtccacttctgcctctgccactactgctgccacatgggaactgtgaagaggcaccctggcaagcagcagtgattgggggaggggacaggatctaacaatgtcacttgggccagaatggacctgccctttctgctccagacttggggctagatagggaccactccttttaggcgatgcctgactttccttccattggtgggtggatgggtggggggcattccagagcctctaaggtagccagttctgttgcccattcccccagtctattaaacccttgatatgccccctaggcctagtggtgatcccagtgctctactgggggatgagagaaaggcattttatagcctgggcataagtgaaatcaccagagcctctgggtggatgtgtagaaggcacttcaaaatgcataaacctgttacaatgtaaaaaa

SEQ ID NO: 361201 - DNA, 906 bp, Homo Sapiens
ctggggcccaggactgcagcggcttcggaaggtgggctctgccagcgggaccatgctgctccgaagccgcttggaggcgggcggcagtggcggtgacagcggctccgaggccgaagcccgcggcgcccactcgggggctgcgcctgcgcgttggagaccgtgctcctcagtctgcggttcccgcagatacagccgctgccccggaggtggggccagtgctgcgacctctctatatggatgtgcaagctacaactcctctggacccccgggtgcttgatgccatgctcccttacctaatcaactactatgggaacccacactcccggacacatgcttatggctgggagagtgaggcagccatggaacgtgctcgtcagcaagtagcatctctgattggagctgatcctcgtgagatcatttttactagtggtgctactgaatccaacaacatagcaattaagggggtggcccgattctacaggtcacggaaaaagcacttgatcaccacccagacagaacacaaatgtgtcttggactcctgccgttcactggaagctgagggctttcaggtcacctacctcccagtgcagaagagtgggatcattgacctaaaggaactagaggctgctatccagccagatactagcctggtgtcagtcatgactgtgaacaatgagattggagtgaagcagcctattgcagaaatagggcggatttgcagttccagaaaggtatatttccatactgatgcagcccaggctgttggaaaaatcccacttgatgtcaatgacattgaaaattgatctcatgaggcattagtggtcacaaaatctacgggtcccaaaggggttgggtgccatcttacaatccgtccgccggccccgtgttgcgtgtgggagggccctg

SEQ ID NO: 361202 - DNA, 2181 bp, Homo Sapiens
ggtccggaattcccgggagcctggggcccaggactgcagcggcttcggaaggtgggctctgccagcgggaccatgctgctccgagccgcttggaggcgggcggcagtggcggtgacagcggctccagggccgaagcccgcggcgcccactcgggggctgcgcctgcgcgttggagaccgtgctcctcagtctgcggttcccgcagatacagccgctgccccggaggtggggccagtgctgcgacctctctatatggatgtgcaagctacaactcctctggacccccgggtgcttgatgccatgctcccttacctaatcaactactatgggaacccacactcccggacacatgcttatggctgggagagtgaggcagccatggaacgtgctcgtcagcaagtagcatctctgattggagctgatcctcgtgagatcatttttactagtggtgctactgaatccaacaacatagcaattaagggggtggcccgattctacaggtcacggaaaaagcacttgatcaccacccagacagaacacaaatgtgtcttggactcctgccgttcactggaagctgagggctttcaggtcacctacctcccagtgcagaagagtgggatcattgacctaaaggaactagaggctgctatccagccagatactagcctggtgtcagtcatgactgtgaacaatgagattggagtgaagcagcctattgcagaaatagggcggatttgcagttccagaaaggtatatttccatactgatgcagcccaggctgttggaaaaatcccacttgatgtcaatgacatgaaaattgatctcatgagcattagtggtcacaaaatctacggtcccaaaggggttggtgccatctacatccgtcgccggccccgtgtgcgtgtggaggccctgcagagtggaggggggcaggagcggggtatgcgggctgggacaagtgcacacacccttagtggtggggctgggggctgcgtgtgaggtggcacagcaagagatggagtatgaccacaagcgaatctcaaagttgtcagagcggctgatacagaatataatgaagagccttccagatgtggtgatgaatggggaccctaagcaccattatcccggctgtatcaacctctcctttgcatatgtggaaggggaaagtctgctgatggcactgaaggacgttgccttatcctcagggagtgcctgcacctctgcatccctggagccctcttatgtgcttagagcaattggcactgatgaggatttagcgcactcttctatcaggtttggaattggccgcttcactacagaggaggaagtggactacacagtggagaaatgcattcagcatgtgaagcgtcttcgagaaatgagccctctctgggagatggttcaggatggcattgacctcaagagcatcaagtggacccaacactagaagaatagggccctgactttgtgctggtctggcccctcctgcctcaccaacccgtgcacaaccagacaccttgttacacctagtggatgctctagattggtatagaccagttgacttcagcatcagtccacctctatgacagaaacacaagaaaactgtctttccctagcttcagttccttgggtgtggagcactccccatttcttctcgggtcttaaagtgtgtggacattttcatcccgaagccatagagacatttgctgtcatattgctgctgggcacatctgtgctcttggtgaggagagcaagaggaaccagaagaagtctctttggtcagggaccatgatgctctacatggacatttgagtcttcgtcttctgctgctgctcggctggaccagcttctttaacagcaagcataatccacttcaatgtaatattttctgtagctccaaaggctatctcttcatattgactgcagacagactgaatggacagtttcttagagggcttgtctcctttctacccttgtcctctttcctttcctttgacctaatggagctagaaatatgtctgtgactccaccagttattctaataatttgttttcttgaaaattgttaatttcaagactggagaaataaactcaccttctatttactctgtgactttatgaagaggttgagggcacaagtggaagcctgtactggggactgtggagaagaccgcagctccat

SEQ ID NO: 361203 - DNA, 903 bp, Homo Sapiens; identical to SEQ ID NO: 98869

SEQ ID NO: 361204 - DNA, 718 bp, Homo Sapiens
ctccagaggtgaggctgtgtttaaaaacctggagccgggaggggagacccccacattcaatgaggagctttcaggcgatctggagaaagaacggcagaacacacagcaaggaaaggtcctttctggggatcaccccattggctgaagatgagaccattcttcctcttgtgtttggccctgcctggcctcctgcatgcccaacaagcctgctcccgtggggcctgctatccacctgtaggggacctgcttgttgggaggacccggtttctccgagcttcatctacctgtggactgaccaagcctgagacctactgcacccagtatggcgagtggcagatgaaatgctgcaagtgtgactccaggcagcctcacaactactacagtcaccgagtagagaatgtggcttcatcctccggccccatgcgctggtggcagtcacagaatgatgtgaaccctgtctctctgcagctggacctggacaggagattccagcttcaagaagtcatgatggagttccaggggcccatgcccgccggcatgctgatcgagcgctcctcagacttcggtaagacctggcgagtgtaccagtaccatggctgacgacatgcacctccaccttccctcgggtcctgcagggtcaggctcagagctggcaggatgttcggtgccagtcccatgcctcagaggcctgatgcacgcctaaatggggggaaggtcg

SEQ ID NO: 361205 - DNA, 1009 bp, Homo Sapiens
gggtccggtgtcggggcacagttgaagaagcgaccgagggactgggagtcgttagtgaggatgacgcggcatggcaagaactgcaccgcaggggccgtctacacctaccacgagaagaagaaggacacagcggcctcgggctatgggacccagaacattcgactgagccgggatgccgtgaaggacttcgactgctgttgtctctccctgcagccttgccacgatcctgttgtcaccccagatggctacctgtatgagcgtgaggccatcctggagtacattctgcaccagaagaaggagattgcccggcagatgaaggcctacgagaagcagcggggcacccggcgcgaggagcagaaggagcttcagcgggcggcctcgcaggaccatgtgcggggcttcctggagaaggagtcggctatcgtgagccggcccctcaaccctttcacagccaaggccctctcgggcaccagcccagatgatgtccaacctgggcccagtgtgggtcctccaagtaaggacaaggacaaagtgctgcccagcttctggatcccgtcgctgacgcccgaagccaaggccaccaagctggagaagccgtcccgcacggtgacctgccccatgtcagggaagcccctgcgcatgtcggacctgacgcccgtgcacttcacaccgctagacagctccgtggaccgcgtggggctcatcacccgcagcgagcgctacgtgtgtgccgtgacccgcgacagcctgagcaacgccaccccctgcgctgtgctgcggccctctggggctgtggtcaccctcgaatgcgtggagaagctgattcggaaggacatggtggaccctgtgactggagacaaactcacagaccgcgacatcatcgtgctgcagcggggcggtaccggcttcgcgggctccggagtgaagctgcaagcggagaaatcacggccggtgatgcaggcctgagtgtgtgcgggagaccaaataaaccggcttgggtgcgcaaaaa

SEQ ID NO: 361206 - DNA, 859 bp, Homo Sapiens
gggacagttgaagaagcgaccgagggactgggagtcgttagtgaggatgacgcggcatggcaagaactgcaccgcaggggccgtctacacctaccacgagaagaagaaggacacagcggcctcgggctatgggacccagaacattcgactgagccgggatgccgtgaaggacttcgactgctgttgtctctccctgcagccttgccacgatcctgttgtcaccccagatggctacctgtatgagcgtgaggccatcctggagtacattctgcaccagaagaaggagattgcccggcagatgaaggcctacgagaagcagcggggcacccggcgcgaggagcagaaggagcttcagcgggcggcctcgcaggaccatgtgcggggcttcctggagaaggagtcggctatcgtgagccggcccctcaaccctttcacagccaaggtccctctcgggcaccagcccagatgatgtccaacctgggcccagtgctgggtcccttcccaagtaaggacaaggacaaagcgctgcccagcttctggatcccgtcgctgacccccgaagccaaggccaccaagctggaagaagcccgtcccgcacggtggaccttgccccatggcacgggaaagccccctgcgcatgtcggacctgacgcccgtgcacttcacaccgctagacagctccgtggaccgcctgggggctcatcaccccccgcggagcgctacgtgtgtggccggtgacccccggaaagccctgagcaaccgccaccccctggcgctggtgctgcggcccctctgggggcttgtggtcccccttcaaaggcgggggaaaaattgaattcccaagggcttgtgtggacct

SEQ ID NO: 361207 - DNA, 1104 bp, Homo Sapiens
ggcctgggtggcgattcggacgaggccaggccttgatgatgatattgaaaatgaagctgacatctccatgtatggcaaagaggagctcctacaagttgtggaagccatgaagacactgcttttgaaggaacgacaggaaaagctacagctggagatgcatctccgagatgaaatttgcaatgagatggtagaacagatgcaacagcgggaacagtggtgcagtgaacatttggacacccaaaaggaactattggaggaaatgtatgaagaaaaactaaatatcctcaaggagtcactgacaagtttttaccaagaagagattcaggagcgggatgaaaagattgaagagctagaagctctcttgcaggaagccagacaacagtcagtggcccatcagcaatcagggtctgaattggccctacggcggtcacaaaggttggcagcttctgcctccacccagcagcttcaggaggttaaagctaaattacagcagtgcaaagcagagctaaactctaccactgaagagttgcataagtatcagaaaatgttagaaccaccaccctcagccaagcccttcaccattgatgtggacaagaagttagaagagggccagaagaatataaggctgttgcggacagagcttcagaaacttggtgagtctctccaatcagcagagagagcttgttgccacagcactggggcaggaaaacttcgtcaagccttgaccacttgtgatgacatcttaatcaaacaggaccagactctggctgaactgcagaacaacatggtggctagtgaaactggacccttccggaagaaggcagcatggtattgcctggagcaagtatccatactgggggttggaaactcccaaggccccagggtttctggcccaaaaaagcgcacttggctatcccagccagggaaaaagtcaagcaaaacaaacccaagcaagcccacgcaggggtaaggaaaacccatttccgttcacgaaaagtttcaattttcccccgagaacggccaaaccctgccccaaaggctcggatccaggaactgggaggcccgctagatgtgccccggcatcccatagcggcactcgacggg

SEQ ID NO: 361208 - DNA, 1843 bp, Homo Sapiens
ccatatgaagcttatgccgagcacagatgtgggtccgaagtggtccacagcagcagcccgggtggtccgcacagctcgagcaaagccctcaggcccctctcgcagcaggatgtctctgaaaccagccgggggcgggcctatgggcactgcagggacaacggggtcccgggggctggggctggccttgacgggaatcggggtggttggaccgtttaccatgacatggccgaggtagtgcaacagcttttgggcccggttctgtgcaggccgcagctggaacagctctgggttctgcgtcgatgaactgggtgtccacagtgcctgccaggaactgctggttgttgagcacattctgcaggaaggcgatgttggtcttcacacctcggacgcggaactccgcaagggccctgctcatcttggtggcggccgtggggtggtctttgccgtgggcaatgactttgaccagcagggagtcgtagtggggcgagatgacggctccttggaaggcggaagcattatccaggcggatgcccatgccctctccgctccggaacacctcaatgcggccggtgtccggctggaagctgcgcgcggggtcctcggtggtgacccggcactggatggcacacccgttgatgcggatgttctcctgccgcaggcccaggtcgggtaggctcctgccctcagccacgtggatctgagcatggaccaggtctacgtcggtgatctcctctgtgaccgtgtgctccacctgcaggcgggagttgacctcgatgaagtagtgcttgccgtgcctgtccaccaggaactccacggtgcctgcgttctcgtagcccacctgtttagcgagtttcacagagtcgctggtgacccgagtccaaagctgcgggtccaggtgggccggcgggggcaatctcgaccaacttctggggcccccgctggatggagcagtctcgctcgtacaggtgcaggatgttcccatactggtcccccaaggtattgcacctcgatgtgccgtggctctggaatgaacttctccacaaaaacagcgccccattcccaaaggcggccagagcctctgagtaggcccgggtgtaattctcctccagctcctcgtagctgtgcaccaccctcatgccacgccctccaccccccataggccgccttgaagatgatggggaagccgtaggtgttggagaactcgtgggcctcatgcagggacgtgatgggggcatctgtgccagggacaacgggaacacccgcagcaatggcgatggcccgggcctccaccttgtctcccatcttgcggaccacttctgggcttggcccaataaaccggacccctgcatcctggcaggcctgggcgaagtccgctcgctcagagaggaacccgtagccagggtgcactgcatctacgttgttctccttggccaccttgatgatgtctgggatgtgcaggtaggcctgcacgggggccaggccgcggccgatgagataggcttcatctgctttctgccggtgcatctggcccgtgtcctgctcagagtagatggctacggtgcggatgcccagctccgtgcaggcccggaacacacggatggcaatctcacctctgttggccaccatgactttcttgatgggcttatactccaggcgccggacatttggggaggcagcgggggcggtggaggttcggcggattcccaggagcctcaggcccccatggactgttcggaacttcagcatccttagtgtttggtcagctctccagaaggcagacactatctcctcgccgtcgccagtcctcgccgccgcctctaccgcatcccgagaattccggacc

SEQ ID NO: 361209 - DNA, 890 bp, Homo Sapiens
  misc_feature (236)..(236): n is a, c, g, or t
gagcgctctcgctcagtgcagcgaggccagcgatgccttctggaccacactctgtcctcgccgaggtcctggtttgttcctcaacgtcggctgaaggcatcgtcccctgacttcctcttccattcgtccttccgaaaggggacccgactggttcctcttctacatatgaggcgcatctgcttggtgcaaatgtccaagcacctcttctgactcggtgagagtgattttccagtganttgctttggcctgtacaaccagagaacaggattcttcccttcttttgggccaccaaatgcctatgtgcaccacacattccagtgtgctgagaagggcagagcttcttggatgatgatggacgtcccaccgggcaggatgaaggcagagcgtgtggcatctccacctcaagggtgcagcctgatcttcctcttctcccttgccagccagcactctgccttctgtatccaccatggtgtttggtgagtttttccatcgccctggacaagacgaggaacttgtcaacctgaatgtggggggctttaagcagtctgttgaccaaagcaccctcctgcggtttcctcacaccagactggggaagctgcttacttgccattctgaagaggccattctggagctgtgtgatgattacagtgtggccgataaggaatactactttgatcggaatccctccttgttcagatatgtttcgaatttttattacacggggaagctgcatgtcatggaggagctgtgcgtattctcattctgccaggagatcgagtacaggggcatcaacgagctcttcactgattcttgctgccagcaatcgctaccaggaacgcaaaggagcgaaaccacgagaaggactgggaccagaaaagccatgatgctgc

SEQ ID NO: 361210 - DNA, 2497 bp, Homo Sapiens
  misc_feature (2341)..(2341): n is a, c, g, or t
  misc_feature (2347)..(2347): n is a, c, g, or t
  misc_feature (2356)..(2357): n is a, c, g, or t
  misc_feature (2359)..(2361): n is a, c, g, or t
aatcaaaaagcggggcgggccaccccgaataactcaaacgccgcggcggcaggcgcggggccgcgccgcgaggcctgatccctgcagcccgggcaggcggcgtcgcagagcggagctagctggatgcgtccggactcctgcaggtgagagtgattttccagtgattgctttggcctgtacaaccagagaacaggattcttcccttctttttggccaccaaatgcctatgtgcaccacacattccagtgtgctgagaagggcagagcttcttggatgatgatggacgtcccaccgggcaggatgaaggcagagcgtgtggcatctccacctcaagggtgcagcctgatcttcctcttctcccttgccagccagcactctgccttctgtatccaccatggtgtttggtgagtttttccatcgccctggacaagacgaggaacttgtcaacctgaatgtggggggctttaaggcagtctgttgaccaaagcaccctcctgcggtttcctcacaccagactggggaagctgcttacttgccattctgaagaggccattctggagctgtgtgatgattacagtgtggccgataaggaatactactttgatcggaatccctccttgttcagatatgttttgaatttttattacacggggaagctgcatgtcatggaggagctgtgcgtattctcattctgccaggagatcgagtactggggcatcaacgagctcttcattgattcttgctgcagcaatcgctaccaggaacgcaaggaggaaaaccacgagaaagactgggaccagaaaagccatgatgtgagtaccgactcctcgtttgaagagtcgtctctgtttgagaaagagctggagaagtttgacacactgcgatttggtcagctccggaagaaaatctggattagaatggagaatccagcgtactgcctgtccgctaagcttatcgctatctcctccttgagcgtggtgctggcctccatcgtggccatgtgcgttcacagcatgtcggagttccagaatgaggatggagaagtggatgatccggtgctggaaggagtggagatcgcgtgcattgcctggttcaccggggagcttgccgtccggctggctgccgctccttgtcaaaagaaattctggaaaaaccctctgaacatcattgactttgtctctattattcccttctatgccacgttggctgtagacaccaaggaggaagagagtgaggatattgagaacatgggcaaggtggtccagatcctacggcttatgaggattttccgaattctaaagcttgcccggcactcggtaggacttcggtctctaggtgccacactgagacacagctaccatgaagttgggcttctgcttctcttcctctctgtgggcatttccattttctctgtgcttatctactccgtggagaaagatgaccacacatccagcctcaccagcatccccatctgctggtggtgggccaccatcagcatgacaactgtgggctatgggagacacccacccggtcaccttggcgggaaagctcatcgccagcacatgcatcatctgtggcatcttggtggtggccctttcccatcaccatcattcttcaacaagtttttccaagtactaccagaagcaaaaggacattgatgtggaccagtgcagtgaggatgcaccagagaagtgtcatgagctaccttactttaacattagggatatatatgcacagcggatgcacaccttcattaccagtctctcttctgtaggcattgtggtgagcgatcctgactccacagatgcttcaagcattgaagacaatgaggacatttgtaacaccacctccttggagaattgcacagcaaaatgagcgggggtgtatgtgcctgtttctcttatcctttcccaacattaggttaacacagctttataaacctcagtgggttcgttaaaatcatttaattctcagggtgtacctttcagccatagttggacattcattgctgaattctgaaatgatagaattgtctttatttttctctgtgaggtcaattaaatgccttgttctgaaatttattttttacaagagagagttgtgatatagtttggaatataagataaatggtattgggtggggtttgtggctacagcttatgcatcattctgtggttgtcatttactcacattgagctaactttaaattactgacaagtagaatcaaaggtgcagctgactaagatcccacaaaatgagacaatgcatgtaaatccatgctcatgttctaaacatgggaaactacgagcctaataaacctcctaattcagtatggaaaaaanaagaanccgcccganntnnnaaattgtcggcccgccttgggcccttcaaaaagcttttctagaacctttcgttttggcgccgggggccccagaaggtaaaggggaaattggggccataactggtttccctaggaagatccctgggccatgaaatag

SEQ ID NO: 361211 - DNA, 895 bp, Homo Sapiens
aagacactgctactactgtttgttccaaatttaatggctttgaccagcaaactctacaccaaaagttcaggacaaacagtatgaacaaaacagcctaactgccaagactacaatgatcatgcccagtgcactccaggaaaaaggagtgacaacaagcctccagattagtggggaccattctatcaatgccactcaacccagtaagccatatgcagagccagtcaggtcagtgagagaggcatctgagagacggtcttcagattcctaccctctcgctcctgtcagagcacccagaacactgcagcctcaacattggacaacattttataaaccacatgctcccatcatcagtatcagggggaatgaggagaagccagcttcaccctcagcagcagtgcctcctggcacagatcacgatccccacggtctcgtggtgaagtcaatgccagacccagacaaagcatcagcttgtcctgggcaagcaactggtcaacctaaagaagactctgaggagcttggcttgcctgatgtgaatccaatgtgtcagagaccaaggctaaaacgaatgcaacagtttgaagacctcgaagatgaaattccacaatttgtgtagggatgtcaaatttcagggtttttttgttgatgttgtgttattttgcggtattgtgcttgttttgtgatagaatgttttgacagggccccttttgtataggactgccaaatcatgggtgtttgccttttgttgttgcatttatcctctgatgggaaatactgaatgggaagaatgttgttgatagggttcacatttcgtgccctcaccgggaattatccgttaaacttcggtatttttaaaaggtggtgcaataacaaaaggcgggaatttccgcatttttta

SEQ ID NO: 361212 - DNA, 857 bp, Homo Sapiens
  misc_feature (696)..(696): n is a, c, g, or t
  misc_feature (836)..(836): n is a, c, g, or t
ggctccagaaggcagcggtctaggcgaggacgcccggctggaccaggagaccgcccagtggctgcgctgggacaagaattccttaactttggaggcagtgaaacgactaatagcagaaggtaataaagaagaactacgaaaatgttttggggcccgaatggagtttgggacagctggcctccgagctgctatgggacctggaatttctcgtatgaatgacttgaccatcatccagactacacagggattttgcagatacctggaaaaacaattcagtgacttaaagcagaaaggcatcgtgatcagttttgacgcccgagctcatccatccagtgggggtagcagcagaaggtttgcccgacttgctgcaaccacatttatcagtcaggggattcctgtgtacctcttttctgatataacgccaaccccctttgtgcccttcacagtatcacatttgaaactttgtgctggaatcatgataactgcatctcacaatccaaagcaggataatggttataaggtctattgggataatggagctcagatcatttctcctcacgataaagggatttctcaagctattgaagaaaatctagaaccgtggcctcaagcttgggacgattctttaattgatagcagtccacttctccacaatccgagtgcttccatcaataatgactactttgaagaccttanaaagtactgtttccacagactttgtcttttgctttggctgacaaaccaaggccagaattgttttagctaacgacccggatgctgatagacttgctgtggcagaaaagcaagacagtggtgaaatggaagggtgtttttcnggcaatggaattggggggccc

SEQ ID NO: 361213 - DNA, 1832 bp, Homo Sapiens
ggcagatctcaccgcctgcttccctctgcagcggtagcacaagctcagcgatggcggctccagaaggcagcggtctaggcgaggacgcccggctggaccaggagaccgcccagtggctgcgctgggacaagaattccttaactttggaggcagtgaaacgactaatagcagaaggtaataaagaagaactacgaaaatgttttggggcccgaatggagtttgggacagctggcctccgagctgctatgggacctggaatttctcgtatgaatgacttgaccatcatccagactacacagggattttgcagatacctggaaaaacaattcagtgacttaaagcagaaaggcatcgtgatcagctttgacgcccgagctcatccatccagtgggggtagcagcagaaggtttgcccgacttgctgcaaccacatttatcagtcaggggattcctgtgtacctcttttctgatataacgccaaccccctttgtgcccttcacagtatcacatttgaaactttgtgctggaatcatgataactgcatctcacaatccaaagcaggataatggttataaggtctattgggataatggagctcagatcatttctcctcacgataaagggatttctcaagctattgaagaaaatctagaaccgtggcctcaagcttgggacgattctttaattgatagcagtccacttctccacaatccgagtgcttccatcaataatgactactttgaagaccttaaaaagtactgtttccacaggagcgtgaacagggagacaaaggtgaagtttgtgcacacctctgtccatggggtgggtcatagctttgtgcagtcagctttcaaggcttttgaccttgttcctcctgaggctgttcctgaacagaaagatccggatcctgagtttccaacagtgaaatacccgaatcccgaagaggggaaaggtgtcttgactttgtcttttgctttggctgacaaaaccaaggccagaattgttttagctaacgacccggatgctgatagacttgctgtggcagaaaagcaagacagtggtgaatggagggtgttttcaggcaatgagttgggggccctcctgggctggtggctttttacatcttggaaagagaagaaccaggatcgcagtgctctcaaagacacgtacatgttgtccagcaccgtctcctccaaaatcttgcgggccattgccttaaaggaaggttttcattttgaggaaacattaactggctttaagtggatgggaaacagagccaaacagctaatagaccaggggaaaactgttttatttgcatttgaagaagctattggatacatgtgctgcccttttgttctggacaaagatggagtcagtgccgctgtcataagtgcagagttggctagcttcctagcaaccaagaatttgtctttgtctcagcaactaaaggccatttatgtggagtatggctaccatattactaaagcttcctattttatctgccatgatcaagaaaccattaagaaattatttgaaaacctcagaaactacgatggaaaaaactaattatccaaaagcttgtggcaaatttgaaatttctgccattagggacttaaactggtatgatgatagcaactgataaaaaaggtgatctgagagtgagaacgactgatggactggcagggtatgcagaaaatttttccacgccagagtatatttgcgcaaagcgagtaaaagccagctggttatgctccctcactacccgggtcctggtgcacatttaggccaggcatccacgttttgttgcccaccccgtcgtgccgggaaaaggca

SEQ ID NO: 361214 - DNA, 1525 bp, Homo Sapiens
cggtccggaattcccgggataaacgaagaagggctgacgaccaacgaggggctcaagatgctggtgaccatctcctgtatcctggtgggggtcttgctgctgtttgtcctcctgctggttgtgcggaggaggcggcgggagagaggctaaagaggctgcgagatgcaaagagtttagctgaaatgctcatgagtaagaatacccggacttcagatacgttaagcaagcaacagcagaccctgcgaatgcacatcgacatacccagggctcagcttttgattgaagagagagacacgatggagaccattgatgatcgctccacggttctgttgacggatgctgactttggagaggcagctaagcagaagtccctgacggtcactcacacggtccattaccaatcggtgtctcaggccactgggcccttagtggatgtttcagacgctcggccgggaacgaatcccaccaccaggaggaatgccaaggctgggcccacagcgagaaaccgctatgccagccagtggaccctcaaccgaccccaccccaccatctcagcacacaccctcaccacagacgggaggctgccaacacccagggctgcaggatcagtagacaaagagagcgacagttacagcgtcagcccctcgcaagacacagatcgagcaagaagcagcatggtctccacagaaagtgcctcctccacttacgaagaactggccagggcctacgaacacgccaagatggaagagcaactgaggcacgccaagttcaccatcacggagtgcttcatatcagacacgtcatcggagcagttgacggcagggacaaatgagtacacggacagtctgacctccagcaccccttccgaatcgggaatctgcaggttcactgcatctccccccaaacctcaggatggaggaagagtaatgaatatggcagttccaaaggcacatcggccaggtgacctcatacatttgcctccataccttagaatggactttttgttaaaccgaggtggtccaggcaccagcagggacctgagcttaggacaagcatgctttggaacctcagaaaagccgggaccctgaagcgccccacggtcctggagcccatcccgatggaagccgcctcctccgcctcctccacgagagaaggacagtcgtggcagccgggggccgtggccacattacctcagcgggagggagcagagctgggacaggcagctaaaatgagcagctcccaagaatcactgctcgactcccggggccatttgaaaggaaacaatccttacgcaaaatcttacaccctggtataacagacagcatgactggacagcggttgtaaatacaattcaaacaattcaatccaacagctaccttttttttacggaattccaagtatttcatacttaccgacaaattgccaaattatttttacccacaaacacacggacgaaattctgtaaaccccagacgggtgcaaggactctccaggcattacctgtctgaatgtgagagccccatcg

SEQ ID NO: 361215 - DNA, 1974 bp, Homo Sapiens
  misc_feature (104)..(104): n is a, c, g, or t
  misc_feature (336)..(336): n is a, c, g, or t
  misc_feature (351)..(352): n is a, c, g, or t
gtaggcttgaggcaacttgctttcccagggccgccctgggacctgggatgggcccaaagcaagggcagggggcaggaaaagaccgccctgggggccctgggacnttgagtttggggtgccctaacatttccgggcagctgcttgccgcaagacccccacacccagggggagctgataccacaggaagcccacgccgcagggaaccccctccgcagggtggtgttcaattggccgcagggcgcacacaggccggtgctcaccgccacgtttcccgttgcacggagcgctgcagacactgccagtcactggccgggagcctgacacgcagaggtcccngcacacgaccccgcnnccgggagctgctgacacagacattcacagccccaatgccttcacatagcctctgctcctcgccctccagcaggcgcctgtaggtggcgatctcgatgtccaggcccagcttggagttcatcacctcctggtactccctgatcaggcaggccatgtcctgcttggccttctgcagggcaccctccagctcggccagcttgcagcgggcatcactgagggccgcctcaccctgctgctcagactgggccaaccgcggcctccagcttggagttctggcacttggcattctccacctcggccgtcagcctctggatcatgcggttcagctcgttgatctcctccttggtgcggcgcagggtctccccgtgcctgatcaccgtggccttcatctcctcacacttgctgcggtaccaggactcggcctcggcccggctgcgggtgacaatgtcatcatactgagccttaatctcagcaatgacacagtgcatgttcaggtcccgactgttgtccatcttgacgaccactgaggtgtctgagatgtgcgactggagaacgcggatctcctcctaatatagccgcctcaggaagtcgatctcctgggtcagggcctccacgttgccctctagatctgattagcgcaggtaggcacagtccacatccttcttcaaggccacaaattcattctcagcagtggccagtagtgccacctcttcttcatacttcttattgtaaccctccagcacctcctgcacgtggttgagatctgagcccagcctcccactgttggattccatgcactcggcctcccgtagcagagatgtagccctcaaacagaggctccaggtagctctcgcagcactcacggttctggaagaactgcagctttgtctccagcagcttgttctgctgctccaggaagtgcaccttgtccatgaaggccgcgaacctgctgttgagggacttgatctgctccttctcctcctgcttcacgcactgtgcgttggggtcgatctccaggttgaggggcgtgaggaggctctcgttgaccgacacggtggcgatgcatggggggctgggtccgcacacgcccccggagcggtagccgaagctgcgtccgcaggagccggcgcggaagcccccgcacacgctgtggctgccgaagcctccggtgaggccgcggtagcaggagacgccgcggtagggggcggcggtgatgcagcagcggccgggccggggcccgcaggccgagatgcagctgaaggcgcggaccccgcagggggcgctgaggcgggagtagaggcaggacatggtgcggtggcggcaggggcgggcggctggaccccaagccggcgctgcgccttatatgacggcccgcgggcccggggagggagctcagcggccaaggcgtttacgagcttggagggctcggccctcgcgcctcgcggagccgggaatgaaagcgagccaggccgcccggccgcctgcataaaacggcgttcgcctcccgcccgagttttatggggccgggaagcgcctggtcagccccgctgcccgtgcgctgcggtcagtgcgagtggaaaccctccacctgtccgcccctccgccgggactccgagctttgcc

SEQ ID NO: 361216 - DNA, 1136 bp, Homo Sapiens
ggactgtccacgagggcctgaggaatcaggagctgaactccacagagtcagttatgattaatggaaaatattgctgtccaaagatatacttcaaccaccgttgcttctcagggccatatcttaacaaaggaagaattgctgagctgcctcaatgtgtaggacctgggaactgtgttctggtccttagagaggtcctcactttacttatcaatgcagcctacaaacccagccgtgtccttcgggagctccagctggacaaagactctgtgtggcacggatgtggggaagtcctaaaagccaaatataaaggaaagagttatcgggctactgttgagatagtgaaaacagcagatcgggtgactgaattctgccggcaaacctgtatcaaactggaatgctgtcctaacctcttcggtccacggatggttctggataagtgttctgagaactgttctgtacttacaaagaccaaatacacacactattacggaaagaagaaaaataaaagaattgggaggccacctggtgggcatagtaacttagcttgtgccctgaaaaaagccagtaagaggagaaagaggcggaaaaatgtttttgttcataagaagaaacgctcctctgcatctgttgataataccccagcgggctctccccagggaagtggggggtgaagatgagggtgacccagatgaaggggatgattgattccctaagtgaaggcagtacatccgagcagcaggatgagctacaggaagaatcagaaatgtcagaaaaaaagtcatgctcctcttctcccacccaaagtgagatatccacatcgctgccctccagatagacaaaaggagaaaaagggagcttcgcaccttttcattttctgacgatgaaaataaacctccttcaccaaaggaaataaggatcgaagttgctgaaaggcttcacctggacagtaaccccttgaagtggagtgtggcagacgttgtgcggttcatcagatccactgactgtgctccattagcaagaatattcctagaccaggaaattgatgggcaggccctgttgctccttacccttcccactgttcaagaatgcatggacttaaaattgggccctgccatcaaactttgccatcacataga

SEQ ID NO: 361217 - DNA, 1210 bp, Homo Sapiens
tggattgagagtgcggaccccacacctggccgaccagcctggtgcagaaagggagtccggtcttggtctgatgaggcagagcgagggcatgcgtcctggtaagtcgggtgactgcggagttgaggtggttccattttggaaactgaggaagcagagcttggaagacctgggggttggaggggaagggtctgcacgcacccaggagtgggtgacacagaggcccagcctgccaagcaagccggtgtctgtgccctaccgggtgggacgagagacccaggccccgccacccaaggtcggcactcagggctggctctcctgtgtcctctctgccttgcaggcggctatgggtctgcggcatatggaaacaagggttggggggacagcagctccagggctccaagtggtgagggtttgaacaccagtgccagcggccttggggtgggctcggagtctggggtccacagttcagcggaggctctgctcaggccctgctgggctcccgctctgagggctgcgaccttcatctggggttctaggaggaagaacttcttctcccggcgttgctgggaacagcggcacctgtaccaggcgaacatgaccagagcgaccaagaggatgaagacagcagtgaccaccgctggcacaggccagaacccagtgtcgggggcggactggggttctgcacctgaaacctccagcgtgacttgtctgttatttctctggtgtcccacgaggtgccacatgtacagcccagcatgggagtcccgggcgcctttgatcaccagctgtgccacgcctccctgaacctggagctgccagccgtcccgggagaagtagcctggagccacctcattgaagatggcgctctcctgcccgtgggcacgcagcttgatgttgacatgggagaaggcgttggagatgttgcaggacatgacggtgttctcgccccaagacacagagactaccccctctgtgcagatggggctgtcccagccttcattctgagcactcaaggaggcagccaaaaacaggagggtcccaagggcctgggaaacgtggccagggaatgccagggggcaggtctgcatggctggtgggacttgggcccctggtccttgtcactggctcttgaaacactcccgggtccgctcctggacgcgctcctctgggatgcagcttctccgcgccccggagccatcccgggaattcc

SEQ ID NO: 361218 - DNA, 1749 bp, Homo Sapiens
  misc_feature (543)..(543): n is a, c, g, or t
ctctacagtacacgtgggggacggcagcgccacgcaggccggggggacgcagtgtccttctctgacagcagcatcagggctcaggcaagccgggcaggatgcatcacagctggcggccttgaacggggcagaggctaccccgacctgaggagtgccgccccttgtggccacgctgcccagcaggccggctccttccctctcgggcgccagcagcagctcctactccttctcacgagtccacttgatcatggcctccggggagcgcaagaggaagataagcttggcgtacaactcctcctccagctccagctcccgagtctcccgcaccaggaagatgtcctggcagagcttgaggatgcggtccacgcacggcagctcctcgaacataatggagtgcgagatctcgctgaagaatccgcgcacgaacttgccgatgaccagcacgatggacacgtacagccccatgatgccgtagccagccaggaagccgaggcttcggggggctgaccttgtcactgaaaatgaccatgggcagcaggttgncagtcggcccggcactcctgcagctcgatgacccaccattcgaggaagccggtggcccccgcaccctgctccctccgcagctggatacgcacgccgaggtagtcggcctcctcattgggctgcagctgcttcacagggttggcttcgggcccgttgggggcacggatgtacttggggaagagattggggatgaccacagactggtccgaggtgccctcgagcaggctggccagctgccgccgtgcagtgctgttgggggccagggccagcatgtgcttctcgttggcatactccacagtgcctcccttcgccaggtccctctggaagttccaggtgaagcgcagggtgatgtcggccgtgccgttgtagagctcccgcttcatctgggcacggctggggggactgatgcgccacagcgccccggagctgccctcaatctgcgccgtgacgatgtcctcagggctgtactggctgatgaactgcatggccagcggctgggggtcaaactgccgggacagctcctcataggcctgggccgtgaaggggatgatggacggctgctgggcgctcatggtgaacagcggctcatagccgcccagcttgagggtgacggtgacatcgatgggctggttgacaaccccaaccacggagcgcaccagcgacatgaagagcagcgggaaccagatgatggcgatgaggaagaggatgatgaggccacccatgccgtacttgacgatcttcttcttcttctgccctttgggctgcgggtatttctggaggggaacgacacaggtcatacgctcagctctgcccttcctgcgggtcacacaaccgcattctccagctcacccagcagcccagaaaagccccagcctgacctcagtatggcacggcggtagtaatggtgggcagacacaggccagtggagtagaactaagagtccagttggaaccctcatgttcaggggtcgttgatcttagacaagggagctgtgaccgttcagtgggaacggacaacctttttcaacacggtgcaggcaccgccccaggcaggagagtgaaacgcaactcctgcctcataccatgtgccaaaatttacctcaaagtggatcaaagagcgaaacttcagagctaaaactatagaacttttagaagaaaacgggcaaatcttcatgaacctggatttgcatcccgggaattccggacc

SEQ ID NO: 361219 - DNA, 1627 bp, Homo Sapiens
  misc_feature (136)..(136): n is a, c, g, or t
atcaggccaaatcggccgagctcgaattcgtcgagagcgggcgcagcatggcgcccccgcaggtcctcgcgttcgggcttctgcttgccgcggcgacggcgacttttgccgcagctcaggaaggtgaggcgcggantggagcagagttgtggagctgggctgggctggggggcagcggcccccggccctcagcccccgaaacgggcataatagggaggggaccaatgaggccgcgctttccagcgtggagaccggacggtgcggacgtgctccggctcaggccctccgcgcggtaggaaacggcgagggccgtcccggggagcagcctcacttcgcagctttgctcgccttgaatgtgtctgtgaaaactacaagctggccgtaaactgctttgtgaataataatcgtcaagtgccagtgtacttcagttggtgcacaaaatactgtcatttgctcaaagctggctgccaaatgtttggtgatgaaggcagaaatgaatggctcaaaacttgggagaagagcaaaacctgaaggggccctccagaacaatgatgggctttatgatcctgactgcgatgagagcgggctctttaaggccaagcagtgcaacggcacctccacgtgctggtgtgtgaacactgctggggtcagaagaacagacaaggacactgaaataacctgctctgagcgagtgagaacctactggatcatcattgaactaaaacacaaagcaagagaaaaaccttatgatagtaaaagtttgcggactgcacttcagaaggagatcacaacgcgttatcaactggatccaaaatttatcacgagtattttgtatgagaataatgttatcactattgatctggttcaaaattcttctcaaaaaactcagaatgatgtggacatagctgatgtggcttattattttgaaaaagatgttaaaggtgaatccttgtttcattctaagaaaatggacctgacagtaaatggggaacaactggatctggatcctggtcaaactttaatttattatgttgatgaaaaagcacctgaattctcaatgcagggtctaaaagctggtgttattgctgttattgtggttgtggtgatagcagttgttgctggaattgttgtgctggttatttccagaaagaagagaatggcaaagtatgagaaggctgagataaaggagatgggtgagatgcatagggaactcaatgcataactatataatttgaagattatagaagaagggaaatagcaaatggacacaaattacaaatgtgtgtgcgtgggacgaagacatctttgaaggtcatgagtttgttagtttaacatcatatatttgtaatagtgaaacctgtactcaaaatataagcagcttgaaactggctttaccaatcttgaaatttgaccacaagtgtcttatatatgcagatctaatgtaaaatccagaacttggactccatcgttaaaattatttatgtgtaacattcaaatgtgtgcattaaatatgcttccacagtaaaatctgaaaaactgatttgtgattgaaagctgcctttctatttacttgagtcttgtacatacatacttttttatgagctatgaaataaaacattttaaactg

SEQ ID NO: 361220 - DNA, 985 bp, Homo Sapiens
cctgggtggcgaattcggcacgagggcgactgggcggcctcggagactcgcagacgctcgggggaacatggcggctgcggagccggcggtccttgcgctccccaacagcggcgccgggggcgcgggggcgccgtcgggcacagtcccggtgctcttctgtttctcagtcttcgcgcgaccctcgtcggtgccacacggggcgggctacgagctgctcatccagaagttcctcagcctgtacggcgaccagatcgacatgcaccgcaaattcgtggtgcagctgttcgccgaggagtggggccagtacgtggacttgcccaagggcttcgcggtgagcgagcgctgcaaggtgcgcctcgtgccgctgcagatccagctcactaccctgggaaatcttacaccttcaagcactgtgtttttctgctgtgatatgcaggaaaggttcagaccagccatcaagtattttggggatattattagcgtgggacagagattgttgcaaggggcccggattttaggaattcctgttattgtaacagaacaataccctaaaggtcttgggagcacggttcaagaaattgatttaacaggtgtaaaactggtacttccaaagaccaagttttcaatggtattaccagaagtagaagcggcattagcagagattcccggagtcaggagtgttgtattatttggagtagaaactcatgtgtgcatccaacaaactgccctggagctagttggccgaggagtcgaggttcacattgttgctgatgccacctcatcaagaagcatgatggacaggatgtttgccctcgagcgtctcgctcgaaccgggatcatagtgaccacgagtgaggctgttctgcttcagctggtagctgataaggaccatccaaaattcaaggaaattcagaatctaattaaggcgagtgctccagagtagggtctgctttccaaagtataggacatttgaagaactggtatg

SEQ ID NO: 361221 - DNA, 2164 bp, Homo Sapiens
  misc_feature (37)..(37): n is a, c, g, or t
cccgggcaagttgttgggaaccaagaagcccttggtntgaaccccactgtgaagccagccaagacctagtggtcccactggaacacccggctcaaggactccggatgtcacacatgcgtgagtcttggcgtctacacccccctcggggccagtgggtgagcagtggcccgtggtccccgccagagctcccccagagtggacttggctccgccggacacagtgccctgctctgagctgccgctggctgctccacgtctgagaccacgcgacgttgcctcatgaactgacgtggacagcagcaggggagacgctgggtggttctgtggccaagcacagcccgtgtcaggagcacaggccgtgccctttcccagggggcacactgggcatttctcaatggccttcacaggacgcaaaggggcacacagaggcagtggggaagctggagttcttgggctggcagggaatggtggcagccttcttggccttcatgaagggcctggcttgctgggctaaggtcacagtgttctgaggtccccacacgcactcagactagaccctccgtacacacccaggctagaccctccatactcacccaggctagaccctccatacacacccaggctagaccctccatactcacccaggctagaccctccatacacacccaggctagaccctccatactcacccaggctagaccctccatactcacccaggctagatcctccatacacacccaggctagactctccgtactcacccaggctagatcctccgtactcacccaggctagaccctccgtactcacccaggctagaccctccgtacacacccaggctagaccctccgtacacacccagactagaggcttggggctgagaaaagcagtcatgcctcttcaggaattaccagcagagaatgcccagccctcttgatagtagcaataattaataggtttatccccaaaggagcggaagtgtggaatcctccccggcaataggtcttagggtaggggctggggcatcctagagaagggccctaaatcaggcgctcagtgtccggaacgcaggtctatcccacccaccagccggcccccaggcctcccttcctcagtccttccaggatatcgtcagggaggttctgggatccccaagtggtccgaatccgggctctaaggagtgtccgtggcatactaaattagactctgctgtggcaataaataacaggggatgatggggggcctcgggcaccaggcccaggcctgtcctgcaggctcacacgaagttctcttcctcttctgcagactcaccacctggcggctcctcaggggagcctgcgcagctgcccgcgtggcgcacgccgatggagcggcccaggaagcaggtggcctggcgcatgtggcacgaggagatgtaggtgacgttgttgttgccgcaaagctcctggccggggctggagggcacagggcagggcgccgctcgacacaccacgcagtgggcgctgcccgtctggtccacgacgcacgacttgtggccgcgggcacaccacgtgctcacaggacttgcggcagcggccccggtacatgacgctcaggtccgggtgcccgcggcagcgcgcggcgcgcagctcgcactcgtcgcggtaggtggcgccgtctgagccgcagacctgcagccgcgccgggagccccgagcagtcgggcgcgcactcgcagcgcgggcggccccccagcatgcggcacgccttgcccgggccgcactccacgccgtcgcacgaatctttgcagggaaggcagtggacaaggcccaagaagccgaggaggttgatcttgttccccgggtgggtgaggttggaccaggcggtgtcaatgttgccggaggcacagcactcggcccgggtgacatcagtctggagcaccaggctgcaggtggcctcctggccctgctggagccagcaaacaccaccgggcgcggggttccccgagcccatggagctcacgaagcccacggcccaagccagggccccccagggcagaggccagagtggccctggcgccccgggacgcatggcgaacgcagagacggcagcgatcccgggaatcccggaccggtaccagcctgttgtttaggaataaagagaagggggggaggttggaaggtggggg

SEQ ID NO: 361222 - DNA, 1747 bp, Homo Sapiens
  misc_feature (1660)..(1661): n is a, c, g, or t
tatgataggtagaactggtgttaataggagaggtcaggcgagcgctagttctgcgcgtggtatagtacgtgtacgataacctgcaaagagttctactgaggtggtccagagccagagggtcctatctcttcgtggcctcgtgactgtggatgctctgtgtgctgtgcaagatccttcagtgccttgtaaccagttgtgaccacagtgcaaatatactgctaggttccagtattcttggtgtggcaagaactatgaaacttgcatatctctatgagcataaagaacagtattcattatatattatatctacataaacttgtgtgagctaatgtagacctattggatattcttcaacctgatgaagacactatattctttgtgtgtgacacccataggccagtcaatgtcgtcaatgtatacaacgatacccagatcaaattactcattaaacaagatgatgaccttgaagttcccgcctatgaagacatcttcagggatgaagaggaggatgaagagcattcaggaaatgacagtgatgggtcagagccttctgagaagcgcacacggttagaagaggagatagtggagcaaaccatgcggaggaggcagcggcgagagtgggaggcccggagaagagacatcctctttgactacgagcagtatgaatatcatgggacatcgtcagccatggtgatgtttgagctggcttggatgctgtccaaggacctgaatgacatgctgtggtgggccatcgttggactaacagaccagtgggtgcaagacaagatcactcaaatgaaatacgtgactgatgttggtgtcctgcagcgccacgtttcccgccacaaccaccggaacgaggatgaggagaacacactctccgtggactgcacacggatctcctttgagtatgacctccgcctggtgctctaccagcactggtccctccatgacagcctgtgcaacaccagctataccgcagccaggttcaagctgtggtctgtgcatggacagaagcggctccaggagttccttgcagacatgggtcttcccctgaagcaggtgaagcagaagttccaggccatggacatctccttgaaggagaatttgcgggaaatgattgaagagtctgcaaataaatttgggatgaaggacatgcgcgtgcagactttcagcattcattttgggttcaagcacaagtttctggccagcgacgtggtctttgccaccatgtctttgatggagagccccgagaaggatggctcagggacagatcacttcatccaaggctctggacagcctctccaggagtaacctggacaagctgtaccatggcctggaactcgccaagaagcagctgcgagccacccagcagaccattgccagctgcctttggcaccaacctcgtcatctccccaggcgcctttcctgtactgctctctcatggagggcactccagatgtcatgctgttctctaggccggcatccctaagcctgctcagcaaacacctgctcaagtcctttgtgtgttcgacaaagaaccggcgctgcaaactgctgccccctggtgatggctgcccccctgagcatggagcatgcacagtggaccgtggtgggcatcccccagagaccgaagctcggacagaagacttttttgganngcgttgagaagcagcgaagcacactccgagctgcacattactcgataggagaggatgcttcccattcagctagtagagtagaaggc

SEQ ID NO: 361223 - DNA, 629 bp, Homo Sapiens; identical to SEQ ID NO: 178247

SEQ ID NO: 361224 - DNA, 1311 bp, Homo Sapiens; identical to SEQ ID NO: 250951
  misc_feature (814)..(814): n is a, c, g, or t

SEQ ID NO: 361225 - DNA, 904 bp, Homo Sapiens
  misc_feature (30)..(30): n is a, c, g, or t
  misc_feature (134)..(134): n is a, c, g, or t
  misc_feature (139)..(139): n is a, c, g, or t
  misc_feature (205)..(205): n is a, c, g, or t
  misc_feature (240)..(240): n is a, c, g, or t
tgcttttggtgtttgcacctgtgcttttgncagcgggcatcccgggaaaaagcggtttttgacacttctgaaactaccattgacaaaacttttcaccaaaaatttttgtgctatcacacaaagggcacgaactngtcancaaggctgccgtggatgatcacagggttgatagttgtaaacatggttagaggagccgtccttttcnagctgtatctttctgcagtgtgcagcccacaaccnggtgtttcctcttctttttccttggaggagtatccacatcctcagcgggagctggagctatgatgctagattctttgactctaaactcatacacctgtctacatgttttggtcccaattaacctagcaatggcacagaaattgtcatagtaagtgccaatgaggactctaaacattgaggcttcagcaccactccactccacattctcaggaggttcaatatttggcttcatctttattggtgtttgacaccgagaatttgcttcagaggagctcgaagtttcatctttcttctcttcttcttctttatcattgttctctccccccgtttcagtccctgcttccctatcactgtctgtatcctttgattccagcacattaatggtgggggtgctgggcctgctactgttattgggaagccgtcctcttctgcggcctcctggacgttttggtggggtctttatccgctcagcggtgagagcagcagcaaactcctttgctccctccaaatgctggtaacactgtggtccacaaggtttgttgtctagagctgtttctgtgttcttccgcttataagtgttgggtgttgcatgaaaaggatgtaggaagcagtcatatttaaaacatcgcctacagaaaagcgtatgaaaggagtgtaagctttg

SEQ ID NO: 361226 - DNA, 891 bp, Homo Sapiens
  misc_feature (682)..(683): n is a, c, g, or t
  misc_feature (700)..(700): n is a, c, g, or t
  misc_feature (716)..(716): n is a, c, g, or t
  misc_feature (826)..(826): n is a, c, g, or t
  misc_feature (850)..(850): n is a, c, g, or t
  misc_feature (857)..(857): n is a, c, g, or t
tctcgggctcggtgatgacagcttccctatcgccgggatctatgacacaaccacagacaacaagtgcagcatcaagacggccgtggccaagaacatgctggaccccatcactgggcagaagctactggaggcccaggcggccacagggggcatcgtggacctgctcagccgtgagcgctactctgtgcacaaggcgatggagaggggcctgatcgagaacacctccacacagaggctgcttaacgcccagaaggccttcaccggcatcgaggaccccgtcaccaagaagaggctctcggtgggcgaggccgtccagaagggctggatgccccgggagagcgtgctcccacacctgcaggtgcagcacctgaccggggggctcatcgaccccaagaggacaggccgcatccccatccagcaggccctcctctccgggatgatcagtgaagagctggcccagctcctgcaggacgagtccagctacgagaaggatttgacagaccccatctccaaggaacggctgagctacaaggaggccatgggccgctgccgcaaagaccccctgagcggcctgctgctcctgccagcggcactggaggggtaccgctgctaccgctccgcctcccccaccgtcccgcgctcccttcgctgacacgggccaaggagcccagtgggggaagtnngcgtgtgttgggccagngtaggatacgtacacnctcttgcctcagagcagcctcatcccagggcagtggggtcttccctctgtccaaccactggttttattattttactaaacatgggtgatggggctcccctcccctaaccnttgggtgcctgatccatcccccgnaccaggnacaggcagcccactcagtttctttcctccaccct

SEQ ID NO: 361227 - DNA, 1227 bp, Homo Sapiens
  misc_feature (48)..(84): n is a, c, g, or t
ggaatgatagatactatagggcgactggagcttacgcggtggcggcgnnnnnnnnnnnnnnnnnnnnnnnnnnnnnnnnnnnnnatcaggccaaatcggccgagctcgaattcgtcgagagcgggctttggggctgcgctcactcgtgtgcgcgctcgtccgcccgccagtcctctcaacgcgcgcttggccgcccgacgacgcgggagccgcacgcgccggacgaggctcgctgcgctccctgttgcccagcgcgggcccgttgaggcggagccctcagttcccggccaggacacggtctgggccgccgaatctccggccgaagagcggcggcggcagcggcgggaaaaaaatgaagaatgaaattgctgccgttgtcttctttttcacaaggctagttcgaaaacatgataagttgaaaaaagaggcagttgagaggtttgctgagaaattgaccctaatacttcaagaaaaatataaaaatcactggtatccagaaaaaccatcgaaaggacaggcctacagatgtattcgtgtcaataaatttcagagagttgatcctgatgtcctgaaagcctgtgaaaacagctgcatcttgtatagtgacctgggcttgccaaaggagctcactctctgggtggacccatgtgaggtgtgctgtcggtatggagagaaaaacaatgcattcattgttgccagctttgaaaataaagatgagaacaaggatgagatctccaggaaagttaccagggcccttgataaggttacctctgattatcattcaggatcctcttcttcagatgaagaaacaagtaaggaaatggaagtgaaacccagttcggtgactgcagccgcaagtcctgtgtaccagatttcagaacttatatttccacctcttccaatgtggcaccctttgcccagaaaaaagccaggaatgtatcgagggaatggccatcagaatcactatcctcctcctgttccatttgggttatccaaatcaggggaagaaaaaataaacccatatcgccccattccagtgacatggggtaccctccttccctggaatgcaattgtggaccgggaatcactgggaattaatccctcacattggttagccaccctcccctaacttccgcctttttgaaattggggttggggggcccactggttggggaaaaaaggggtgagaaataaaaacctttactttaccaccttttaaaaagggtt

SEQ ID NO: 361228 - DNA, 1933 bp, Homo Sapiens
  misc_feature (1200)..(1345): n is a, c, g, or t
  misc_feature (1354)..(1354): n is a, c, g, or t
  misc_feature (1375)..(1388): n is a, c, g, or t
agcggaagaatgaaattgctgccgttgtcttctttttcacaaggctagttcgaaaacatgataagttgaaaaaagaggcagttgagaggtttgctgagaaattgaccctaatacttcaagaaaaatataaaaatcactggtatcgagaaaaaccatcgaaaggacaggcctacagatgtattcgtgtcaataaatttcagagagttgatcctgatgtcctgaaagcctgtgaaaacagctgcatcttgtatagtgacctgggcttgccaaaggagctcactctctgggtggacccatgtgaggtgtgctgtcggtatggagagaaaaacaatgcattcattgttgccagctttgaaaataaagatgagaacaaggatgagatctccaggaaagttaccaggcccttgataaggttacctctgattatcattcaggatccccttcttcagatgaagaaacaagtaaggaaatggaagtgaaacccagttcggtgactgcagccgcaagtcctgtgtaccagatttcagaacttatatttccacctcttccaatgtggcaccctttgcccagaaaaaagccaggaatgtatcgagggaatggccatcagaatcactatcctcctcctgttccatttggttatccaaatcagggaagaaaaaataaaccatatcgcccaattccagtgacatgggtacctcctcctggaatgcattgtgaccggaatcactggattaatcctcacatgttagcacctcactaacttcgtttttgattgtgttggtgtcatgttgagaaaaaggtagaataaaccttactacacattaaaagttaaaagttcttactaatagtagtgaagttagatgggccaaaccatcaaacttatttttatagaagttattgagaataatctttcttaaaaaatatatgcactttagatattgatatagtttgagaaattttattaaagttagtcaagtgcctaagtttttaatattggacttgagtatttatatattgtgcatcaactctgttggatacgagaacactgtagaagtggacgatttgttctagcacctttgagaatttactttatggagcgtatgtaagttatttatatacaaggaaatctattttatgtcgttgtttaagagaattgtgtgaaatcatgtagttgcaaataaaaaatagtttgaggcatgnnnnnnnnnnnnnnnnnnnnnnnnnnnnnnnnnnnnnnnnnnnnnnnnnnnnnnnnnnnnnnnnnnnnnnnnnnnnnnnnnnnnnnnnnnnnnnnnnnnnnnnnnnnnnnnnnnnnnnnnnnnnnnnnnnnnnnnnnnnnnnnnnncaacccaancatctgcgccgtggacccacnnnnnnnnnnnnnncgcgcggcttcgtccttcccgcgcagaaaccaaatccacaacacaacgctctggggtctctccccccgaaaaaaaatcccgggagggtccaaacggaaggcgccttgtcacccaatcacaaaaattggacttctgcgcccgccctcctccgcgggacctgtcctgacaaacaagaccgaaaccccctctgtgcccccagattttggtaatttccattctccacacacctgcggggcggcggtatcgcggaaacgatgtgtgcctgaataaatacccatccaacgccctggcttcgcccttctgtggggataaaaccacctgtgcacctacgggcacggtaataccttcccgtgccccaccgcactcgtgcgctatacactcaaatacccttggcgcccccttgggcgtaataaattaattctgcccccgccgccgccgataaacaaatccgggattggctcgacggaatctcgggcttacatttcctgtggctggcgcgttctgatacagaaacaaatggtgggccacaacattttgccccccgg

SEQ ID NO: 361229 - DNA, 1442 bp, Homo Sapiens
  misc_feature (1250)..(1250): n is a, c, g, or t
cttttgtctacttggctgacctcctgatgcctcacttgggtgcagcagaagacccccagacggccccggcactgaacttcggctctacgttgatgaagaagaagtctgatcctgagggtcccgcgctgctcttccctgagagtgaactttccatccggatagacaagagtgagaatggtgaggcatatcagagaaagaaggcggcagctactggccttccagagggtcctgctgtccctgtgccttctcgagggaatctggcacagcccggcggcagcagctggaggaggatcgcactgctcatcttggccatcactatacacaacattccaaaagatctcgctgttggagttggatttggggctatagaaaagacggcatctgctacctttgagagtgccaggaatttggccattggaatcgggatccagaatttccccgagggcctggctgtcagccttcccttgcgaggggcaggcttctccacctggagagctttctggtatgggcagctgagcggcatggtggagcccctggccggggtctttggtgcctttgccgtggtgctggttgagcccatcctgccctacgctctggcctttgctgccggtgccatggtctacgtggtcatggacgacatcatccccgaagcccagatcagtggtaatgggaaactggcatcctgggcctccatcctgggatttgtagtgatgatgtcactggacgttggcctgggctagggctgagacgcttcggaccccgggaaaggccatacgaagaaacagcagtggttggcttctatgggacaacaagcttctttcttcacattaaaacttttttccttcctctcttcttcatctcattatcctgattgactctgattataatagaaccatttttactttgctttgagggagattttgatttaatggggaattttaaggtgtcatggaaatacagattctttgtttaggccactgaatggactctctcttcagtgggattatcaaggaacttcagatcagggaaatctccacttcgggaccttctatctgcctcccaactcctcaaggtcacctatagaagcgagctaccaaaagacgtctcctaagcattttggtggcctagtgactcagggcagagtggccagcacacctctcatccgcccctcctgctccatcactgctgagcctctccccatctagaatgttggaactggagcatcataaagatagcaagctaccttccanaggccgagccagcccagagaggagcatgtcttcctttacctccccctaaggagatactacatgggagggggacacagaaaaagggaaggaaattggctagtctggcttaagaatgaaaaggcaaagatggcctttggacaggaaggggatgaggacactgtgaaccccaaggggagcccggtggaaaaaaag

SEQ ID NO: 361230 - DNA, 889 bp, Homo Sapiens; identical to SEQ ID NO: 73043
  misc_feature (707)..(707): n is a, c, g, or t
  misc_feature (741)..(741): n is a, c, g, or t
  misc_feature (781)..(781): n is a, c, g, or t

SEQ ID NO: 361231 - DNA, 2313 bp, Homo Sapiens
agcgcggcagcgacctggtgacggtgtacaacaccttgagccccatggagccccacgccctggtgcagttgtgtggcacctaccctccctcctacaacctgaccttccactcctcccagaacgtcctgctcatcacactgataaccaacactgagcggcggcatcccggctttgaggccaccttcttccagctgcctaggatgagcagctgtggaggccgcttacgtaaagcccaggggacattcaacagcccctactacccaggccactacccacccaacattgactgcacatggaacattgaggtgcccaacaaccagcatgtgaaggtgcgcttcaaattcttctacctgctggagcccggcgtgcctgcgggcacctgccccaaggactacgtggagatcaatggggagaaatactgcggagagaggtcccagttcgtcgtcaccagcaacagcaacaagatcacagttcgcttccactcagatcagtcctacaccgacaccggcttcttagctgaataccctctcctacgactccagttgacccatgcccggggcagttcacgtgccgcacggggcggtgtatccggaaggagctgcgctgtgatggctgggccgactgcaccgaccacagcgatgagctcaactgcagttgcgacagccggccaccagttcacgtgcaagaacaagttctgcaaagcccctcttctgggtctgcgacagggtgaacgactgcggaagacaacagcgacgcagcaggggtgcagttgtccggcccagaccttcaggtgttccaatgggaagtgcctctcgaaaagccagcagtgcaatgggaaggacgactgtggggacggctccgacgaggcctcctgccccaaggtgaacgtcgtcacttgtaccaaacacacctaccgctgcctcaatgggctctgcttgagcaagggcaaccctgagtgtgacgggaaggaggactgtagcgacggctcagatgagaaggactgcgactggtgggctgcggtcattcacgagacaggctcgtgttgttgggggcacggatgcggatgagggcgagtggccctggcaggtaagcctgcatgctctgggccagggccacatctgcggtgcttccctcatctctcccaactggctggtctctgccgcacactgctacatcgatgacagaggattcaggtactcagaccccacgcagtggacggccttcctgggcttgcacgaccagagccagcgcagcgcccctggggtgcaggagcgcaggctcaagcgcatcatctcccaccccttcttcaatgacttcaccttcgactatgacatcgcgctgctggagctggagaaaccggcagagtacagctccatggtgcggcccatctgcctgccggacgcctcccatgtcttccctgccggcaaggccatctgggtcacgggctggggacacacccagtatggaggcactggcgcgctgatcctgcaaaagggtgagatccgcgtcatcaaccagaccacctgcgagaacctcctgccgcagcagatcacgccgcgcatgatgtgcgtgggcttcctcagcggcggcgtggactcctgccagggtgattccgggggacccctgtccagcgtggaggcggatgggcggatcttccaggccggtgtggtgagctggggagacggctgcgctcagaggaacaagccaggcgtgtacacaaggctccctctgtttcgggactggatcaaagagaacactgggggtatagggggccgggggccaccccaaatgtggtacacctgcggggggccacccatcgtcaaccccagtgtgcacgcctgcaggctggagactggaccgctgactgcaccagcgcccccagaacatacactgtgaactcaatctccagggctccaaatctgcctagaaaacctctcgcttcctcagcccccaaagtggagctgggaggtagaaggggaggaaactggggggtctactgacccaactgggggcaaaggttggaagaaacagccttcccccgccagccccaagctgggccgaggcgcgtttgtgcatatctgcctcccctgtctctaaggagcagcgggaacggagcttcggggcctcctcagtgaaggtggtggggctgccggatctgggctgtggggcccttgggccacgctcttgaggaagcccaggctcggaggaccctggaaaacagacgggtctgagactgaaattgttttaccagctcccagggtggacttcagtgtgtgtatttgtgtaaatgagtaaaacattttatttcttttt

SEQ ID NO: 361232 - DNA, 1087 bp, Homo Sapiens
  misc_feature (26)..(26): n is a, c, g, or t
ctgggacttcccgggggggaagtggnccacccccaattctttcattccggattcgggggtaagggcagggcccccgggagggcccgagatccccagtcgtcctcggtgaggggaggtgacttcattcatggcccgctcccacacggccactgggggggccaggtcgagaagggtcgaagttggccagctcctttctccatgtagtacaggacccgcatggagtcgtcctgctgggctggccgtgaatcctgtagccactgcggacttcaagaggccacacctgctgtccgtgtcccgaagcaggggaacaataggagccttggccaccagctgagctactcctgtcaacgtctccagggtatccttccagggtacccgttgtaggcaggcccaatgggaatcatagctggtgggggtggggtcttggcgggagacaacgtgggcataggtgctgggggcataaatgctgggaacacctgaggtggctgctttgccggcggcatacacaaggacgatgagctctgcgtaggcctcattgttcccctggaggtcctgggctgagaccacggagcagtaatacacaccactgtccccccacgccgtctggtcaaaggtcaggtcagcatttccggtgatggtaatcctccggccctggtagtaatctcccagggtcacagcgttgccctgcttggtggccacgaccctgacggtgcgcacgctgtcctggcactcgacgtaggggttgtagcctgggttcccggctgccagctgggcattgagctggttgtcgacgctggccggggagaaggcatcggcgatgcggtcccggcagaaagacttgtacttccagatgacgatgggttgcgtgggggtcgaggtcatctggtaggtacagggcagggtcacaggctggaagaggatcaccacgtggtaggggttggacacggtcacctggatggccctggcaggagctgtgcaccaggtgctaagcagaagccacacgaagacgaccgcgtcccggcctgcggcggccgggtgggagcccagccctctggagagcccgccggccaacagcgccatcgcggcc

SEQ ID NO: 361233 - DNA, 1953 bp, Homo Sapiens
  misc_feature (1650)..(1684): n is a, c, g, or t
ctcacccctaagcccagccctcggctcccacccttgtgtacctgggccgaaccattcaccggagcgcgcagcgggtggagtgtggctcggaggaccgcggcgggtcaagcacctttctcccccatatctgaaagcatgccctttgtccacgtcgtttacgctcattaaaacttccagaatgcaacaggacggacttggagtagggacaaggaacggaagtgggaaggggaggagcgtgcacccctcctggccttggtgcgcgccgcgccccctaaggtactttggaagggacgcgcgggccagacgcgcccagacggccgcgatggcgctgttggccggcgggctctccagagggctgggctcccacccggccgccgcaggccgggacgcggtcgtcttcgtgtggcttctgcttagcacctggtgcacagctcctgccagggccatccaggtgaccgtgtccaacccctaccacgtggtgatcctcttccagcctgtgaccctgccctgtacctaccagatgacctcgacccccacgcaacccatcgtcatctggaagtacaagtctttctgccgggaccgcatcgccgatgccttctccccggccagcgtcgacaaccagctcaatgcccagctggcagccgggaacccaggctacaacccctacgttgagtgccaggacagcgtgcgcaccgtcagggtcgtggccaccaagcagggcaacgctgtgaccctgggagattactaccagggccggaggattaccatcaccggaaatgctgacctgacctttgaccagacggcgtggggggacagtggtgtgtattactgctccgtggtctcagcccaggacctccaggggaacaatgaggcctacgcagagctcatcgtccttgggaggacctcaggggtggctgagctcttacctggttttcaggcggggcccatagaagactggctcttcgtggttgtggtatgcctggctgccttcctcatcttcctcctcctgggcatctgctggtgccagtgctgcccgcacacttgctgctgctacgtcaggtgcccctgctgcccagacaagtgctgctgccccgaggccctgtatgccgccggcaaagcagccacctcaggtgttcccagcatttatgcccccagcacctatgcccacctgtctcccgccaagaacccacccccaccagctatgattcccatggggccctgcctacaacgggtaaccctggaggataccctggagacgttgacaggagtagctcagctggtggccaaggctcctatgtacccctgcttcgggacacggacagcagtgtggcctctgtccgcagtggctacaggattcaggccagccagcaggacgactccatgcgggtcctgtactacatggagaaggagctggccaacttcgacccttctcgacctggcccccccagtggccgtgtggagcgggccatgagtgaagtcacctccctccacgaggacgactggcgatctcggccttcccggggccctgccctcaccccgatccgggatgaggagtggggtggccactccccccggagtccccaggggatgggaccagggagccccgcccagggaagcaggcagggcggggggctgggagggaccacgaannnnnnnnnnnnnnnnnnnnnnnnnnnnnnnnnnnttggagagaaactttacccccgtcccaaaaaccccgttcccaaataccagggcacaccaggacccctccccacgcaaataaaccgcgcgcgcacgagaaaaaaattatcgcggccccccaaagagtccctctcacccgacatgctgtcgcccgccttgcggcggataacaactcctcttgtggcgcgccccgatacgccacctcccgccccgccgaaatttttccccccacgtcctcgtgcgcgaaaacctccccccccgcaaaaccgg

SEQ ID NO: 361234 - DNA, 1128 bp, Homo Sapiens; identical to SEQ ID NO: 102233
  misc_feature (995)..(995): n is a, c, g, or t

SEQ ID NO: 361235 - DNA, 2009 bp, Homo Sapiens
  misc_feature (1213)..(1225): n is a, c, g, or t
  misc_feature (1461)..(1474): n is a, c, g, or t
  misc_feature (1760)..(1769): n is a, c, g, or t
gctggctcacctccgagccacctctgctgcgcaccgcagcctcggacctacagcccaggatactttgggacttgccggcgctcagaaacgcgcccagacggcccctccaccttttgtttgcctagggtcgccgagagcgcccggagggaaccgcctggccttcggggaccaccaattttgtctggaaccaccctcccggcgtatcctactccctgtgccgcgaggccatcgcttcactggaggggtcgatttgtgtgtagtttggtgacaagatttgcattcacctggcccaaaccctttttgtctctttgggtgaccggaaaactccacctcaagttttcttttgtggggctgccccccaagtgtcgtttgttttactgtagggtctcccgcccggcgcccccagtgttttctgagggcggaaatggccaattcgggcctgcagttgctgggcttctccatggccctgctgggctgggtgggtctggtggcctgcaccgccatcccgcagtggcagatgagctcctatgcgggtgacaacatcatcacggcccaggccatgtacaagggggctgtggatggactgcgtcacgcagagcacggggatgatgagctgcaaaatgtacgactcggtgctcgccctgtccgcggccttgcaggccactcgagcccctaatggtggtctccctggtgctgggcttcctggccatgtttgtggccacgatgggcatgaagtgcacgcgctgtgggggagacgacaaagtgaagaaggcccgtatagccatgggtggaggcataattttcatcgtggcaggtcttgccgccttggtagcttgctcctggtatggccatcagattgtcacagacttttataaccctttgatccctaccaacattaagtatgagtttggccctgccatctttattggctgggcagggtctgccctagtcatcctgggaggtgcactgctctcctgttcctgtcctgggaatgagagcaaggctgggtaccgtgcaccccgctcttaccctaagtccaactcttccaaggagtatgtgtgacctgggatctccttgccccagcctgacaggctatgggagtgtctagatgcctgaaagggcctggggctgagctcagcctgtgggcagggtgccggacaaaggcctcctggtcactctgtccctgcactccatgtatagtcctcttgggttnnnnnnnnnnnnntgccgttggtgggagagacaaaaagagggagagtgtgctttttgtacagtaataaaaaataagtattgggaagcaggcttttttcccttcagggcctctgctttcctcccgtccagatccttgcagggagcttggaaccttagtgcacctacttcagttcagaacacttagcaccccactgactccactgacaattagctaaaagatgcaggggctccgtatctcgacattcattnnnnnnnnnnnnnnttatttaaataagctaccaaagtacttccttttttttaataacaaaaataaaagattctttattaggtacaagcggaggcccccgtaccccagaaaagaattcctgtttcgggcacgccctccggccccttcgaaaaaagactttctccaaaaaccattttcgctttggggcccccgccggggtccccggtgaaggggcaagggggaaaaatcgggccccctcagccctgtttttccccaagggaaaatccctgggggcccgtggacttaaggggtctggggactnnnnnnnnnnaataaaaaaacgcgccccgcggcggggaacccggaaggggttcttggaaaacaaattcccgaattgcgaatcttcttgaagggagatctaacgggggactctactaaagccgggaggtcgcccggggagattccgcatttgaaaatataacgcgcccgcgccgctggcccatattattcgggaagacgggtgtggggagtcttctttaagctctgtgtcgtcgggagctggggaaacccc

SEQ ID NO: 361236 - DNA, 1034 bp, Homo Sapiens
  misc_feature (379)..(379): n is a, c, g, or t
  misc_feature (440)..(440): n is a, c, g, or t
  misc_feature (705)..(705): n is a, c, g, or t
  misc_feature (920)..(920): n is a, c, g, or t
agctggcgggcaagatcctggtggatgtgagcaaccctacagagcaagagcaccttcagcatcgtgagtccaatgctgagtacctggcctccctcttccccacttgcacagtggtcaaggccttcaatgtcatctctgcctggaccctgcaggctggcccaagggatggtaacaggcaggtgcccatctgcggtgaccagccagaagccaagcgtgctgtctcggagatggcgctcgccatgggcttcatgcccgtggacatgggatccctggcgtcagcctgggaggtggaggccatgcccctgcgcctcctcccggcctggaaggtgcccaccctgctggccctggggctcttcgtctgcttctatgcctacaactntcgtccgggacgttctgcagccctatgtgcaggaaagccagaacaagttcttcaagctgcnccgtgtccgtggtcaacaccacacttgccgtgcgtggcctacgtgctgctgtcactcgtgtacttgcccggcgtgctggcggctgccctgcagctgcggcgcggcaccaagtaccagcgcttccccgactggctggaccactggctacagcacccaaagcagatcgggctgctcagcttcttctgcgccgccctgcacgccctctacagcttctgcttgccgctgcgccgcgcccaccgctacgacctggtccaacctggcagtncaagcaggtcttggccaacaagagccacctctgggtgggaggaaggaggtctggccgaatggagatctacctctcccctgggagtgctggccctcggcacgttgtccctgctgggcgtgacctcactgccgtccattgcaaactcgctcaactggagggagttcagccttcggtcagtcctcactggggctttgtggcccctcggggctgaacangctggaacaacgctcagcgaacgggtggaacccccgccccttccagagagaagccgccaacaaagttcctaccctgggcctccccccccttccacgccttcccgccctgggtgg

SEQ ID NO: 361237 - DNA, 1065 bp, Homo Sapiens
tcactgagcaagatgttgcaagccaccagagctattcccaaaagaccctgattgcactggtcacctcgggagccctgctggctgtcttgggcatcactggctatttcctgatgaatcgccgcagctggagccccacaggagaaaggctgggcgaagacccttattacacggaaaacggtggaggccagggctatagctcaggacctgggacctcccctgaggctcagggaaaggccagtgtgaaccgaggggctcaggaaaacgggaccggccaggccacctccagaaacggccattcagcaagacaacacgtggtggctgataccgaattgtgactcggctaggtggggcaaggctgggcagtgtccgagagagcacccctctctgcatctgaccacgtgctacccccatgctggaggtgacatctcttacgcccaacccttccccactgcacacacctcagaggctgttcttggggccctacaccttgaggaggggcaggtaaactcctgtcctttacacattcggctccctggagccagactctggtcttctttgggtaaacgtgtgacgggggaaagccaaggtctggagaagctcccaggaacaaccgatggccttgcagcactcacacaggacccccttcccctaccccctcctctctgccgcaatacaggaacccccaggggaaaagatgagcttttctaggctacaattttctcccaggaagctttgagttttaccgtttcttccctggattttctttctctactttgaggaaaccaaagtaaccttttgcacctgctctcttggaatgatatagcccagaaaaacgtgttgccttgaaaccacttccctcatctctcctccaagacactgtggacttggtcaccagctcctcccttgttctctaagttccactgagctccatgtgccccctctaccatttgcagagttctgcacagtttttctgggctggagccctagaacagggccttcccaagtttttaaggacaaacagcttccaattcttagttctcctccggggggccaccccagaaaaac

SEQ ID NO: 361238 - DNA, 1383 bp, Homo Sapiens
gattaaaaactttcccaaagccaaaatgaaaagaacccaatgtttcacctttaacgtgggggaaaagttggcaaaaaagaacccccaggagggacaccccaaaccttcttctgtgtcctctgtggaacctggcttttttctcttgtcctcagagaaagaaacaaatgccgatatcctctgtttaaaatatgaaagtaccttacaccaataacccctaacagcctggggtctcagtggaactaacttaagtgaaagaaaattaagacaggcatagaattagccctttgttttgaggctttaggggaccagagctccatgtgtggcattctcgaatttcacctgaggcctacaaggggtttcaaatggttgcaatttaaggtccagaatctttgtgttgggaaatgctggccgactgacgccttgacagcctgagcacgggttgcctcatgccctctcatgctgtctatttcttaatctaacaactgggcaatgcgttaaactggcttttttgacttcccagaacaatatctaagttagcaaataacacaattcagtgacattcagcaggatgcaaattccagacactgcaatcatgaacactgtgaagacagtcttctccgtgggccgggacacaaagcagtccacagtgttgggacaaggccaggcgttgcacttcaccagccgctgcatggagaagccgtcgtacatgacatagaagacgtacatgaaggcggcttcgaagatgacccggaagaagatgctgcttgtgtaggtccaccacagggagccttcgatgcggaccttctgggttttgatctcctcgatgtccttaaattcactctttatctcccccttgatgaacttcctcttcttctcatgtctccggtaggccacgtgcatggccactaggagcgctggcgtggacacgaagatcagctgcagggcccatagccggatgtgggagatggggaagtagtgatcgtagcacacgttcttgcagcctggctgcagggtgttgcagacaaagtcggcctgctcatctccccacacctcctttgcagccacaacgaggatcataatgcgaaaaatgaagaggacggtgagccagatctttccaatgctggtggagtgtttgttcacaccccccaggatcgtctgcagcgtgccccaatccatcttctactctgggcggtttgctctgcgtcgggaggaagcgcggcggggccggggcgggggtctcggcgttggggtctctgcgctggggctcctgcgctcaataggcgggtccatgggcacgggcgcagcacgaggggctccgagtcggggagaggagcgcgcagggcgctgcagatccaataactcccaggaccagtacagcactgc

SEQ ID NO: 361239 - DNA, 2744 bp, Homo Sapiens
  misc_feature (1953)..(1961): n is a, c, g, or t
  misc_feature (2058)..(2072): n is a, c, g, or t
  misc_feature (2725)..(2725): n is a, c, g, or t
ggtccaaggtagcgaggcctgggtggcgaattccgcacgagggcagtggtgccagggtcccagaagccagagagggttttggaggcctctgtaggggcctgaggccggcgtgtgctccctggcgctgccctctgacctgcagctggaccgccggggcgccgaggggccggaggccgagcggctgcgggcagcccgcgtccaggagcaggtccgcgcccgcctcttgcagctgggacagcagccgcggcacaacggggccgctgagcccgagcctgaggccgagactgccagaggcacatccagggggcagtaccacaccctgcaggctggcttcagctctcgctctcagggcctgagtggggacaagacctcgggcttccggcccatcgccaagccggcctacagcccagcctcctggtcctcccgctccgccgtggatctgagctgcagtcggaggctgagttcagcccacaagcggggcagcgcctttggggccgctgggtacgggggtgcccagcccacccctcccatgcccaccaggcccgtgtccttccatgagcgcggtggggttgggagccgggccgactatgacacactctccctgcgctcgctgcggctggggcccgggggcctggacgaccgctacagcctggtgtctgagcagctggagcccgcggccacctccacctacagggcctttgcgtacgagcgccaggccagctccagctccagccgggcaggggggctggactggcccgaggccactgaggtttccccgagccggaccatccgtgcccctgccgtgcggaccctgcagcgattccagagcagccaccggagccgcggggtaggcggggcagtgccgggggccgtcctggagccagtggctcgagcgccatctgtgcgcagcctcagcctcagcctggctgactcgggccacctgccggaacgtgcatgggttcaacagctacggtagccaccgaaccctgcagagactcagcagcggttttgatgacattgacctgccctcagcagtcaagtacctcatggcttcagaccccaacctgcaggtgctgggagcggcctacatccagcacaagtgctacagcgatgcagccgccaagaagcaggcccgcagccttcaggccgtgcctaggctggtgaagctcttcaaccacgccaaccaggaagtgcagcgccatgccacaggtgccatgcgcaacctcatctacgacaacgctgacaacaagctggccctggtggaggagaacgggatcttcgagctgctgcggacactgcgggagcaggatgatgagcttcgcaaaaatgtcacagggatcctgtggaacctttcatccagcgaccacctgaaggaccgcctggccagagacacgctggagcagctcacagacctggtgttgagccccctgtcgggggctgggggtccccccctcatccagcagaacgcctcggaggcggagatcttctacaacgccaccggcttcctcaggaacctcagctcagcctctcaggccactcgccagaagatgcgggagtgccacgggctggtggacgccctggtcacctctatcaaccacgccctggacgcgggcaaatgcgaggacaagagcgtggagaacgcggtgtgcgtcctgcggaacctgtcctaccgcctctacgacgagatgccgccgtccgcgctgcagcggctggagggtcgcggccgcagggacctggcgggggcgccgccgggagaggtcgtgggctgcttcacgccgcagagccggcggctgcgcgagctgcccctcgccgccgatgcgctcaccttcgcggaggggctgctggggcgtgccccccccgagactttctgctgcccgtcgctttctccagacgatctcccgaacagtgccttcctaccacggcgcgtcacctccttatattcctgtctcctannnnnnnnngcacgctggcctgatgtgtggcgtcacatgtagccggccccggcctagttgggtccttattattagtcgccagccagaccttactccatcctcgtgnnnnnnnnnnnnnnnttcgcggatgccacccagcagcgcaccgcctggaggtctcccatccggacgtttcgtcaggtgattttccgacgccgccgcgggaaataattattgttgtatgatcggccaccttcatcctcccgcacattcgtaatacctttttaccggcgccgataattctaggtccggcggagacacgatttttattttcgggcccttacacgtgtgtgacctgaggcgccccggacggtgcttcggtgtgccttcgccgaacccccttgtgtatgtgtgtggcacggggcgtggcgcctatgcgtatattttttcgctttgccccccttccggccttccgcgtctcgcctagtttcttaccttctgcacctcacgtactttttcgccggcatattcgatactattgtctcgtagcagccctgcgcgaccagccattgtgatgctccgtcgatcgcacccttcgctggccgcggccgatggggatgtgcgtgagtgtggcggtcctgcgtcgagcggagtttgtagttggcggcccgcctgagacccatatgggtgcctggtgcgcgaacggtccggatcggcacgtttacccccgtctatgccccccgctttacaactagtcgcctccacgtggcgcactgcgcactcatatacgacangtttagatctcggtcttcg

SEQ ID NO: 361240 - DNA, 2076 bp, Homo Sapiens
  misc_feature (1209)..(1209): n is a, c, g, or t
gccagagatggccccccaaagtgagcccagagaaggatcccataatgcccaggagcagatgtcctcttctagggaagagagagcactgggggtgtgctcagggcacgaggcccctacaccggaggaaggtgcccacacagaacaagccgaggctccctgcagaggccaggcgtgctcagcacagaaggctcagcctgtgggtacctgcccaggagaggagtggatgattcggaaggtgaaggtggaggacgaagatcaggaggcagaagaggaggtcgaatggccccagcatctatcgttacttcccagcccctttcccgcgcctgacctggggcatctggctgccgcgtacaaactggagccaggggccccgggggcactgagtgggctcgcgctgtctgggtggggtccgatgccggagaagccctacggctgcggggagtgtgagcggcgcttccgggaccagctgacgttgcgactgcaccagcggctgcaccggggcgagggcccctgcgcctgcccggactgcggccgcagcttcacgcagcgcgcccacatgctactgcatcagcgcacccaccgcggcgagcggcctttcccgtgctccgagtgcgacaagcgcttcagcaagaaggcccatctgacccgccacctgcgcacgcacacgggcgagcggccctacccgtgcgcggagtgcggcaagcgcttcagccagaagatccacctgggctcgcaccaaaagacccacaccggcgagcggcccttcccctgcacggaatgcgagaagcgctttcgcaagaagacgcaattgattcggcaccagcgcatccatacgggcgagaggccctaccagtgcgcacagtgcccacgcagcttcacgcacaagcagcacttggtgcggcaccaaagggtgcaccagacggccggcccggccaggccctctcccgactcgtccgcttctcctcattccactgccccgtccccgaccccatcctttcccgggccaaagcctttcgcgtgctccgactgcggcttgagcttcggctggaaaaagaacctcgccacgcaccagtgtctgcaccgcagcgagggtcgccccctttgggtgcgatgagtgcgcactgggcgccaccgtggatgcccccgccgccaagcccctggccagcgcgcctggcggaccggggctgcggcccaggatcccgatcccgntggtgcccccagcgcgccccctcgggcgagcggtccttcttctgcccggactgcgggcgcggcttctcccatgggcagcacctggcgcggcacccgcgcgtgcacacgggcgaacggcccttcgcctgcacgcagtgtgaccgccgcttcggctcgcggcctaatctggtcgcccactccagggcccacagcggcgccaggcctttcgcctgcgctcagtgcggccgccgcttcagccgcaagtcgcacctgggccgccaccaggcggtgcacactggcagccgcccccacgcctgcgccgtctgcgcccgcagcttcagctccaaaaccaacctagtccgccaccaggcgatccacacaggctcccgccccttctcctgcccgcagtgcggaaagagcttcagccgcaagacccacctggtgcggcaccagctcattcacggcgaagccgcccacgcggccccggacgccgcccttgcggccccagcctggtccgctccccccgaggtggcgccgcccccgctcttcttctgagcctagttctcacgaggaccctttcttgcccacagtttcgagaggcccgtgccatgagaccgcctggggtgagcaaggcgacctgggctgctgcccgaaggtttggccgccgcgggacacctgtttccttcccgcagtgtctgcgtccgcacagcatacccagctcggacctcctaggacagagactcagcgaacccttgctgggaaccgctgagctgaagttcttggaaggctcccacccaggtgccccgttggaaagcagatatttcccggacccagcgcggcctcaaccagggcaggaaagagtggttatttatgtacttaaagtttcat

SEQ ID NO: 361241 - DNA, 776 bp, Homo Sapiens
tcttgcttgggtataggaggacgaactttccaagtatccctcgggatctactagctcctagagacttgttttacaccaccatatgaagaccctgatgcacgctgaggttggtggtactttttttgctgatctacccataattgttcttttgcagttttaaatgtaggcaggctgctatcctcctttgggccattatcttctgttttactacaagccttattcagtattggattggaaagtgcatcaatggtgccagaaccataaaaagacttcctctgtggattttcacaggcagcaggaaaacaagactggttagacaagaacacaataagtcctatgttttcttctgcagagctgtgattttcctttttgacacttccaaacaatggtgtgacatggaattttgcagtagctgactcacctacaggtgctgagaatgtaggacaagtcctagcagtgttagtcaccataggtggctgggcattctgaaggagtttcaaacgattgctctccgggaagtcttgggtccggtctcgatcatgagctgagttaggtaatgagtcactctcttgagaactaccacaaacactaaatttaggaagatcaaagacagtggcctccttatggattaccactgatgcaagagcaggttccaacagagagtctttgaattttttgccagcttgcatcatcttctgtacactactcattttgaaaacattatttattgacaaccccgctctcgacgaattcgagctcggccgatttggcctgat

SEQ ID NO: 361242 - DNA, 1081 bp, Homo Sapiens
  misc_feature (960)..(960): n is a, c, g, or t
ggaattcctgggatctctgggccgctgaggggagctgaagggaggtcaggcaaacactcactcaatctgcctccctccatcaggctgcccttctctggcttcctcctgatccaagttctctacattcatctctctgcctccaggactggtataagagctgagctcaggtgagctggctcctcctgtcttgtctcagcggctgccaacagatcatgagccatcagctcctctggggccagctataggacaacagaactctcaccaaaggaccagacacagtgagcaccatgggacagtgtcggtcagccaacgcagaggatgctcaggaattcagtgatgtggagagggccattgagaccctcatcaagaactttcaccagtactccgtggagggtgggaaggagacgctgaccccttctgagctacgggacctggtcacccagcagctgccccatctcatgccgagcaactgtggcctggaagagaaaattgccaacctgggcagctgcaatgactctaaactggagttcaggagtttctgggagctgattggagaagcggccaagagtgtgaagctggagaggcctgtccgggggcactgagaactccctctggaattcttggggggtgttggggagagactgtgggcctggaaataaaacttgtctcctctaccaccaccctgtaccctagcctgcacctgtccacatctctgcaaagttcagcttccttccccaggtctctgtgcactctgtcttggatgctctggggagctcatggggtggaggagtctccaccagagggaggctcaaggggactggttgggccagggatgaatatttgagggataaaaaatgtgtaaggagccaaagaattggtagtaagggggagaacagagaggagctgggctatgggaaatgatttgaataatggagctgggaatatggctggatatctggntactaaaaaagggtctttaagaacctacttcctaatctcttccccaatccaaaccatagcttgtctgtccagtggctctcttcctgccctccaagctctggcccccaggctccctccctaa

SEQ ID NO: 361243 - DNA, 1271 bp, Homo Sapiens
  misc_feature (52)..(62): n is a, c, g, or t
  misc_feature (80)..(95): n is a, c, g, or t
  misc_feature (98)..(110): n is a, c, g, or t
  misc_feature (130)..(191): n is a, c, g, or t
tctttttattataaagaaagaacgacccccccccccaaattaaatattttcnnnnnnnnnnnccacccccccccctccgnnnnnnnnnnnnnnnnttnnnnnnnnnnnnncagggggggtttcccccggnnnnnnnnnnnnnnnnnnnnnnnnnnnnnnnnnnnnnnnnnnnnnnnnnnnnnnnnnnnnnnttccttttggcccaaaccccctggttttaaccccaaattgaaatttaccccaagccctttccccccatttagtctccgggggtaaaggaatgcccggcccaagtagtcagtcatccccgggtttaagaagctaaagggcgctggttgcggatcacaaagaaagcgtatcctcgggccggtctgattggagtgatttccatgtagataaacagtaagttgtccaacattttgagatgtcacttgaaaagaggagtttgtcactccaggaggcaccacaacttcatcggggagctcaaggatagtaatatttttggaaacgaaatgtgatttcaaaagtgatcaccagggttgcatttaatggtggccgcagggtgaggctgacgttggtcgagctgccgttctccagctttacgacaggaggaacagtgaggctgacgcttgactcacatttctctacgagcttcaggggaaaaaggataaaaatagtcagccaattccttatcatgtttctcgatttctcagaactctgttgcttagggcgcctagcgagctctcacaaacacagtaatcctcaatgttactggaagaggcagagctcaggagtcctcccttcgcccagtgtgaaaacccggaggggaggatggggtctcgtgctgctcagtcccccggagccccgcactccgcacgtcaaccggcgctctcgcaaaggttctctcagcgtctccaaagcaatctgagcgcccccaggctcgaggaaccgccctcacgggacgcatgagcctcgaccaggtgccggtcaggaatgcaccgcgttcccctgcccggctagactttgggagaggcgggtccgctgtcacctgacctccgccacctgactcgtggggccggatctcggcgagatgagctctgggagttgtagtttccgcgcgtcttagacggacagagcgcagctgggtcgggccggggcgcagagatcggggctccggcgtgagggaagatgaggtccgctgccagggacacagagactcttggagccgccagcgcctcccggctcctttcgatcccgggaattccggaccc

SEQ ID NO: 361244 - DNA, 1230 bp, Homo Sapiens
cagtgtgcagcgttcagacaatgggtcgtatatctgtaagatgaaaataaacaatgaagagatcgtgtctgatcccatctacatcgaagtacaaggacttcctcactttactaagcagcctgagagcatgaatgtcaccagaaacacagccttcaacctcacctgtcaggctgtgggcccgcctgagcccgtcaacattttctgggttcaaaacagtagccgtgttaacgaacagcctgaaaaatccccctccgtgctaactgttccaggcctgacggagatggcggtcttcagttgtgaggcccacaatgacaaagggctgaccgtgtccaagggagtgcagatcaacatcaaagcaattccctccccaccaactgaagtcagcatccgtaacagcactgcacacagcattctgatctcctgggttcctggttttgatggatactccccgttcaggaattgcagcattcaggtcaaggaagctgatccgctgagtaatggctcagtcatgatttttaacacctctgccttaccacatctgtaccaaatcaagcagctgcaagccctggctaattacagcattggtgtttcctgcaggaatgaaataggctggtctgcagtgagcccttggattctagccagcacgactgaaggagccccatcagtagcaccttgaaatgtcactgtgtttctgaatgaatctagtgataatgtggacatcagatggatgaagcctccgactaagcagacaggatggagaactggtggggctaccggatatcccacgtgtggcagagtgcagggatttccaaagagctcttggaggaagttggccagaatggcagccgagctcggatctctgttcaagtccacaatgctacgtgcacagatgaggattgcagccgtcaccaaagggggagttgggcccttcagtgatccagtgaaaatatttatccctgcacacggttgggtagattatgccccctcttcaactccggcgcctggcaacgcagatcctgtgctcatcatctttggctgcttttgtggatttatatagatagggttggttttatacatctccttggacatcagaaaaagagtccaggagacaaagtctgggaatgcattcacaaaggaggattctgaattagtggtgaattatatagcaaagaaatccttctgtcggagagccattgaacttaccttacatagctagggagtcagtgaggg

SEQ ID NO: 361245 - DNA, 964 bp, Homo Sapiens; identical to SEQ ID NO: 102235
  misc_feature (897)..(897): n is a, c, g, or t

SEQ ID NO: 361246 - DNA, 1454 bp, Homo Sapiens
ggatgaaaaactgattcacctggcagagacctaccccatccacatgcacagccagctggaccaccttagcctctattactgcaggtgtactctgccagagaatccaaacaatcacaccctccagtactggaaggaccacaacatcgtgacagcagaagtccactgggctaacctgactgtcagtgaatgccaggagatgcatggagagttcatgggatctgcgtgcggccatcatggaccctacactcctgatgtcctcttttggtcctgtattctctttttcaccaccttcatcctctcaagcaccttaaagacgtttaagacgagccgttatttcccaaccagagtacgctccatggtgagtgactttgctgttttcctcactatcttcacaatggtgattattgattttttgattggagtcccatcaccaaagcttcaagttcccagtgtgttcaagccaacaagggatgatcgcggatggattattaatcccattggccccaatccctggtggactgtgatagctgcaattatcccagctcttctctgtactatcttgatattcatggatcagcagatcacagccgtcattattaacaggaaggaacataagctcaaggtaaaaagaggttctgacctagaaggctgctgtggcaacctgttacattttcgtaaaattttagggtaagcacatctagaccagaaattgtagaatctcatagaagaggttcataaggggtttccattctttaataacaaagatttctttggagattagagtggaacatggttgtatggtatgaaagcaacgtggactccattactctcctctcacacctgtggggaaggtgattgggtagagttcctggtgatccctatatagctatatgctttgggtcaagcaactgtacagcttgtcttcctgaggttcaggtgggggcctgggccactgtttcctagaggcaggtattctcccactggtgtctgttactatagtttctaggccgaaactggaaccctaggatcctagggaagtaacagagcaggcaagcaatatccaaatctgtcaaggatctgggggtatgtggtaggaagccaataaggacacttacctctaactcccatagtttctaccatctagaatggtcaagatgtggcagggtgtctggttaatcttccagagaagaatggatctttgaatgtgtaagactcagagtcagctggaggcacttggaaaaataatcaatattggcatatataggacaggctaagattcccctttttcttctttgtttcctcctaaccaggaggggctacaagactcctcttggatccctgaaccccttcccttcttatccatacacccccttcatgcttttggggcctggagaccccgtacctccactggttcctatgccccctactaacaagcctagcccctacctggatgg

SEQ ID NO: 361247 - DNA, 1380 bp, Homo Sapiens
tccggaattcccgggatctctggttacggacaaatacagaagccactgccaatgagctccgccgagtagcaccggggcagggctagcgcttaaaggagccgcgacccctttgcagaccagagggtgacccggatgatggcggccggcgcggccctagccctggccttgtggctactaatgccaccagtggaggtgggaggggcggggcccccgccaatccaggacggtgagttcacgttcctgttgccggcggggaggaagcagtgtttctaccagtccgcgccggccaacgcaagcctcgagaccgaataccaggtgatcggaggtgctggactggacgtggacttcacgctggagagccctcagggcgtgctgttggtcagcgagtcccgcaaggctgatggggtacacacggtggagccaacggaggccggggactacaagctgtgctttgacaactccttcagcaccatctccgagaagctggtgttctttgaactgatctttgacagcctccaggatgacgaggaggtcgaaggatgggcagaggctgtggagcccgaggagatgctggatgttaaaatggaggacatcaaggagtccattgagaccatgcggacccggctggagcgcagcatccagatgctcacgctactgcgggccttcgaggcacgtgaccgcaacctgcaagagggcaacttggagcgggtcaacttctggtcagctgtcaacgtggcggtgctgctgctggtggctgtgctgcaggtctgcacgctcaagcgcttcttccaggacaagcgcccggtgcccacgtagcccctgccatggaaggaaagaacggggacaaaggaggggcaccagggtgtgtgcatatgagacttggggggtccctcccccaattttagtttccctgccaaaaacgggagtgtgcagtcagggcctgcggtctggccccatgagtctccttccgtcctcagcgggcagggaacacctctggcttgtagaagggacggctcagtggctgcaccgacggtcctggaaatctcacatggtgggcactgcagcgttggaacgtgagcctcggatttcctggcccctctactgtaaatgtgccttagcctaagcctcccatcctgtgttagcgttgcctggtgcggggcagggcctaacaaggaaacctgggccctccaagccaggttgaggtctggtaacagaatgccaggaagggggcctggaagaccacctgccccggcccctctcctgcaggggccccacacaggcatgagggatggcccggccaaagtctaggcagaagcctcctataacaaagggtggtgtggcctgggcattggagtcaataaattatggtcagaaaatcaa

SEQ ID NO: 361248 - DNA, 1042 bp, Homo Sapiens
  misc_feature (925)..(926): n is a, c, g, or t
tggaccggtccggaattcccgggatgcgcgccttctccagtccgcggtgccatggcccccgcccgtctgttcgcgctgctgctgctcttcgtaggcggagtcgccgagtcgatccgagagactgaggtcatcgacccccaggacctcctagaaggccgatacttctccggagccctaccagacgatgaggatgtagtggggcccgggcaggaatctgatgactttgagctgtctggctctggagatctggatgacttggaagactccatgatcggccctgaagttgtccatcccttggtgcctctagataaccatatccctgagagggcagggtctgggagccaagtccccaccgaacccaagaaactagaggagaatgaggttatccccaagagaatctcacccgttgaagagagtgaggatgtgtccaacaaggtgtcaatgtccagcactgtgcagggcagcaacatctttgagagaacggaggtcctggcagctctgattgtgggtggcatcgtgggcatcctctttgccgtcttcctgatcctactgctcatgtaccgtatgaagaagaaggatgaaggcagctatgacctgggcaagaaacccatctacaagaaagcccccaccaatgagttctacgcgtgaagcttgcttgtgggcactggcttggactttagcggggagggaagccaggggattttgaagggtggacattaggggtagggtgaggtcaacctaatactgacttgtcagtatctccagctctgattacctttgaagtgttcagaagagacattgtcttctactgttctgccaggttcttcttgagctttgggcctcagttgccctggcagaaaaatggattcaacttggcctttctgaaggcaaaaactggggattggatcactttctaaacttccgnntaggaatctaaggtccgcccctcagcccatactgaacctgcctcatccagagctctctgaagcaggggggtttaacgaaatgttttgtggagaccctggctgggaggtcctccccc

SEQ ID NO: 361249 - DNA, 1526 bp, Homo Sapiens
  misc_feature (54)..(54): n is a, c, g, or t
  misc_feature (657)..(694): n is a, c, g, or t
atgatagaagcaaatattcatcggcaccaagaagaactaagaaacattcaagancaacttcagatggtccatggtcaggggctgcagatgtttttgcaacaatcaaatcctgggttgaattttggttccgttcaactttcttctggaaattcatctaacatccagcaacttgcacctataaatatgcaaggccaagttgttcctactaaccagattcaaagtggaatgaatactggacacattggcacaactcagcacatgatacaacaacagactttacagagtacatcaactcagagtcaacaaaatgtactgagtgggcacagtcagcaaacatctctacccagtcagacacagagcactcttacagccccactgtataacactatggtgatttctcagcctgcagccggaagcatggtccagattccatctagtatgccacaaaacagcacccagagtgctgcagtaactacattcactcaggacaggcagataagattttctcaaggtcaacaacttgtgaccaaattagtgactgctcctgtagcttgtggggcagtcatggtacctagtactatgcttatgggccaggtggtgactgcatatcctacttttgctacacaacagcaacagtcacagacattgtcagtaacnnnnnnnnnnnnnnnnnnnnnnnnnnnnnnnnnnnnnntcacttcagttcagcaaccatctcaggctcagctgacccagccaccgcaacaatttttacagacttctagggtgctccatgggaatccctcaactcagactcattctctctgcggcagttcctctacaacagagcaccttccctcaggtcacatcaccagcaacattcagtcccaagcaacagcagcaactcagccggcacaagactgaaagcttgcccgacccttccaaggttcaaccacagtagcacacgtgcttcctctcttgacatcaagggaaggaaggggatggcccattaagagttactcagatgacctgaggaaaggagggaaagttccagcagtttcatgagatgcagtattgagtgttctagttcctggaattagttggcagagaaaatgctgcctagtgctacagatgtacattaaataccagccaagcagggaggtgatcataggggcacagccagttctgacagtgttttaggtgcctggatattttttgatggaaaaagaatatattgccaaatattaagaagctcagctatgaaatgacctccagggaatcagaaaggcactaatgatgttagtaacttttagtggttctgtgcctcttatcaagtgttacagaggacataccactgccatgtcaggggtttgcttacagtgatgccatgaagacagtccagtagacttggtagcgaccccttcccccaacccctctcccttttcagataatgatggaacagtaattactttcagaatgttgtgtgggttcaaattctctatgtacagatgatgtaaaaatatgtatatgtctagataaaaggagag

SEQ ID NO: 361250 - DNA, 881 bp, Homo Sapiens
  misc_feature (701)..(730): n is a, c, g, or t
  misc_feature (838)..(838): n is a, c, g, or t
agtagaaacttctgttttctgggagctgcatgtgtcggattcatctgtcatggccttcccacacaccatcttcatgatgcaagcttggaactggagagaaaggtacaattggagataaccttggcagatgaggaagtatgggaaaaaagaccttattctctgtatcaccaaagccttgcacaatgctttgtacccagaatgcccttaggtggttttgaatctatcttccccatcctgaaaactatctagattccagtctagaactactcctgggtctacggtaatcctaaactggtcaagtctgagacctcactgttggtaaattcacaaaccatcctgcttcataaaagcactgtcagcagaggcccctccattactagcaggtgctcccagctggaaaggactgccaattctcttctatccagggaggtttcaaattagttttgagtctacctctgggattgaggaaacaataccatctgaaagtagggtttttgccacttagggtttggtgtttattagctcggatttcagatgggataggaaatcccccagtaccttcagatgataagatattttagagatttttgcatgtggtatgatttctgtgcttcacacatgctcgtgcaggctaaaagttggaagggaaatgattaagaaattattaaatgcaaggactgaaaattgagaggaatctgagnnnnnnnnnnnnnnnnnnnnnnnnnnnnnnagttcccggatacatgtgcaggatgggcaggtttggtacataagtaaacgtgggccatggggggttggctgcacaaaatttttcaataaaaaggcctttcatttcaanaagaaaaagaaaacacaaagaaaatctccgacagacgcgagat

SEQ ID NO: 361251 - DNA, 1333 bp, Homo Sapiens
  misc_feature (1160)..(1160): n is a, c, g, or t
  misc_feature (1272)..(1280): n is a, c, g, or t
aattcccgggatcggctggggcggctggagagccgggagtcgctgggtgcgtggggctgcctcgccgcgtctcgccacgggctctgccagcagacagccttggcacacaggcacaagggctggagcccagagatgagagtgcccaagggagatgtgagcctggcgggctgcccgctaacctgtcgctgaagccccagaagcgggccctcaggccaggcctaccctgcctccggcccagcatgcgcctgtcggtgcggagggtgctgctggcagccggctgcgccctggtcctggtgctggcggttcagctgggacagcaggtgctagagtgccgggcggtgctggcgggcctgcggagcccccggggggccatgcggcctgagcaggaggagctggtgatggtgggcaccaaccacgtggaataccgctatggcaaggccatgccgctcatcttcgtgggtggcgtgcctcgcagtggcaccacgttgatgcgcgccatgctggacgcccaccccgaggtgcgctgcggcgaggagacccgcatcatcccgcgcgtgctggccatgcgccaggcctggtccaagtctggccgtgagaagctgcggctggatgaggcgggggtgacggatgaggtgctggacgccgccatgcaggccttcatcctggaggtgattgccaagcacggagagccggcccgcgtgctctgcaacaaggacccatttacgctcaagtcctcggtctacctgtcgcgcctgttccccaactccaagttcctgctgatggtgcgggacggccgggcctccgtgcactccatgatcacgcgcaaagtcaccattgcgggctttgacctcagcagctaccgtgactgcctcaccaagtggaacaaggccatcgaggtgatgtacgcccagtgcatggaggtaggcaaggagaagtgcctgcctgtgtactacgagcagctggtgctgcaccccaggcgctcactcaagctcatcctcgacttcctcggcatcgcctggagcgacgctgtcctccaccatgaagacctcattggcaagccccggtggtgtctccctgtcccaagatcgagccggtccccgggaccaggttcatccaagcctggtttaccctggaaagcgcttctccaaagtggaactggnccacattccccttgggggattttgggtggcggggaacatgggccccaagaattcgcccccccatgccttggcttcaacccttggggcttattaaacccctttatgccaaaannnnnnnnnaaactttttgggggaaaccccttggaccccccctttcgggtcctttcaaaaaa

SEQ ID NO: 361252 - DNA, 582 bp, Homo Sapiens
  misc_feature (64)..(64): n is a, c, g, or t
tgcttggcaatcacctccaggatgaaggcctgcatggcggcgtccagcacctcatccgtcaccnccgcctcatccagccgcagcttctcacggccagacttggaccaggcctggcgcatggccagcacgcgcgggatgatgcgggtctcctcgccgcagcgcacctcggggtgggcgtccagcatggcgcgcatcaacgtggtgccactgcgaggcacgccacccacgaagatgagcggcatggccttgccatagcggtattccacgtggttggtgcccaccatcaccagctcctcctgctcaggccgcatggccccccgggggctccgcaggcccgccagcaccgcccggcactctagcacctgctgtcccagctgaaccgccagcaccaggaccagggcgcagccggctgccagcagcaccctccgcaccgacaggcgcatgctgggccggaggcagggtaggcctggcctgagggcccgcttctggggcttcagcgacaggttagcgggcagcccgccaggctcacatcgtggcgagacgcggcaaggcagccccacgcacccagcgactcccggctct

SEQ ID NO: 361253 - DNA, 1435 bp, Homo Sapiens
  misc_feature (1380)..(1380): n is a, c, g, or t
  misc_feature (1406)..(1406): n is a, c, g, or t
cggggcgcgtcactcggagcggcgggtcccgtctcgacaggtcttctctgttggttgaaatgtctatgattttatctgcctcagtcattcgtgtcagagatggactgccactttctgcttctactgattatgaacaaagcacaggaatgcaggagtgcagaaagtattttaaaatgctttcgaggaaacttgctcaacttcctgatagatgtacactgaaaactggacattataacattaattttattagctctctgggagtgagctacatgatgttgtgcactgaaaattacccaaatgttctcgccttctctttcctggatgagcttcagaaggagttcattactacttataacatgatgaagacaaatactgctgtcagaccatactgtttcattgaatttgataacttcattcagaggaccaagcagcgatataataatcccaggtctctttcaacaaagataaatctttctgacatgcagacggaaatcaagctgaggcctccttatcaaatttccatgtgcgaactggggtcagccaatggagtcacatcagcattttctgttgactgtaaaggtgctggtaagatttcttctgctcaccagcgactggaaccagcaactctgtcagggattgtaggatttatcccttagtcttttatgtggagctctgaatttaattcgaggctttcatgctatagaaagtctcctgcagagtgatggtgatgattttcaattacatcattgcatttttccttggaacagcagcctgcctttaccagtgttatttacttgtctactacaccggctggcggaatgtcaaatctttttatgacttttggcttaatctgtctatgcaacatgtatctctatgaactgcgcaacctctggcagcttttctttcatgtgactgtgggagcatttgttacactacagatctggctaaggcaagcccagggcaaggctcccgattatgatgtctgacaccatccttcagatctattgccttggcttcagggggataaggagggaacatatccataactgcactgtgatgaagaagctgttccccacagaggagaagctctgctttctttctctccaactttccttttttaaaatcagcatgatgtgcctgtgagcatggaagagtcctctcagaagaatgttggccatgagactatcattcagaggaggaggggatttctctcttcaaggccataacagtggaagaacagtcatactgccattggaagtcttggccagcagtcctgaatccttcctgaagagttcagaaaatagatgtggtattgctctgaggaccaggcaggaggaactctagcaacctgagtttgcctttgtgaggcattagtatagnccaaataaaaagctgcagaaattggnaagtttatgttttaaataaatgactgtaa

SEQ ID NO: 361254 - DNA, 541 bp, Homo Sapiens
  misc_feature (36)..(36): n is a, c, g, or t
  misc_feature (75)..(75): n is a, c, g, or t
  misc_feature (524)..(524): n is a, c, g, or t
ctgtagtgtaaacaatggctccccacggtcacctgnaaggaaaagctgcccaggggttgccgcagttccatagangatacatgttgccataggacagattaagcccaaaagtcaaaaaagatttgacattccgcccagccggtgtagtagacaagtaaataacactggtaaaggcaggctgctgttcccaaggaaaaatgcaatgatgtaattaaaatcatcaccatcactctgcaaaagcaaaataaaagattatttttgtttccggtgggagcccatttccagaaacaatccatcaagataggatgtaacaatatttacaaacagtcaaaattgtcacacactggtatatagaaattctcaagagtcctaaaatgaaaacataaagcacattctaagacctaaagagtgtgaggtagaggtacaagtgttcctcttcattttggccacccccatcaatttcattccactcaaaagaggaaaaccactggggaaaagttctgacataacgataaaagcccctngttccaagcttgggggg

SEQ ID NO: 361255 - DNA, 1017 bp, Homo Sapiens
  misc_feature (551)..(551): n is a, c, g, or t
gattgatgctgctgtgcagatatacgaacaggtgtttgcaaaactgaacagttctgttttcccagaaggctctggcgagggggacagtgccagctcccagagttggaccagtgttctcgaagccatcacactgatgcacacgagcctgctgagattccacatgaaagtgagtgtttacccgctggcccctctgcgagaggcactctcacaggctttaaagttgtatccaggcaaccaggttctttggaggtcctatgtacagattcagaataagtcccacagtgccagcaaaaccaggagattttttgacacaatcaccaggtctgccaaacccttggagccttggttgtttgcaattgaagctgagaaactgaggaagagactggtggaaactgtccagaggttagacggtagagagatccacgccacaattcctgagaccggcttaatgcatcggatccaagccctgtttgaaaatgccatgcgcagcgacagtggcagccagtgccccttgctgtggaggatgtatttgaactttctggtttccttangaaataaagaaagaagcaaaggtgtattctacaaagcacttcagaattccccttgggcaaaggtgttgtacccggacgcccgtgaagtatttcccccgatgagatgcaggagatcctggacctgatgactgagaaggagctccgggtgcgcctgccgctggaggagctggagctgctgctggaggattagagagcagcgggaaaacgggctgtgcctgcgaggccaagttgcccaccctgcggagcctaggaggcgcgagcagagaacgtgtgtgttaggagaactcggcttttgaaatgttctttctcgatagtaataatgtgggctgccagcctctcacatcttgcacactttttgggtgtgtaaatgacacaaaagttatttacatattatatatgtgaatatgtgtatatatgtacatagccagagagtcatgccacgtggtcattaaaccgatgatgattg

SEQ ID NO: 361256 - DNA, 1328 bp, Homo Sapiens
  misc_feature (16)..(16): n is a, c, g, or t
  misc_feature (291)..(292): n is a, c, g, or t
acgatgaaggtgcccncctgtgtattcttctatgaacgccctcctccctccaaccctgggcattggccctcactatttccattctagaaaaggaaaccgagctgcagagcagagggggaactggcccagtgccgtcgagctggggcaggtggctggagttgaggactaggaactggctcccagagcgtctgaatcctctctcttgcctgcccctacctcatggcttagctcccccactctcaggttgcacctatgagagatgctagagcctccccatccaggcccaacctnngccagaccatgtcctaggcagcccctcacaagatggttttcttcacatggtctcgggggcggtctggtaagagaggacgatgactgtctgagcccagaaagatgaggtcacccgaaagggaggtcgtcttgtttgcaggaaagaggtggtacccgggggggtgatgacctgtgcacatggcttgagctttccttgctgccaggcactcgtggcatctcttgctcaccaggtagatgagctccacgaggttgagcaggatgcagatggcagctgtggccaccatgaagagggtgaaaatgttcttctctgagggcttggagatgaagcagtccactatattgggacatggatctgcgtggcacttgaccacaggagggaggatatatttggggtagaatgagtggaacacatagagaaaggcgatgtccacgctcgccttgaacactaggctgcagacatatgtccaccagagcccaccccgcttcttgccggggttcaggtagaggcgcccactgttctccccatgggcttctcggtgcctcttctcctgaacctcccggtaggccacgtgcatgaccacgagcagtgaggggcatgtcaccaggataagctgcagggcccagaggcgcacatgggacacagggaagaactcatcaaagcagacgttggagcagccgggctggcgagtattgcagtcgaagtccttgtggtcatcactccacacacgctcggccgtcaccaggtacaccagcacgcggaagatgaagaccagagacagccagatgcgcccaaaggctgtggagtacttgttgaccccactcaggagtccctcaaagatactccagttcatggtggacccacgcgtcagctgctactgagtgactactcctcagggctctcctggctcccagcagccggcaataggactcagcaagcagcttgaatttcatatccagaagcggggaaggttttcggggaagcccgcttgaagcatgtttccaggacagagcctcgtgccggaatcgccacccaggcc

SEQ ID NO: 361257 - DNA, 1179 bp, Homo Sapiens
  misc_feature (190)..(198): n is a, c, g, or t
  misc_feature (782)..(782): n is a, c, g, or t
  misc_feature (848)..(848): n is a, c, g, or t
  misc_feature (965)..(1014): n is a, c, g, or t
  misc_feature (1080)..(1080): n is a, c, g, or t
ggcctgggtggcgcccttctgcactctacctgacacagctgcagcctgcaattcactcccactgcctgggattgcactggatccgtgtgctcagaacaaggtgaacgcccagctgcagccatgaagatctgtagcctcaccctgctctccttcctcctactggctgctcaggtgctcctggtggaggggnnnnnnnnngtgaagaatggacttcacagcaaagtggtctcagaacaaaaggacactctgggcaacacccagattaagcagaaaagcaggcccgggaacaaaggcaagtttgtcaccaaagaccaagccaactgcagatgggctgctactgagcaggaggagggcatctctctcaaggttgagtgcactcaattggaccatgaattttcctgtgtctttgctggcaatccaacctcatgcctaaagctcaaggatgagagagtctattggaaacaagttgcccggaatctgcgctcacagaaagacatctgtagatattccaagacagctgtgaaaaccagagtgtgcagaaaggattttccagaatccagtcttaagctagtcagctccactctatttgggaacacaaagcccaggaaggagaaaacagagatgtcccccagggagcacatcaagggcaaagagaccaccccctctagcctagcagtgacccagaccatggccaccaaagctcccgagtgtgtggaggacccagatatggcaaaccagaggaagactgccctggagttctgtggagagaacttggagctctnctctgcacattctttcctcagcatagtgcaggacacgtcatgctaatgaggtcaaaagagaacggnttcccttagagatgtcatgtcgtaaagtcccctctgtatacttaaagctctctacagtccccccaaaatatgaacttttgtgcctagtggagtgcaaccgaaatattttaaacaagnnnnnnnnnnnnnnnnnnnnnnnnnnnnnnnnnnnnnnnnnnnnnnnnnnccctggatgcgatgtttcaaaaggctggtttcctgcagccatggattttccatgggcccacaaaanctattgtggtttgaccaacccaaaaaacctttggaacttggaatggaccccaaaagtggtataaattttacaggggcaaacaaaacttttcctggtgtg

SEQ ID NO: 361258 - DNA, 2007 bp, Homo Sapiens
  misc_feature (1264)..(1360): n is a, c, g, or t
  misc_feature (1500)..(1508): n is a, c, g, or t
  misc_feature (1782)..(1791): n is a, c, g, or t
aggatgttgacaacattgctgccgatactgctgctgtctggctgggccttttgtagccaagacgcctcagatggcctccaaagacttcatatgctccagatctcctacttccgcgacccctatcacgtgtggtaccagggcaacgcgtcgctggggggacacctaacgcacgtgctggaaggcccagacaccaacaccacgatcattcagctgcagcccttgcaggagcccgagagctgggcgcgcacgcagagtggcctgcagtcctacctgctccagttccacggcctcgtgcgcctggtgcaccaggagcggaccttggcctttcctctgaccatccgctgcttcctgggctgtgagctgcctcccgagggctctagagcccatgtcttcttcaaagtggctgtgaatgggagctcctttgtgagtttccggccggagagagccttgtggcaggcagacacccaggtcacctccggagtggtcaccttcaccctgcagcagctcaatgcctacaaccgcactcggtatgaactgcgggaattcctggaggacacctgtgtgcagtatgtgcagaaacatatttccgcggaaaacacgaaagggagccaaacaagccgctcctacacttcgctggtcctgggcgtcctggtgggcagtttcatcattgctggtgtggctgtaggcatcttcctgtgcacaggtggacggcgatgttaattactctccagccccgtcagaaggggctggattgatggaggctggcaagggaaagtttcagctcactgtgaagccagactccccaactgaaacaccagaaggtttggagtgacagctcctttcttctcccacatctgcccactgaagatttgagggaggggagatggagaggagaggtggacaaagtacttggtttgctaagaacctaagaacgtgtatgctttgctgaattagtctgataagtgaatgtttatctatctttgtggaaaacagataatggagttggggcaggaagcctatggcccatcctccaaagacagacagaatcacctgaggcgttcaaaagatataaccaaataaacaagtcatccacaatcaaaatacaacattcaatacttccaggtgtgtcagacttgggatgggacgctgatataatagggtagaaagaagtaacacgaagaagtggtggaaatgtaaaatccaagtcatatggcagtgatcaattattaatcaattaataatattaataaatttcttatatttnnnnnnnnnnnnnnnnnnnnnnnnnnnnnnnnnnnnnnnnnnnnnnnnnnnnnnnnnnnnnnnnnnnnnnnnnnnnnnnnnnnnnnnnnnnnnnnnnttttgggggccccctccgccctcaaaaaatttttcaaacccttcttttgcggcccgggcccataagggaaggaaacatggtcccaatttttttccccggaaacccgggacccaaaataaggggttggggcctttcccccnnnnnnnnnccccccggcgcggcaaacgagggccttttggaaaaaaattcccagaggggggtttcccgggggccatttcccggggatcctaaaccgaccgggggatcccccaggcgcagacctccgaaaatacaaaaattacgcccgcccgccccagcgtgggaaaatttatatgtgcagcccaacgcgggggaaaacgtccccttaaagcgcattcccggccgcccgccgtgggtaaagttttattttcacgaagccccccgattgagttgaaaccttcaannnnnnnnnnggggcggatatccacaccccccttgtcgcccccctcgcgccaatataatttctctttttccccgcggcgaaaaaccccgtggtaacaacaacacgatttttcccctatattgcgcgccgcgctatgaactccaacagagggggcgaatacatccccccccgtgggagttggtggccggaaccacactataaactattttcttcccccccgccgccg

SEQ ID NO: 361259 - DNA, 943 bp, Homo Sapiens
agactccgcccctcccagacggtcctcacttctcttttccctagactgcagccagcggagcccgcagccggcccgagccaggaacccaggtccggagcctcaacttcaggatgttgacaacattgctgccgatactgctgctgtctggctgggccttttgtagccaagacgcctcagatggcctccaaagacttcatatgctccagatctcctacttccgcgacccctatcacgtgtggtaccagggcaacgcgtcgctggggggacacctaacgcacgtgctggaaggcccagacaccaacaccacgatcattcagctgcagcccttgcaggagcccgagagctgggcgcgcacgcagagtggcctgcagtcctacctgctccagttccacggcctcgtgcgcctggtgcaccaggagcggaccttggcctttcctctgaccatccgctgcttcctgggctgtgagctgcctcccgagggctctagagcccatgtcttcttcgaagtggctgtgaatgggagctcctttgtgagtttccggccggagagagccttgtggcaggcagacacccaggtcacctccggagtggtcaccttcaccctgcagcagctcaatgcctacaaccgcactcggtatgaactgcgggaattcctggaggacacctgtgtgcagtatgtgcagaaacatatttccgcggaaaacacgaaagggagccaaacaagccgctcctacacttcgctggtcctgggcgtcctggtgggcaggtttcatcattgctggtgtgggctgtaggcatcttcctgtgcacaggtgggacggcgatgttaattactctccagcccccctcagaaaggggctggaattgatggaaggctgggcaaaggggaaagtttcagcctcactggggaagccaagaactcccccaactgaaaacaccaaga

SEQ ID NO: 361260 - DNA, 1385 bp, Homo Sapiens
  misc_feature (1209)..(1209): n is a, c, g, or t
  misc_feature (1215)..(1215): n is a, c, g, or t
gagcgggccgaggactccagcgtgcccaggtctggcatcctgcacttgctgccctctgacacctgggaagatggccggcccgtggaccttcacccttctctgtggtttgctggcagccaccttgatccaagccaccctcagtcccactgcagttctcatcctcggcccaaaagtcatcaaagaaaagctgacacaggagctgaaggaccacaacgccaccagcatcctgcagcagctgccgctgctcagtgccatgcgggaaaagccagccggaggcatccctgtgctgggcagcctggtgaacaccgtcctgaagcacatcatctggctgaaggtcatcacagctaacatcctccagctgcaggtgaagccctcggccaatgaccaggagctgctagtcaagatccccctggacatggtggctggattcaacacgcccctggtcaagaccatcgtggagttccacatgacgactgaggcccaagccaccatccgcatggacaccagtgcaagtggccccacccgcctggtcctcagtgactgtgccaccagccatgggagcctgcgcatccaactgctgcataagctctccttcctggtgaacgccttagctaagcaggtcatgaacctcctagtgccatccctgcccaatctagtgaaaaaccagctgtgtcccgtgatcgaggcttccttcaatggcatgtatgcagacctcctgcagctggtgaaggtgcccatttccctcagcattgaccgtctggaagtttgaccttctgtatcctgccatcaagggtgacaccattcagctctacctgggggccaagttgtgggactcacagggaaaggtgaccaagtggttcaataactctgcagcttccctgacaatgcccaccctggacaacatcccgttcagcctcatcgtgagtcaggacgtggtgaaagctgcagtggctgctgtgctctctccagaagaattcatggtcctgttggactctgtgcctcctgagagtgcccatcggctgaagtcaagcatcgggctgatcacatgaaaaggctgcagaataacctgggatctacccagatcgtgaagatcctaactcaggacactcccgagttttttatagaccaaggccatgccaaggtggcccaactgatcgtgctggaagtgtttccctccagtgaagccctccgccctttgttcaccctggngcatcngaagcccagcttcgggaagctcagttttttacaccaaaaggtggaccaactttatacttcaactttggaaataaacattcagcctctggaatcggaatcccagcctgaatgaaactccccgggggaaatggggccggggttcccacaccccggaagggtttctgaaaaaa

SEQ ID NO: 361261 - DNA, 2261 bp, Homo Sapiens
accgcagccccggagcccgggccagggtccacctgtccccgcagcgccggctcgcgccctcctgccgcagccaccgagccgccgtctagcgccccgacctcgccaccatgagagccctgctggcgcgcctgcttctctgcgtcctggtcgtgagcgactccaaaggcagcaatgaacttcatcaagttccatcgaactgtgactgtctaaatggaggaacatgtgtgtccaacaagtacttctccaacattcactggtgcaactgcccaaagaaattcggagggcagcactgtgaaatagataagtcaaaaacctgctatgaggggaatggtcacttttaccgaggaaaggccagcactgacaccatgggccggccctgcctgccctggaactctgccactgtccttcagcaaacgtaccatgcccacagatctgatgctcttcagctgggcctggggaaacataattactgcaggaacccagacaaccggaggcgaccctggtgctatgtgcaggtgggcctaaagctgcttgtccaagagtgcatggtgcatgactgcgcagatggaaaaaagccctcctctcctccagaagaattaaaatttcagtgtggccaaaagactctgaggccccgctttaagattattgagggagaattcaccaccatcgagaaccagccctggtttgcggccatctacaagaggcaccgggggggctctgtcacctacgtgtgtggaggcagcctcatcagcccttgctgggtgatcagcgccacacactgcttcattgattacccaaagaaggaggactacatcgtctacctgggtcgctcaaggcttaactccaacacgcaaggggagatgaagtttgaggtggaaaacctcatcctacacaaggactacagcgctgacacgcttgctcaccacaacgacattgccttgctgaagatccgttccaaggagggcaggtgtgcgcagccatcccggactatacagaccatctgcctgccctcgatgtataacgatccccagtttggcacaagctggtgagatcactgggctttggaaaaagagaattctaccgactatctctatccggagcagctgaaaatgactgttgtgaagctgatttcccaccgggagtgtcagcagccccactactacggctctgaagtcaccaccaaaatgctgtgtgctgctgacccacagtggaaaacagattcctgccagggagactcagggggacccctcgtctgttccctccaaggccgcatgactttgactggaattgtgagctggggccgtggatgtgccctgaaggacaagccaggcgtctacacgagagtctcacacttcttaccctggatccgcagtcacaccaaggaagagaatggcctggccctctgagggtccccagggaggaaacgggcaccacccgctttcttgctggttgtcatttttgcagtagagtcatctccatcagctgtaagaagagactgggaagataggctctgcacagatggatttgcctgtgccacccaccagggcgaacgacaatagctttaccctcaggcataggcctgggtgctggctgcccagacccctctggccaggatgggaggggtggtcctgactcaacatgttactgaccagcaacttgtctttttctggactgaagcctgcaggagttaaaaagggcagggcatctcctgtgcatgggtgaagggagagccagctcccccgacggtgggcatttgtgaggcccatggttgagaaatgaataatttcccaattaggaagtgtaacagctgaagtctcttgagggagcttagccaatgtgggagcagcggtttggggagcagagacactaacgacttcagggcagggctctgatattccatgaatgtatcaggaaatatatatgtgtggtgtatgtttgcacacttgtgtgtgggctgtgagtgtaagtgtgagtaagagctggtgtctgattgttaagtctaaatatttccttaaactgtgtggactgtgatgccacacagagtggtctttctggagaggttataggtcactcctggggcctcttgggtcccccacgtgacagtgcctgggaatgtattattctgcagcatgacctgtgaccagcactgtctcagtttcactttcacatagatgtccctttcttggccagttatcccttccttttagcctagttcatccaatcctcactgggtggggtgaggaccactcctgtacactgaa

SEQ ID NO: 361262 - DNA, 1546 bp, Homo Sapiens
  misc_feature (1055)..(1055): n is a, c, g, or t
  misc_feature (1084)..(1084): n is a, c, g, or t
atagcactacaaagccaaaaatccacaaaaaaaagctggtaccggtccggaattcccgggatcgctcacgaccaggacgcagagaagcaggcgcgccagcagggctctcatggtggcgaggtcggggcgctagacggcggctctgcaaaggaaggagaagtcaggccaagaggcggaggaacgggaaggcaggccaggcgggcgactgcagcgcaggggagatgcccgcggtgaccaggctccccagctgtctctctcctctctgggctccggactccgggcagcctggatcggcacccgcgggggacgcccgggacggggcgccttgactccgtgcagccgccggggagcccagggagcccgggcagcccagggcgggggaggcagacgctcgggagctggggccgccgcgcatccggcccggggatctcaggaccgcggcactcaccggtggctgcggcacgagggcgcgagccggcgctgcggggacaggtggaccctggcccgggctccggggctgcggtctccgcactgtgctgcgacccgcggcgcctgctctatattcagggcccgacccggcgccgaccctccctctcccgaccggatacctcccctgtctagcaggcgcctcaacggacccggcacccgacgttgcttccgacagagcctcgcaagaaggtgtttgggggggaagcgccgaatcttcaggcgcgaagggggaccactgactggcggtgttgggaaccgtagcgaagatccaaggaaaggcatttgacaaaaaatttctcccacggagagcaattcaccacccgcagagaggcacgacgcagggagcgcgcgggaagaggccacgagggagagcgcaccgcgattgagacaaaagaggagaagggacgcctcccacccctgagagaatatgatgggaccaattgagaaaaagggacaagaggagacctacacctatgcccataacaaggacggggggcgcagcgagccgcccaaagccgacggggttggggcgaattaatggtaaggaggaaccctgggctttgttnaagcggaaggtgtaggtagcagattcacnaacggagaccgacccctagtagtacacattggtaccccggagcgggaagtggggggaacgcggaatattccaacggggggtcgtcaggaaggggacaaaggccggcgtggcagacccacttttgtgcgggcaggggaggaagtacgaaacgcacttggtgaagaagcaacacaaccagatgagggaactcaccgccgagccgcagcgattgttgggcagaagggcttgcaatgagccgaagctcatagggaggacctctcaaaaaggcagctagggggccgcacagatagccatttatatacaccgcggcgaactatgatgaacgagtggtgggggcgggaggacggagtacttgtgaaaacccctataatatgctgcgaccacgcgcactagcgagagaaacgaaaggaaccgaggatgcagcgttatgagctaaacaaaggaagaggccacgacctatcc

SEQ ID NO: 361263 - DNA, 1697 bp, Homo Sapiens
  misc_feature (1326)..(1326): n is a, c, g, or t
  misc_feature (1370)..(1371): n is a, c, g, or t
  misc_feature (1380)..(1380): n is a, c, g, or t
  misc_feature (1448)..(1448): n is a, c, g, or t
  misc_feature (1570)..(1590): n is a, c, g, or t
ggaccggtccggaattcccgggattgggcagcactcggttccgtgcaactttcaagtgagttgcgaactccgccctgtaggccggtgctggtggcccggcgcgctggaaccgcggcgacccgctccagcgcgggaccagcagcaagggccgagcgccaggttctccgcggcagaaagggcgggtgggagctgtaactgccccggccgcggggcgcgcccgctcccaagtcggcttcctccccgccggggccgctttgcctcgggtctccccattctccaggtcccctgaactgcacagtcggaggccgtgggcggcgggctctgcctccgccgagggacagccggatcgcccctctgcttcccgcaactgccctgatcaccccccgtcccagcccttgagtgaacgtccttctgagcggcttcctggggtcctccccacgtcccaaaggccggcaagatggtgtcctggatgatctgtcgcctggtggtgctggtgtttgggatgctgtgtccagcttatgcttcctataaggctgtgaagaccaagaacattcgtgaatatgtgcggtggatgatgtactggattgtttttgcactcttcatggcagcagagatcgttacagacatttttatctcctggttccctttctactatgagatcaagatggccttcgtgctgtggctgctctcaccctacaccaagggcgccagcctgctttaccgcaagtttgtccacccgtccctgtcccgccatgagaaggagatcgacgcgtacatcgtgcaggccaaggagcgcagctacgagaccgtgctcagcttcgggaagcggggcctcaacattgccgcctccgctgctgtgcaggctgccaccaagagtcagggggcgctggccggcaggctgcggagcttctccatgcaggacctgcgctccatctctgacgcacctgcccctgcctaccatgaccccctctacctggaggaccaggtgtcccaccggaggccacccattgggtaccgggccgggggcctgcaggacagcgacaccgaggatgagtgttggtcagatactgaggcagtcccccgggcgccagcccggccccgagagaagcccctaatccgcagccagagcctgcgtgtggtcaagaggaagccaccggtgcgggagggcacctcgcgctccctgaaggttcgggacgaggaaaaagactgtgcccctcagacgtggacagctagggtctgctgcatctgcccccctttcttacctcgtgcccctgcaggggctccaagggctatttgggagggaactttggggctgcacatctgggncctgcctgcaccagctgcctgggccccaccctcctgactcctgnntggaagggntaaagggcccgggaagcaaattgctggccaagggcacatgtaaccaaagcagctggggcccccggggntctcaatttatttgccttggtctggccttccccctttccccgggtgtgtggggacaaaaaacccctccctggaaccctcggaaacccttcccttaaacccctggcaaatgaaaaccaaactnnnnnnnnnnnnnnnnnnnnntaaattccccctccggggcccttaaaaaaatattttgataaacccttttaaaaaaggcgcctggaaaaattgtgcccccccttgttaccattttcccccccagtctc

SEQ ID NO: 361264 - DNA, 936 bp, Homo Sapiens
gccgatggaaacctgctggaaggatgggggactaggtggagcccagttggggcttggtacgctgggcgtgtgtcggtgggtgagagtccagggagcctgaagatccagcccaggaggcccctagggaccgggaaggcttgcctggtacgcggcagtggctgccagcggctgccggagcgcctgaaatggtgtagctctgggccgtgggtggcggtgggtaggaggtcgggctgaggccggccgctgtgctaggcgtctggccggacggctccgatgggaccgacatcaactccctgtgccgctcccacaacgagcgcgtggtggcggtggccgacgacttctgcaaagtgcatctcttccagtacccgtgcgctcgtgccaaggcgacgagccgcacgcaacgagggcgtgggagccggtggccaacgactgctgcatgcacgtcttccagtacccgtgcgctcgtgccaaggcgccgagccgcatgtacgggggccacggcagccacgtgaccagcgtccgattcacgcacgacgactcgcacctcgtctcgctgggcggcaaggacgccagcatcttccagtggcgagtgctgggcgctgggggcgcggggccggcgcccgccacgccctctcgaaccccctccctgtcccccgcctcctccctcgacgtttgatcgctgcctggcgggaccgactggcccggcggcgtggccccgccccgccctgcccttccctgccctaatcccccacgactaggggccgactctttcctggactgacttcgagacattcccgatcgcgcattttcctggagggcgcgaacggcgcccctgcacacactgtttagacccgctggctgagccgggcagccccagcctaggccttgactcccgctgcctgctgaggggcaataaaccagaaccaaagtcgcaaa

SEQ ID NO: 361265 - DNA, 843 bp, Homo Sapiens
  misc_feature (721)..(721): n is a, c, g, or t
  misc_feature (807)..(807): n is a, c, g, or t
tgagattactgcttgagagcaaagaaaagaagatcagggaattcattcaagactttcagaaactcaccgcagctgacgataaaactgctcaggtagaagattttctgcagtttctttatggtgcaatggcccaggatgtcatatggcaaaacgcgagtgaagaacagcttcaagatgcacagctggccattgagcgaagcgtgatgaaccggattttcaagctcgccttctaccctaatcaagatggggacatacttcgcgaacagggtcttcatgaacatatccagagattgtctaaagtagtgactgcaaatcacagagctccttcagataccaaagggttatcttcgagaagcaccatggccatctgcacaatcagaaatcaggacaataagtgcttataaaaccccccgggacaaagtgcagtgcatcctgagaatgtgctctacgattatgaacctcctgagcctggccaatgaggactctgtccctggagcggatgactttgttcctgtgttgggtgtttgtgttgataaaggcaaatccaccctgtttgctgtctactgtgcagtatatcagtagcttttatgctagctgtctgtctggagagggagtcctattgggtggatgcagttcacagcagcagtagaattcattaaaaccatcgaatgaccgaaagtgaccaagaccaaaggcccaccaaggcagcagactgttaatncagacaaacagaatctctgaaaaaaggtgcatcagcctgcttttgaaggctgaaaaaattggttttggtaatgatactgccacagncatcaaagcaatttttaaaagccaggatcttttact

SEQ ID NO: 361266 - DNA, 1015 bp, Homo Sapiens
cgctacgtccaggccaagctgactgtgcacgaccgctccctcaaagtggccacggtgatcgagagcctggagatggagatggaactgctgtgcctgacgggcgtggaggaccagctgcaggcagatgtgcggcccacgctggagaccctgaggaatgctggcatcaaggtttggatgctgacaggggacaagctggagacagctacgtgcacagcgaagaatgcacatctggtgaccagaaaccaagacatccacgtttttcggctggtgaccaaccgcggggaggctcacctcgagctgaacgccttccgcaggaagcatgattgtgccctggtcatctcgggagactccctggaggtttgcctcaagtactatgagtacgagttcatggagctggcctgccagtgcccggccgtagtctgctgccgatgtgcccccacccagaaggcccagatcgtgcgcctgcttcaggagcgcacgggcaagctcacctgtgcagtaggggacggaggcaatgacgtcagcatgattcaggaatctgactgcggcgtgggagtggaaggaaaggaaggaaaacaggcttcgttggctgcagacttctccatcactcaatttaagcatcttggccggttgcttatggtgcatggccggaacagctacaagcggtcagccgccctcagccagttcgtgattcacaggagcctctgtatcagcaccatgcaggctgtcttttcctccgtgttttactttgcctccgtccctctctatcaaggattcctcatcattgggtactccacaatttacaccatgtttcctgtgttttctctggtcctggacaaagatgtcaaatcggaagttgccatgctgtatcctgagctctacgaggatcttctcaagggacggccgttgtcctacaagacattcttaatatgggttttgattagcatctatcaagggagcaccatcatgtacggcgctgatgctgtatgagtcggagttcgcgcacatctcatcg

SEQ ID NO: 361267 - DNA, 1395 bp, Homo Sapiens
  misc_feature (425)..(426): n is a, c, g, or t
  misc_feature (1123)..(1164): n is a, c, g, or t
ctcccaagagtccccaatatggtccccccggggggtttggccacaaaaaaaggcctgtggcacaaattggcccccacccccttggggggccccaaaatttttcccgggggatggggggaaacctcttatgcgttttttccccgcggggggggcccttaaagagggtaaggggccacccccctgttagcggggcccccaaaggtggaccatttaagccccccgggagggcccaacaagggatgcgcgagggcgggctatggcggttgccggcccggaatcgcccctcctcccgtggatcgtcattccctcccttctatcatgaaggaggaggttgtatgtaaatttttttcttccctcctggtccatcggagtcatcctcccccaagatgcacgtttcccacacagcccttggccgcgtgcatagnngaacgccgtaggaggaagacatacgccataccaccccgatcatggccagagaggagaagacgccacacctgttctgccagaaggctgtgtagccagtctccgggtaccaagcagccacacacatccatttgaactcgtcaaactccaacggatgaccaaccaaacaggggtgacaggcagccgatgagcgagtgaagccagattgtagaccaagtgccatcacagcccggttccctgtgatcttcatggggtacaccatggggtacaggacagcatagtagcggtcgatggcaatgaccccgagggttagcatgctggcagagctgatcagcaggtagaggagggcagagaagttgcaccacactacaccaaagatccattccctgcggatggagctcgtcaccacaaaaggcagcaccaacacggacagcaggaagttggacagagtcaggctgaagacgaacttgttgctgagggtgaggaggtaggacttcttgtacaaggtgaccacgatgaccaggtttcccaggcagacaaaaatggtgatgacaatgatggcgatgaactgggtgatgatgacgcccccttcgccaccctcctcctcagtgagattactcagctccttcctgcagctgagggaggagttgaggctcatggtcagtgcacctcggcgtggggtgggcagagcatgctggannnnnnnnnnnnnnnnnnnnnnnnnnnnnnnnnnnnnnnnnntgcttgaacccaggagccgagatcgcgccatctgcctaagcaacagggtgagactctatgtttccaggcttggtgaccatattgagcacactgaaaaagacctggtcctcacggattccagccgaggggcgtgaccgcttctccccacaccctttgccctgagcgggacgtggagtctcttggccccagggggcgcggcccgcatcggcagagtcccgggcacgcacctac

SEQ ID NO: 361268 - DNA, 900 bp, Homo Sapiens
aggctggaccggtccggattcccgggatccagtggtggaacaggtgtggagctgatgagtctgccctaccgcctggtgtttgctgtggcctcggaggattccgtgcttctgtatgacacccagcagtccttcccttttggttacgtgtctaatatacattaccacaccctcagtgacatttcatggtccagcgatggtgccttcctggccatttcttccacggacggttactgctcatttgtgacatttgagaaagatgaacttggaattcctttgaaagagaagccagttgtgaacatgagaactcctgatacagcaaagaaaaccaagagtcagacacatcgagggtcttcgccaggacccagaccggtagagggaaccccggccagcagaacccaagaccccagcagccccggcacgactccccctcaggccagacaggccccagccccaacagtcatcagggaccctccctccatcactcctgctgtcaaaagccccttgccggggccttcggaggagaagaccctgcagcccagtagtcaaaacacaaaagcccacccatcccggagggtcactctgaacacactgcaagcctggagcaagacaacaccccggagaataaacttaacacccttaaagacggacactccaccaagttctgtaccaaccagtgtgatttccaccccttctacagaagaaattcagtcagagacgcctggagacgctcagggcagtcccccagagctaaagcggcccagactcgatgaaaacaaaggaggcacggaaagtctggacccttgatgggacctcggcttctgctcgaagcctaccaggctccccggtgtgtgcagggagacggtaaaacctggaagtgcctgaagacagggcttccatgga

SEQ ID NO: 361269 - DNA, 1218 bp, Homo Sapiens
  misc_feature (12)..(12): n is a, c, g, or t
  misc_feature (60)..(60): n is a, c, g, or t
  misc_feature (76)..(76): n is a, c, g, or t
  misc_feature (93)..(93): n is a, c, g, or t
  misc_feature (100)..(100): n is a, c, g, or t
aagttcaccttnctcaatgtcacaaatgagcagtaaccgtccgtggaaagaaatggcccngaagggcacccatcgnctggaccttcgtccccnaaaacgnggaaaagttaacagaccttaccaaaactctcacatctacttagaagagggaagttcgagcaaaaatccacaagcttgtttgaaggcaaaaacccgggaaaagatacaacatgaaatgtcactgagggtgtggtaatgtatattagacacgtaaccaaaagggaaggactgctgggtgtcatacagaagcacggaatcctccgaggccacagcaaacaccaggcggtagggcagactcatcagctccacacctggcgtgagaagcaaagatccgtcgggagtgaaactcagtctacggaagaaagacttcatgctgtcgtcgtgaaacatccggtagcttcttgcctctccttcagcccctattccagacagcatcttcgaaacattgaaagccacacgcttcttctgtatactgtatactcgcagcaccctgtcacagctcagagtagcaacatattgacccaaagggtcccaggttactccttggacataacttttatgttcattaaaaattgatatcttttgtcctttgctgacatcccatatgatggctgtgttatccacagaggcagaagccattaaattcccatcagttgcccagcaaatatcatacacatcttctaagtggccccgcagagtcttcacaaccgtccagttctccttgttcagctgggcctcgtcctcatcctgaaaagcgatctgctccggctccttgttatcattcaccttccacaataggatgacagcatcatctcctcccgatgctaaaatttccccagttggagaaaaacgcacaacattgacggctttggtatgacgagcaagattggacaaaaattccacgatggcttttccatctggtcccttttctaccttccagatcctgacattggtgtccacgccggcagacgccagtctgtggatcctcccagccgtcccatgctggaagtccaggctgtacacgggctccttgttgtgccaggctatttcacaagtgatgactttcatcctcctgagtctcgaaggggaaaaacgtttctcgggcaccgttctacttcttcaagacaggagaaagctgcaaaatgctggagggacccggacagtcagaggcaccgtcac

SEQ ID NO: 361270 - DNA, 485 bp, Homo Sapiens
agtctggacccttgatgggacctcggcttctgctcgaagcctaccaggctcccggtgtgtgcagggagacggtaaagctggaggtgcctgagaccagggcttccatggagcgggacacactgtaaaagggatttcctataacagaagtgaccatgtgtacctgatttttcctcccagaaatatggatgctgttgtattcagtatccatttttaacttgggacatgaacgttttaacgtagtaaatcctctttttgatgagtttctgaaactggagcggttcaacgttatccagtgtgaaaatcagtgagtcctccctggcatcctcgtgaaagtgcacacacttcatggagggactccttttcaataagaattaggaagatgagaaagtaatttgagattttactctgtcgaattttagagtatttgaagtgattgttagatttcacttctaaggagttgattgattaaactttggaaggtaaaa

SEQ ID NO: 361271 - DNA, 1497 bp, Homo Sapiens
  misc_feature (18)..(18): n is a, c, g, or t
tcccaccccacccctccnacctcccatacccccactcggctggcaccggtccggaattcttgggatggaggaggaaggctggtctccttttgagctttgaagattacgaggagaaaaacaggagcttctggaatatctatttcaaataaatttggtgtatttaagaatctggattgtttataatttgggcatttgggttggtcctgagaaaagggtgccagcgatgcctggatcgcctgtggaagtgaagatacagtccagatcctcacctcccaccatgccacccctcccaccaataaatcctggaggaccgaggccagtgtccttcactcctactgcattaagcaatggcatcaaccattctcctcctaccctgaatggtgccccatcaccgccacagagattcagcaatggtcctgcctcctccacatcatctgcactcacaaatcagcaattgccagccacttgtggtgctcgacaactcagcaagttgaaacgctttcttaccactctgcaacagtttggcaatgacatctcccctgagattggggagaaggtgcggactcttgttcttgcactggtgaactcaacagtgacaattgagacattacaaccacagcaatcaaattctctctcttttataagcataggcgacgaccagtgcggttccatcaacgtaaggacaccacagctcatccgctcgcgtctctgcgctggagatcttctgagtttccgcgccccggcaataccaaccctgacgaggcactcggcgaccccacgcccccggagtgcgcacagacaacctcgacgcacatgcttcgttcgcacagactctgcgatgggctccatcccagcgtcccgcatcacatcccctcctagcgcccgcccctgtccgcgcaccccctaagcaccaccactctccaacacacccatccccgtgggagacacagctcggatacgaagtatgcgcaacatgtggcgcccccgccgacctcccctgcgtctgccccgatcgttaatcagcgcacgctgcagccacccctgacaaacctaaccatcaccaccgccgcgactcctccacatgagcccgcacatgactacgcaccccacggttcctgatcctccgcgccgtaccactccagttccccgcattaccgctcggctccatatctcgctcgaactgccgccccctcacaagtgcgcctaggatgcgcagcttctccatcaaaggaagttcgtcgggacgcagcgacctgcgcggcttcaaccgcacccgagagtccacgtcatgtttatcacgaccttggacagtgcacaaagcgtgcggtccgctcgtacgagcgcacggcgcgaactcacatccctcgcgctatgtcggttttcgccctaacccgtatttctgttccctgcgtgaaacaagatcttgcgctcacagtcaggagacgcagcatatctcctatgctcactgacatcagcgatcctatctccgatctcacc

SEQ ID NO: 361272 - DNA, 1539 bp, Homo Sapiens
  misc_feature (1070)..(1070): n is a, c, g, or t
  misc_feature (1346)..(1346): n is a, c, g, or t
ggggagagctgtggttgccggaagttgagcggcggcaagaaataatggcggcagctacgggggatcctggactctctaaactgcagtttgccccttttagtagtgccttggatgttgggttttggcatgagttgacccagaagaagctgaacgagtatcggctggatgaagctcccaaggacattaagggttattactacaatggtgactctgctgggctgccagctcgcttaacattggagttcagtgcttttgacatgagtgctcccaccccagcccgttgctgcccagctattggaacactgtataacaccaacacactcgagtctttcaagactgcagataagaagctccttttggaacaagcagcaaatgagatatgggaatccataaaatcaggcactgctcttgaaaaccctgtactcctcaacaagttcctcctcttgacatttgcagatctaaagaagtaccacttctactattggttttgctatcctgccctctgtcttccagagagtttacctctcattcaggggccagtgggtttggatcaaaggttttcactaaaacagattgaagcactagagtgtgcatatgataatctttgtcaaacagaaggagtcacagctcttccttacttcttaatcaagtatgatgagaacatggtgctggtttccttgcttaaacactacagtgatttcttccaaggtcaaaggacgaagataacaattggtgtatatgatccctgtaacttagcccagtaccctgggatggcctttgaggaattttttggtcctagcagcccacagatggagtagcagtttccagtctgttgaagttgtttgcttccgtgaccgtaccatgcagggggcgagagacgttgcccacagcatcatcttcgaagtgaagcttccagaaatggcatttagcccagattgtcctaaagcagttggatgggaaacagaaccagaaaggaggcatgggaccaaggatggtgaacctcagtgaatgtattggaccctaaaaggttagctgagtcatcagtggatctaaatctcaaactgatgtgntaggagattggttcctactttagacttggacaagggttgtgtctgtcaaatgtctgctgcttggagccggcaccctgggttgcaatgaacctagcgacgttgatgcggtcggggcgtgagacacatcacattttgtgggacatgccaaaatctccaactcaaacctgtggaggaagcccccctatgatttgaaacatgcctagggggtgggtaagcccaagggttctggcagcaagggaccggttccacaaaataattccccgcgcggaatcggcnagggactccacatggacaattcctatgtcttggccatcccgcgaaatcttcccagggtacccttcggaagaagccccgcaaaaattcgcggagccaccgggtacgcctcctccccaaggcctttaaagcgctttttccccatggtggggacccccagggaaaaatgcggggctttccttgcgttattgtcgcc

SEQ ID NO: 361273 - DNA, 2196 bp, Homo Sapiens
  misc_feature (1719)..(1799): n is a, c, g, or t
agctccacctctaccctgggcttccggatcgagggcatcaagaaggcagatgggacctgtaacaccaacttcaagaagacgcaggcactggagcaggtgacaaaagtgctggaggacttcgtggatggagaccacgtcatcctgcaaaagtacgtggcatgcctagaagaacttcgtgaagctctggagatctcccccttcttcaagacccacgaggtggtaggcagctccctcctcttcgtgcacgaccacaccggcctggccaaggtctggatgatagacttcggcaagacggtggccttgcccgaccaccagacgctcagccacaggctgccctgggctgagggcaaccgtgaggacggctacctctggggcctggacaacatgatctgcctcctgcaggggctggcacagagctgagctgctcagccaccatcaggttaattggatggcgccagtctggctggaggagccctgagatgccatgggaggcctgaggttggccacgggggagctggcctccagggacgggagagattgtgtcatgtgccacacgagaccaacgtggaaaagtctgaagggccttgggagaccaggtagcacctggccccatcatgatgcaggggttttggggacctggaaggaaggtgatgaggcagtgagtcagaaaaaccagaacggggtccccggatctgccgggaaggcttctgaggggctgccctgagagcattcagttcacatgtcacagggtatggtgtgacagggtgcctgtggacacatgaatcacttctaacctgcctccctgtcagcctccaggctgccagctggctgaggccagggactgggtcaggctcatctgtggcgcctcagagggtcagcatcattggtgaacagatgcaggcgctgctggaccatctggggagagtgacagtccatgtcttcaccagggagccatttgagtgctgagcgacaagaggctcagagggcatgaccccatgggactggatgcggcctgagggctgataccgctgggcggtatcctgccctgctgtggccctgtgggatcctccgtgttcctcggcggactctgctgacctcctgcagacccaaaccacagccacatcccagcttctgtgccagcactgtgacagtacctcgctcctctgtgcaccagatccggcctcaggacttacacctcctgcctgacccccaggcttctctctcctttctcccagcaaactgcagtggcagaaaggaggttcagaggctgggaaagtgggcctccccttgcaactcagagctgctgcactcaggagggccccatccaatccccggcccctgcagggaaaagcgctgggtgtgtgtcagaggcgcagggtgggtggggctgccagccaggaccctggcctgcagcctgatccaaaccaaagactgtagaaccctggggtgtggctaacggcccctccagcacccatagccaggtcttcctggcccttgaggctgggctggcggacaggcacctacctcttccttaagctgaagctcccacactgtcttccagggctgaggagatgctctccttttctactgaccatcttgatacttatttatacgagaggcagttgctggacggggtagtactgggaagcaggaggcagaatggctctgctgagcctcctacccatgacaacaccccaataaacagaacattcagagccnnnnnnnnnnnnnnnnnnnnnnnnnnnnnnnnnnnnnnnnnnnnnnnnnnnnnnnnnnnnnnnnnnnnnnnnnnnnnnnnncaacagagcggaggagcaaccaaaatagcccacaagagggcgcgaaaaaaacacgagcacacaccaaaatgtactaaaaagaagtcgacacaacacaaggagaccaagacaacacagaaacaagcagagcgcgcgcgaggaatacacacaagcggcggaagacggagagaaccaaaaaacgagagaagcggaccacctcatgtgagagaggaacgaacacaacaaccccgcggggagcagacaaaaaaaggcggaacaacacacagagaacaaaacgaaaagcacacgccgcgagcgagcaaaaaccaaacataacgatgactagcaggaacgaacacaacacgcgcacgaccgactgggggacgagagaaagggggaagacggcggaagcacgaag

SEQ ID NO: 361274 - DNA, 1275 bp, Homo Sapiens
gcttagtaagtcctgaattgaacagctacacatcaagtcttatggtcactttgaagagaataaagccagagggattcctggtgtgtctccgttcttccctgccagggagttagtggttctgagttggccacggtgagtgtgcaactcaccaaacatccctcttcctccttcctttcactcccttctcagagcatgatggaagcctgcgttttcatttcagactgatgggtttctgaaggacaacaacaatgctgcccagcgcctgttggacgggatgaacttcatggctcagtcggtgtccgagcttagccttggacccaccaaggctgtgacttcctggctgacagaccagatcgcccctgcctactggaggcccaactcccagattctgagctgcaacaagtgtgcgacgtcctttaaagataacgacactaagcatcactgccgagcctgtggggagggcttctgtgacagctgttcatcaaagactcggccagtgcctgagcggggctggggccctgcgccagtgcgggtctgtgacaactgctacgaagccaggaacgtccagttagctgttaccgaggcacaagtggacgatgaaggtggaacgctcattgctcggaaggtgggcgaggccgtgcagaacactctgggagccgtggtgacagccattgacataccactaggtctgggtaaaggacgcggccaggcctgcgtactgggtgcctgaccacgaaatcctccactgccacaactgcccggaaggagttcagcatcaagctctccaagcaccactgcccggcctgcggacaggtctcctgggagtcgagtcccaattcttggcttaagcctgttttagtcagagaccacccaacttagcgtgcaggtcaccggagtgggtggagggtcagaggtcgggtcttcggccctgagaagtagaaatgcaggggccgtgctgtccctggtcccccagggaacagcaaggaaggaactgagccttctccaacaaggcttcctgtcccgatgcttctgtctccactcggctttcccaaaaagcggcacccagctcctcaatcggaagcatctggcctcccaaccccttgggcccccctcaaagcccacccaatctggctttctggaagtgttccgcacctaagggattttttccatttgggcttatatttttaaaagggggcgcttttaaatcccccttttgggttcccccgggaaccacgcccaaacccccccctcctgaagagttctcctcccgggaac

SEQ ID NO: 361275 - DNA, 972 bp, Homo Sapiens
  misc_feature (26)..(26): n is a, c, g, or t
  misc_feature (448)..(448): n is a, c, g, or t
cagatgtgggctttgaggggcccgangggtgggaggcagatgcttcgattgaggagctgggtgccgccttttgggaaagccgagtggagacagaagcatcgggacaggaagccctgctggagaaggctcagttccttccttgctgttccctgggggaccagggacagcacggcccctgcatttctacttctcagggccgaagacccgacctctgaccctccacccactccggtgacctgcacgcctaagttgggtggtctctgactaaaacaggcttaagccaagaattgggactcgactccccaggagacctagggagaattcccttcaggctgtttcaggcaggaaggaccagggaggctcactccccaggcagctgacaggcatggagggaagagccaaggacaggagaggcttccaaggctccaagagcagcagaggaaggggnccaaccacgtggtggccatggacctggctcggctcatgaggaagacgtgctgccactgccacctcaccctgtgcggaggagactgtgcgaagtcttcacagccagcagcagcctcgatacgccccgagtgcctttccatatgtatatatgagagagagatatacacatatatattcattatttttaactgaaataaatgcaacggattcaggttcattcccctttgcgataagttgcaaggtcccctgccctgaggggtccacaccttcgggcctgccgccaggctcacccccactgagggaaagtggccctggatgcggagaggagaggacacacaccacagcaggtgactgggaggagggcctacctcgcaagactgtttctaaccctgagaacctaaggaattgtgaaggactcggagagggggctggggttaaaggtcaccgggctttttattgcagttgaagcagactcggacgggatggtcccagccacgagaaggaacagcccggcggtcatgggag

SEQ ID NO: 361276 - DNA, 1839 bp, Homo Sapiens
  misc_feature (1371)..(1371): n is a, c, g, or t
ggaattcctgggatgctggtagcccggcagccgcaggtggggccacgagcgctggctgagggaccgagccggagagccccggagcccccgtaacccgcgcggggagcgcccaggatgccgcgcggggactcggagcaggtgcgctactgcgcgcgcttctcctacctctggctcaagttttcacttatcatctattccaccgtgttctggctgattggggccctggtcctgtctgtgggcatctatgcagaggttgagcggcagaaatataaaacccttgaaagtgccttcctggctccagccatcatcctcatcctcctgggcgtcgtcatgttcatggtctccttcattggtgtgctggcgtccctccgtgacaacctgtaccttctccaagcattcatgtacatccttgggatctgcctcatcatggagctcattggtggcgtggtggccttgaccttccggaaccagaccattgacttcctgaacgacaacattcgaagaggaattgagaactactatgatgatctggacttcaaaaacatcatggactttgttcagaaaaagttcaagtgctgtggcggggaggactaccgagattggagcaagaatcagtaccacgactgcagtgcccctggacccctggcctgtggggtgccctacacctgctgcatcaggaacacgacagaagttgtcaacaccatgtgtggctacaaaactatcgacaaggagcgtttcagtgtgcaggatgtcatctacgtgcggggctgcaccaacgccgtgatcatctggttcatggacaactacaccatcatggcgggcatcctcctgggcatcctgcttccccagttcctgggggtgctgctgacgctgctgtacatcacccgggtggaggacatcatcatggagcactctgtcactgatgggctcctggggcccggtgccaagcccagcgtggaggcggcaggcacgggatgctgcttgtgctaccccaattagggcccagcctgccatggcagctccaacaaggaccgtctgggatagcacctctcagtcaacatcgtggggctggacagggctgcggcccctctgcccacactcagtactgaccaaagccagggctgtgtgtgcctgtgtgtaggtcccacggcctctgcctccccagggagcagagcctgggcctcccctaagaggctttccccgaggcagctctggaatctgtgcccacctggggcctggggaacaaggccctcctttctccaggcctgggctacaggggagggagagcctgaggctctgctcagggcccatttcatctctggcagtgccttggcggtggtattcaaggcagttttgtagcacctgtaattnggggagagggagtgtgcccctcggggcaggagggaagggcatctggggaagggcaggagggaagagctgtccatgcagccacgcccatggccaggttggcctcttctcagcctcccaggtgccttgagccctcttgcaagggcggctgttccttgagcctagtttttttacgtgattttgggaacattcattttttggtacagatcacaggagtttctgactaatcaagctggtatttcccgcatgtcttattcttgccttccccaacagttgtattcaacagtaaaactggtggttgttttaacaacaagcacgaaaaaaaggggggggcaaagttccgggggccagttacggtccggttttgtcaggggccaagggggtatagcgggggcgggtacagggaggggaagttggttgggccctgggggaggcacccgatccggtaaggtaggaagtggggggggaaag

SEQ ID NO: 361277 - DNA, 408 bp, Homo Sapiens
  misc_feature (69)..(69): n is a, c, g, or t
  misc_feature (106)..(106): n is a, c, g, or t
  misc_feature (175)..(175): n is a, c, g, or t
agacctgaggctctgctcagggccccatttcaatctcctggcagtgccttggcggtggtattcaaggcnagttttgtagcacctgtaattggggagagggagttgntccctcggggcaggagggaagggcatctggggaagggcaggagggaagagctgtccatgcagccgacgnccgatgccaggttggcctcttctcagcctcccaggtgccttgagccctcttgcaagggcggctgcttccttgagcctagttatttattacgtgatttttgtaacattcattttttgtacagataacaggagtttctgactaatcaaagctggtatttccccgcatgtcttattcttgcccttcccccaaccagtttgttaatcaaacaataaaaacatgttttgttttgttta

SEQ ID NO: 361278 - DNA, 1510 bp, Homo Sapiens
cggctagtagaggcgggtgtgaatcggcacgaggcctctttgccccaccaccgctgctcctcagcaggcgcctcaccagcctccacaccccttgcgcccgcagaaacgcgcctggccctgagctgtcaccaccgacactctccaggctccggacacgatgcaggccatcaagtgtgtggtggtgggagatggggccgtgggcaagacctgccttctcatcagctacaccaccaacgcgtttcccggagagtacatccccaccgtgtttgacaactattcagccaatgtgatggtggacagcaagccagtgaacctggggctgtgggacactgctgggcaggaggactacgaccgtctccggccgctctcctatccacagacggacgtcttcctcatctgcttctccctcgtcagcccagcctcttatgagaacgtccgcgccaagtggttcccagaagtgcggcaccactgccccagcacacccatcatcctggtgggcaccaagctggacctgcgggacgacaaggacaccatcgagaaactgaaggagaagaagctggctcccatcacctacccgcagggcctggcactggccaaggagattgactcggtgaaatacctggagtgctcagctctcacccagagaggcctgaaaaccgtgttcgacgaggccatccgggccgtgctgtgccctcagcccacgcggcagcagaagcgcgcctgcagcctcctctaggggttgcaccccagcgctcccacctagatgggtctgatcctccaggatccccacccaaagcctgatggcaccccggctggccatgctgtcccctccctgtggcgtttcttaacagatggctgcagagcttcgttgatggtcttttctgtactggaggcctcctgaggccaggaacgtgcaaatttgcaggtgctgcatcccaagcccctcatgctcctgcgcttcctgagggccagaggggagccccaggacccattaagccacccccgtgttcctgccgtcagtgccaactgccgcatgtggaagcatctacccgttcactccagtcccaccccacgcctgactcccctctggaaactgcaggccagatggttgctgccacaacttgtgtaccttcagggatggggctcttactccctcctgaggccagctgctctaatatcgatggtcctgcttgccagagagttcctctacccagcaaaaatgagtgtctcagaagtgtgctcctctggcctcagttctcctcttttggaacaacataaaacaaatttaattttctacgcctctggggatatctgctcagccaatggaaaatctgggttcaaccagcccctgccatttcttaagactttctgctccactcacaggatcctgagctgcacttacctgtgagagtcttcaaacttttaaaccttgccagtcaggacttttgctattgcaaatagaaaacccaactcaacctgcttaagcagaaaataaatttattgattcaaa

SEQ ID NO: 361279 - DNA, 1167 bp, Homo Sapiens
  misc_feature (44)..(44): n is a, c, g, or t
cggtccggaaattcccgggaatgccacttctgccccaccaacgnttgggccaaccaaaaggagtcagtgccagtcaagatcgaaagatacctcccccaattggaacagagagactggcccgaattcggcaaggagggtctgttgcacaagccccggcggggaccagttttgtcgctcccgttggacacagtggaatctggtcatttggtgtcaatgctgtgtcagaaggcttatcaggttggtcgcaatctgtgatggggaaccatccaatgcatcaacaattatcagacccaagcacattctcccaacatcagccaatggagagagatgattctggaatggtagccccctctaacatttttcatcagcctatgggtctgccaatttccatgtatggaggcaccataataccctctcatcctcagcttgctgatgttccaggaggccctctgtttaatggacttcacaatccagatcctgcttggaaccctatgataaaagttatccaaaattcaactgaatgcactgatgcccagcaggccagtctgcttccttcagtccctgctctcaaaggggaaatcccatcacctcagctaaccagaccgaagaagagaattggacggccgatggtggcctctcctaaccagaggcaccaggatcatctacgaccgaaagttcctgctggagtgcaagaactcacccattgcccggacacccccctgctgcctccctcagattcccggggtcacaactcctccaacagcccctctctccaagctggaggagctgaaggagcaggagacagaggaagagatacccgatgacgcacaatttgaaatggacatctaatccagtgcagatgacctgggcatgtggaggttacagagggatccctcatgccactgctgccaccacctcttcctggggcatccaaaagccagctggcctcatctaatctggaagggagtgacttgttagttccaggcctcctttagttctgaggcagctagaccagggataggagtgggcaactttgccaagcccttaacttcttacttcctctttcagtctgtggtactcctcctaaccctaaaccctctatgcttcaggggctgcaactggggaatggagtaagtcaccttctgactgcttagtaaacattcaaag

SEQ ID NO: 361280 - DNA, 446 bp, Homo Sapiens
  misc_feature (39)..(39): n is a, c, g, or t
  misc_feature (72)..(72): n is a, c, g, or t
ctaagttagaggcctttaccctttagcctgtttaagaancctatgacctggaagaacccatggggatttttntttaatgtgccctaagaaattttctctgaggctttagcaatggaaatttgattgcccattgtataagaacaaattgatttcctatccacctgattatgttctctggttagtttagccattttgaacttaagatcatatgaccttagtgcttttggctaaacatacagaatactacttgtatgcagaagagaattagttgattacatgtttcaaccttttagggtgataaatacatgtataattgtttacatacttaaaaggaaaaagttgagtaaatttcttgtcatatagtggctctacgtaatgtagcctgtattaatgtgaaatatttaccagaatattcaataaaaagatgaacagtctttagaaaaaaa

SEQ ID NO: 361281 - DNA, 538 bp, Homo Sapiens
caggttggtcgcaatctgtgatggggaaccatccaatgcatcaacaattatcagacccaagcacattctcccaacatcagccaatggagagagatgattctggaatggtagccccctctaacatttttcatcagcctatggaagtggttttgtggatttttctaaaggtctgccaatttccatgtatggaggcaccataataccctctcatcctcagcttgctgatgttccaggaggccctctgtttaatggacttcacaatccagatcctgcttggaaccctatgataaaagttatccaaaattcaactgaatgcactgatgcccagcaggccagtctgcttccttcagtccctgctcttcaaaggggaaatcccattcaccttcagcttaaccaggaccgaaggaagagaattgggacgggccgatggtgggctcttcctaaccagagggcaccaggttcatttaggaccgaaagtttcctgctgggagttgcaaggaattcaccctttgcccggacaaccccttgttgcttcctt

SEQ ID NO: 361282 - DNA, 620 bp, Homo Sapiens
aaaggaaagcagcccaaattctagggcaaaggataaatttcttgaccaagaaagatccaacaaaatgagaaacatggcaaaggacaaagaaagaaaccaagagaaaccctctaattctgaatcatcactgggagcaaaacacagactcacagaggaagggcaagagaagggtaaagaacaagagagaccacctgaggcagtgagcaagtttgcaaagcggaacaatgaagaaactgtaatgtcagctagagacaggtacttggccaggcagatggcgcgggttaatgcaaagacctatattgagaaagaagatgattgatggctaccccaagagaaagatttaaggaagcacagaaaactgtaattcctggaacctgctgcgtaaaaccataaaggagtgtgttaccagtagtttggagggcatttttaaatttattttcaaaattttaagttaaaagtcagtcttacagcttggatgtttggatgtggatgtttggctgaatttatatatagtgtgtactcatcaataccacattctttgttgtattcaagaaccgttaagagtgtgctaattccctgtaggtacataatgaggaaaatttgctccactacaaccatta

SEQ ID NO: 361283 - DNA, 941 bp, Homo Sapiens
  misc_feature (321)..(321): n is a, c, g, or t
  misc_feature (327)..(327): n is a, c, g, or t
  misc_feature (343)..(344): n is a, c, g, or t
  misc_feature (426)..(426): n is a, c, g, or t
  misc_feature (471)..(513): n is a, c, g, or t
  misc_feature (535)..(535): n is a, c, g, or t
  misc_feature (568)..(568): n is a, c, g, or t
  misc_feature (792)..(836): n is a, c, g, or t
gacggaccgagggttcgagggagggacacggaccaggaacctgagctaggtcaaagacgcccgggccaggtgccccgtcgcaggtgcccctggccggagatgcggtaggaggggcgagcgcgagaagccccttcctcggcgctgccaacccgccacccagcccatggcgaaccccgggctggggctgcttctggcgctgggcctgccgttcctgctggcccgctggggccgagcctgggggcaaatacagaccacttctgcaaatgagaatagcactgttttgccttcatccaccagctccagctccgatggcaacctgcngtccangaagccatcactgctnnatcatcgtggtcttctccctcttggctgccttgctcctggctgtgaggctggcactgctggtgccgaccctccgccagaagnggtagacgcagggcacctaccgccccactagctaggaccacgcgnnnnnnnnnnnnnnnnnnnnnnnnnnnnnnnnnnnnnnnnnnngaaccgtcgcttctcttcgccnccccgtccctgctccgtgtcaaccgccccccgncctaccacgtgcccgctcgcccgtccttcgcaccgtcggcgccttcccataccgccccccccggcgtcccgggggacgaaggccgaccttccttggccggcccagccgcggtggtgttcgaccccttctcccccctttccaccgctcggcgccgcgcccgctgcggtctcttttcgcgccgccccccctacgacgcgctgcgcttgccctccgcggtccttttnnnnnnnnnnnnnnnnnnnnnnnnnnnnnnnnnnnnnnnnnnnnnctatgcggcgcccgccctctcgcccgcgttaccccccctcgcgcctcttccgcccttttattttcgccgcggcgcgccgtcggcttcacgcccggcgccgcgtct

SEQ ID NO: 361284 - DNA, 1207 bp, Homo Sapiens
  misc_feature (263)..(297): n is a, c, g, or t
  misc_feature (1192)..(1192): n is a, c, g, or t
gcggtgccccgcggaggggctgagtttgccagggcccacttgaccctgtttcccacctcccgccccccaggtccggaggcgggggcccccggggcgactcgggggcggaccgcggggcggagctgccgcccgtgagtccggccgagccacctgagcccgagccgcgggacaccgtcgctcctgctctccgaatgctgcgcaccgcgatgggcctgaggagctggctcgccgccccatggggcgcgctgccgcctcggccaccnnnnnnnnnnnnnnnnnnnnnnnnnnnnnnnnnnnagccgccgcctccgacctgggcgctcagcccccggatcagcctacctctgggctctgaagagcggccattcctcagattcgaagctgaacacatctccaactacacagcccttctgctgagcagggatggcaggaccctgtacgctgggtgctcgagaggccctctttgcactcagtagccaaacctcagcttcctgccaggcggggagtaccaggagctgcttcggggtgcagacgcacgagaacgaaacagcagtgcacgcttcaagggcaaggacccacagcgcgactgtcaaaactacatcaagatcctcctgccgctcagcggcagtcacctgttcacctgtggcacagccagccttcagccccatgtgtacctacatcaacatagagaacttcaccctggcaagggaccgagaaggggaactgtcctcctggcaagatggcaagggccgttgtcccttcgacccgacattccaagtccactgccctggtggtcgatggcgagctctacactggcaacagtcaagcagcttccaagggaactgacccggcccatctcgccggagccaaagccttcgcacccaccaagaccgcagagctccctcaactggctgcaagacccaggcttaggtgggcctcagcctacacttcctgcagagcctgggcagcttgcaaggcgatgatgacaagatctacctactcttcagcgagactggccagggcaattcgagtcctttgaggaacacccactgtgtcccgcattgcccgcatctgcaagggcgatgagggtggagagcgggtgctacagcagcgctggacctccttcctcaaggcccagctgctgtgctcacggcccgacgatggcttccccttcaacgtgctgcaggatgtnttaacgctgagcccc

SEQ ID NO: 361285 - DNA, 884 bp, Homo Sapiens
ggggcggcggtgggggtatcggtcctcatggtgaagacggtggtgccgggggcgaagggtacagcgaaccgagggcaatcggctgggcggtcctgtagaagcgcccacacttgtccgagcgtcatagtagggctccaggggggccgtcgcctatggccggggacaggaggtcctccggcagccccgttgttccctcgggtgaccagcaggaccccgtcaggggcgagtggcttgaactccacgtccaggcgtagctcgtggtgtgtgttggtgagggcgggcagtgccaggtaggagccagcacccgacagcgagggggtggtcactgtcacaccttcctcacaccgcaaccccgagcggcccaggtggcagcggcaggtgtagcctcgaccgtcaggccggttcacacaggtggcgtcgggcccacaggcctctggatggcagtgcagggcctgcgagtgctcacagcggctcccggtgaagccagctgggcagacgcacacgtagctgctgctctcagagtcatggcactgaccgccattctggcagggccggtcccgacaggtggggcagtgggagatgccgtgcgccgtgaggttgaggtcatggaagacgatctcctcgccctggatgcgcagctcccggacacagcctatgaagccgctgctcagccccgccttggggatggcaccatagtcaggatagccacccaggtagagttcctcgttcagatccaggccctggaacttgccctgggaggtcccattgaccggggccaggtcacccacaatcagggagccctgggtgaggctgcgcagcagggtcacggtgtggaaatggcccagggccagtggtgtgggatggcggatggtggccatgcctga

SEQ ID NO: 361286 - DNA, 884 bp, Homo Sapiens
aagaagtgaaacgactatattcaccagaagaagatacatttagagaactgaggattttcttaagaaatgttacacataggcttgctattgacaagcgattccgagtgtttactaagcctgttgaccctgatgaggttcctgattatgtcactgtaataaagcaaccaatggacctttcatctgtaatcagtaaaattgatctacacaagtatctgactgtgaaagactatttgagagatattgatctaatctgtagtaatgccttagaatacaatccagatagagatcctggagatcgtcttattacgcatagagcctgtgctttaagagatactgcctatgccataattaaagaagaacttgatgaagactttgagcagctctgtgaagaaattcaggaatctataaagaaaagaggttgtagctcctccaaatatgccccgtcttactaccatgtgatgccaaagcaaaattccactcttgttggtgataaaagatcagacccagagcagaatgaaaagctaaagacaccgagtactcctgtggcttgcagcactcctgctcagttgaagaggaaaattcgcaaaaagtcaaactggtacttaggcaccataaaaaagcgaaggaagatttcacaggcaaaggatgatagccagaatgccatagatcacaaaattgagagtgatacagaggaaactcaagacacaagtgtagatcataatgagaccggaaacacaggagagtcttccggtggaaaaaaatgaaaaacaggcaaaatgccctcttgaaagcaaaactgggaattggagaaaataaattccaaaatactttgttatattaggagcaatgtagccttgaaaacactcctagggcaagaactacca

SEQ ID NO: 361287 - DNA, 454 bp, Homo Sapiens
  misc_feature (230)..(285): n is a, c, g, or t
gaatgtggacacctggctccctggtgtccaaagaccctggcacctgggtgggtttgagctggacagaagcttagagacaaaggcttcaagaagcagtggctgcagggagtcacagaagggcaggacctgaacgctgtctgcttccctggaatccaagatgctgagtggaagtggaccctgggtgggcccggccctgtctttttcaggaaaattacatcctcccatggagnnnnnnnnnnnnnnnnnnnnnnnnnnnnnnnnnnnnnnnnnnnnnnnnnnnnnnnnctgggcacccaggacccccaggtgcttgacagagtcaccccatggtggtatggctgaacaaggagcggcagacaactcagggagaaactcaggagtgcagtaccagggacacctcaggacagattctctggccaggcccttccctgacccaataaatcctgaagaggtt

SEQ ID NO: 361288 - DNA, 1102 bp, Homo Sapiens
  misc_feature (875)..(930): n is a, c, g, or t
aacaacaaaaacacaaaacctacggctaggtagcgaggctcgggtgttaactcggcacgaggccgggcacacccacgtgccggcggcggagactgcagtggagccagtaccggctgtagtggccggggccgtggcgggagagtcatgtcagagccgcagccgcggggcgcagagcgcgatctctaccgggacacgtgggtgcgatacctgggctatgccaatgaggtgggcgaggctttccgctctcttgtgccagcggcggtggtgtggctgagctatggcgtggccagctcctacgtgctggcggatgccattgacaaaggcaagaaggctggagaggctctagcctctgtggccattccgggcttcaccatcaaccgcgtgtgtgctgcctctctctatgtcctgggcactgccacccgctggcccctggctgtccgcaagtggaccaccaccgcgcttgagatgttaaccatccccatcattatccaccccattgacaggtcggtggatttcctcatggactccagcctgcgcaagctctacccaacagtggggaagcacagctcctcctgatcatactctggtacctggcctgtgcatcggcctcctgcttcatgtcaacctcctactcctgccagggaatgtggacacctggctccctggtgtccaaagaccctggcacctgggtgggtttgagctggacagaagcttagagacaaaggcttcaagaagcagtggctgcagggagtcacagaagggcaggacctgaacgctgtcttgcttccctggaatccaagatgctgagtggaaggtggaccctgggtggggcccggccctgtctttttcaggaaaattacatcttcccatggagnnnnnnnnnnnnnnnnnnnnnnnnnnnnnnnnnnnnnnnnnnnnnnnnnnnnnnnnctgggcacccaggacccccaggtgcttgacagagtcaccccatggtggtatggctgaacaaggagcggcagacaactcagggagaaactcaggagtgcagtaccagggacacctcaggacagattctctggccaggcccttccctgacccaataaatcctgaagaggttaaa

SEQ ID NO: 361289 - DNA, 1569 bp, Homo Sapiens
  misc_feature (86)..(142): n is a, c, g, or t
  misc_feature (1297)..(1305): n is a, c, g, or t
ttttctaatagtaagagaccgaaggtcttccgttattttgtcccaggctgtttttcgaaccccttggggctcaaggagatttttcnnnnnnnnnnnnnnnnnnnnnnnnnnnnnnnnnnnnnnnnnnnnnnnnnnnnnnnnncagccctgtgtccctcccctcgtttttacaaatgaataaagagatgctggataagcccgaggtcacaagctttgcagtgtagcatcccccaacttgatcccctgtctctttggctccaaaacctacactcagtcctgggagcgattagcgccaacagctcagagaaaacgtgacgaaaaccagtctgtaaaacccgagcctgggagaggggcttcggtgcgcggggggaatttgcagacgctccctgctggcggagatttcctgacctgtccttcggcgcgggactttcggcgggtcccggccgggcagacccaagtgccggcggcggagactgcagtggagccagtaccggctgtagtggccggggccgtggcgggagagtcatgtcagagccgcagccgcggggcgcagagcgcgatctctaccgggacacgtgggtgcgatacctgggctatgccaatgaggtgggcgaggctttccgctctcttgtgccagcggcggtggtgtggctgagctatggcgtggccagctcctacgtgctggcggatgccattgacaaaggcaagaaggctggagaggtgcccagccctgaagcaggccgcagcgccagggtgaccgtggctgtggtggacacctttgtatggcaggctctagcctctgtggccattccgggcttcaccatcaaccgcgtgtgtgctgcctctctctatgtcctgggcactgccacccgctggcccctggctgtccgcaagtggaccaccaccgcgcttgggctgttgaccatccccatcattatccaccccattgacaggtcggtggatttcctcctggactccagcctgcgcaagctctacccaacaggggggaagcccacctcctcctgatcatactctgctacctggcctgtgcatcgacctcctgcttcatgccaacctccaactcctgccagagaatgtggacacctggctcccctggggtccaaagaccctggcacctgggtggggttggagctggacaaaaagcttaaagacaaagggcttcaagaacccatggcctgccagggaagtcacagaaagggcaaggaacctggaaccgcctggtccgcctttccccgggaaatccaaagatgcctgaacgggaaaagcggacaccctnnnnnnnnnccccggccccctggtcttttttcccggaaaaattacttccttccccctggaaggaatgaaaacaattgcaggctccggggaagggcgcagggaaatagggcccaaaaatcaccttgggaaagcccgggcctcccaaagaacccccaaggggcttggaacgaattcccccccttggcgggatatggcttcaccaaggagacgggcagaaaaatctcgcggagaaaaattcgggagaggcgagtcaccccggggaataccttcgga

SEQ ID NO: 361290 - DNA, 618 bp, Homo Sapiens
  misc_feature (225)..(225): n is a, c, g, or t
  misc_feature (228)..(228): n is a, c, g, or t
  misc_feature (251)..(251): n is a, c, g, or t
  misc_feature (398)..(398): n is a, c, g, or t
  misc_feature (564)..(564): n is a, c, g, or t
gtccgaggtgggcatcatggcaccagtttacatctcggaaagggaggctcagagaggtcaagtcacttgcctaaggtcacccagggactgcttagctggctaggatgagaaccagcctgctccaacgccccctcgtggaacagttgcgagcctaggaattaaatgttccctcccccaggctatgcaatgaggtgggcgaggctttccgctctcttgtgccagcgnggntggtgtggctgagctatggcgtnggcagctcctacgtgctggcggatgcattttgacaaaggcaagaaggctggagaggtgaagtgttagcctattttccaacccccaaccctagctctcttcttgtgtggttcagtccacagccttgcatgtgataaagtccctgtggnacctccagtccctacaaccttgcctagtgcagtccatagacagtcctgtttgtaggacagtgtacccctgcccccacactcccactccccgaactggatgtggcagactgtaccccactcctgggtgcggacaagtccactggccacttgcccctcccggtctagnctcgtgccccttgtcgcaggattttctgcctctgccccagctggattaagtgtc

SEQ ID NO: 361291 - DNA, 999 bp, Homo Sapiens
tgcttcgaacgctcggttaagattaatcccatgcagctcggggtgtggttttctctcggttgtgcctatttggccttggaagactatcaaggttcagcaaaggcatttcagcgctgtgtgactctagaacccgataatgctgaagcttggaacaatttgtcaacttcctatatccgattaaaacaaaaagtaaaagcttttagaactttacaagaagctctcaagtgtaactatgaacactggcagatttgggaaaactacatcctcaccagcactgacgttggggaattttcagaagccattaaagcttatcaccggctcttggacttacgtgacaaatacaaagatgttcaggtccttaaaattctagtcagggcagtgattgatgggatgactgatcgaagtggagatgttgcaactggcctcaaaggaaagctgcaggagttatttggcagagtgacttcaagagtgacaaatgatggagaaatctggaggctgtatgcccacgtatatggaaatgggcagagtgaaaagcctgatgaaaatgaaaaggcattccagtgcctctcaaaggcatacaagtgtgacacccagtccaattgttgggagaaagatattacatcatttaaggaagttgttcaaagagccttaggacttgcacatgtggccataaaatgcagtaaaaacaaatccagttcccaagaagctgtacaaatgctttcttctgttcgactcaatttacggggcttgttatctaaagcaaagcaactttttacagatgtggcaactggagaaatgtccagggaattagctgatgacataacagctatggacaccttagtgacagagctccaagacctaagcaaccagtttcgaaatcagtattgattctgctggaagcagattctggaaaaggtgctttcacctgctggtaaaagatacatctgtatatctgaaatgcaagatattgatttttaaaataaatttgttttatgactt

SEQ ID NO: 361292 - DNA, 581 bp, Homo Sapiens
  misc_feature (57)..(57): n is a, c, g, or t
aactatccccttattttggaaccggctttatgacttaatgtgttttacactcgattnccctgccctaaaattgttaataccctctcaaaagccgtgtaggagactcacccaatacctggagctggagcctatgctgacgatactgcaggggcagccgcagccactgggaatggtgatataattgatgcgcttcctgccaagctaccaagctgtagaatacatgagaagaggagaagatccaaccatagcttgccaaaaagtgatttcaagaatccagaagcattttccagaattctttggggctgttatatgtgccaatgtgactggaagttacggtgctgcttgcaataaactttcaacatttactcagtttagtttcatggtttataattccgaaaaaaatcagccaactgaggaaaaagtggactgcatctaatccatctttactgtcaacatctgtatttaaagaagaaagaaacaaaggctgaaaaggctgctcactctcatcatctagtgttcctcatgtgttctaaagtctttttgtaaaataaacacaaaaataaatttatgttgaattggca

SEQ ID NO: 361293 - DNA, 1103 bp, Homo Sapiens
  misc_feature (1047)..(1047): n is a, c, g, or t
  misc_feature (1055)..(1055): n is a, c, g, or t
  misc_feature (1060)..(1060): n is a, c, g, or t
  misc_feature (1074)..(1074): n is a, c, g, or t
ggggggattaattgttcggcgatcgctggctgccgggacttttctcgcgctggtctcttcggtggtcagggatggcgcggaagtcgaacttgcctgtgcttctcgtgccgtttctgctctgccaggccctagtgcgctgctccagccctctgcccctggtcgtcaacacttggccctttaagaatgcaaccgaagcagcgtggagggcattagcatctggaggctctgccctggatgcagtggagagcggctgtgccatgtgtgagagagagcagtgtgacggctctgtaggctttggaggaagtcctgatgaacttggagaaaccacactagatgccatgatcatggatggcactactatggatgtaggagcagtaggagatctcagacgaattaaaaatgctattggtgtggcacggaaagtactggaacatacaacacacacacttttagtaggagagtcagccaccacatttgctcaaagtatggggtttatcaatgaagacttatctaccagtgcttctcaagctcttcattcagattggcttgctcggaattgccagccaaattattggaggaatgttataccagatccctcaaaatactgcggaccctacaaaccacctggtatcttaaagcaggatattcctatccataaagaaacagaagatgatcgtggtcatgacactattggcatggttgtaatccataagacaggacatattgctgctggtacatctacaaatggtataaaattcaaaatacatggccgtgtaggagactcaccaatacctgggagctggagcctatgctgacgatactgcaggggcagccgcagccactggggaatggtgatatattgatgcgcttcctgccaagctaccaagctgtagaatacatgaagaagagggagaagatccaaccatagctttgcccaaaaagtgattttcaaggaatccaggaaggcattttccagaattctttgggggctgttattatgtggccatggtggattgggaagtttacggtggctgctttgcattaaantttcaacntttantcattttgttttcngggtttttatttcccgaaaaaattcagcc

SEQ ID NO: 361294 - DNA, 1317 bp, Homo Sapiens
gtgtgtgagtcaggaaggccgtcgccacgggcagagcgacgcgtgcggggagcgtgtgtgagtcaggagggccgtcgccacgggcacagtgacgtgcgtgtcagatcatataccctcgccagcagctgctgaccctccgagagctagagatgattggcttcattgaaaacaacgtgtcaaaattgagccttcttttgaatgacatttcaaggaagagcgagggcctcagcggccgggtcctgagaaaactcccctttctggctcatgcgctgtatgtccaggcccccaccgtcaccatagaggggttcctccaggccctgtctctggcagtggacaagcagtttgaagagagaaagaagcttgcagcttacatctgatcctgggcttccccatctggtgcttttcccatggagaacacacaaccagtaagtgaggttgccccacacagccgtctcccagggaatcccttctgcaaaccaaacgttacttagactgcaagctagaaagccaccaaggccaggctttgttaaaagaagtgtattctatttatgttgttttaaaatgcatactgagagacaaacatcttgtcattttcactgtttgtaaaagataattcagattgtttgtctccttgtgaagaaccatcgaaacctgtttgttcccagcccacccccagtggatgggatgcataatgccagcaagttttgtttaacagcaaaaaaggaagattaatgcaggtgttatagaagccagaagagaaactgtgtcaccctaaagaagcatataatcatagcattaaaaatgcacacattactccaggtggaaggtggcaattgctttctgatatcagctcgtttgatttagtgcaaaaatgttttcaagactatttaatggatgtaaaaaagcctatttctacattataccaactgagaaaaaaatggtcggtaaagtgttctttcataataaataatcagacatggtcccatttgcaggaaaagtgcagactctgagtgttccagggaaacacatgctggacatcccttgtaacccggtatgggcgcccctgcattgctgggatgtttctgcccacggttttgtttgtgcaataacgttatcacatttctaatgaggattcacattaatataatataaaataaataggtcagttactggtctctttctccgaatgttatgttttgcttttatctcacagtaaaataaatataattaatggtttgcatgtgaaattcacttttgaaagaacatgttaccttaccttttgttttagaagttttcaagtattaaaatattttttag

SEQ ID NO: 361295 - DNA, 1185 bp, Homo Sapiens
caggttggaactcactgccgttggtatcacggacaccagctgcgcctggacataattgaaagacacaacacaatggccatcggcattgcagtggacattctgggatgcacgggcacttgggaggaccgagcggccactctgagtaagatcatccaggtggcggtggaactgaaggattccatgggggacctctattccttctcagctctcatgaaagacctggaaatgccacagatcacaaggttagaaaagacgtggactgctctgcggcaccagtacacccaaactgccattctctatgagaaacagctgaagcccttcagcaaactcctgcatgaaggcagagagtccacatgtgttcccccaaacaatgtatcagtcccactgctgatgccgcttgtgacgttaatggagcgccaggctgtgacttttgaaggaaccgacatgtgggaaaaaaacgaccagagctgtgaaatcatgctgaaccatttggcaacagcgcgattcatggccgaggctgcagacagctaccggatgaatgctgagaggatcctggcaggttttcaaccagatgaagaaatgaatgaaatctgcaagactgaatttcaaatgcgattgctatggggcagcaaaggtgcacaagtcaatcagacagagagatatgagaaattcaaccagattttaactgccctctcgcgtaaattggaacctcctcctgtaaagcaggcagagctttgataactctccagagaacctttagaatatcttttcaagtttccccagcttcatctttgggaaagcttactgtttttgataaagtaataatgtgcaaatctgacaatatacaagcttttagtatccacaggatattaaacgtgtaaattgcacagagcacacttatttatgaattgtctaaagttactactgattttaaaatgaataatttattattaaggtaactactgctaatgttgatcagcaaatttaagagaagacctagctatgttggctggttgctttctattatcatggtatttgaccattttagttttaattccatgtcagataagtgtaaatagaagagtttaaaagcatgaaacatttcagaaggtatcagttatatgatattctttaaacaaatatggaaaatgtaaatactcatgaatgaaaatacatctttttgtg

SEQ ID NO: 361296 - DNA, 1926 bp, Homo Sapiens
gcctgggtggcgaattcggcacgaggggagccagacgtgtggagtcccagcagaggccaacctgtgtctcttcatctccctgggaaaggtgcccccgaggtgaaagagatggcctggtggaaatcctggattgaacaggagggtgtcacagtgaagagcagctcccacttcaacccagaccctgatgcagagaccctctacaaagccatgaaggggatcgggaccaacgagcaggctatcatcgatgtgctcaccaagagaagcaacacgcagcggcagcagatcgccaagtccttcaaggctcagttcggcaaggacctcactgagaccttgaagtctgagctcagtggcaagtttgagaggctcattgtggcccttatgtacccgccatacagatacgaagccaaggagctgcatgacgccatgaagggcttaggaaccaaggagggtgtcatcattgagatcctggcctctcggaccaagaaccagctgcgggagataatgaaggcgtatgaggaagactatgggtccagcctggaggaggacatccaagcagacacaagtggctacctggagaggatcctggtgtgcctcctgcagggcagcagggatgatgtgagcagctttgtggacccaggcactggccctccaagacgcacaggatctgtatgcggcaggcgagaagattcgtgggactgatgagatgaaattcatcaccatcctgtgcacgcgcagtgccactcacctgctgagagtgtttgaagagtatgagaaaattgccaacaagagcattgaggacagcatcaagagtgagacccatggctcactggaggaggccatgctcactgtggtgaaatgcacccaaaacctccacagctactttgcagagagactctactatgccatgaagggagcagggacgcgtgatgggaccctgataagaaacatcgtttcaaggagcgagattgacttaaatcttatcaaatgtcacttcaagaagatgtacggcaagaccctcagcagcatgatcatggaagacaccagcggtgactacaagaacgccctgctgagcctggtgggcagcgacccctgaggcacagaagaacaagagcaaagaccatgaagccagagtctccaggactcctcactcaacctcggccatggacgcaggttgggtgtgaggggggtcccagcctttcggtcttctatttccctatttccagtgctttccagccgggtttctgacccagagggtggaaccggcctggactcctcttcccaacttcctccaggtcatttcccagtgtgagcacaatgccaaccttagtgtttctccagccagacagatgcctcagcatgaagggcttggggacttgtggatcattccttcctccctgcaggagcttcccaagctggtcacagagtctcctgggcacaggttatacagaccccagccccattcccatctactgaaacagggtctccacaagaggggccagggaatatgggtttttaacaagcgtcttacaaaacacttctctatcatgcagccggagagctggctgggagcccttttgttttagaacacacatccttcagcagctgagaaacgaacacgaatccatcccaaccgagatgccattaacattcatctaaaaatgttaggctctaaatggacgaaaaattctctcgccatcttaataacaaaataaactacaaattcctgacccaaggacactgtgttataagaggcgtgggctcccctggtggctgaccaggtcagctgccctggccttgcacccctctgcatgcagcacagaagggtgtgaccatgccctcagcaccactcttgtccccactgaacggcaactgagactgggtacctggagattctgaagtgccttgctgttgtctgcagcaggtacc

SEQ ID NO: 361297 - DNA, 456 bp, Homo Sapiens
gtacgtgctggagaaacactaaggttggcattgtgctcacacgggaaatgactggaggaagttgggaagaggagtcaggccggttccaccctctgggtcagaaacccggctggaaagcactggaaatagggaaatagaagaccgaaaggctgggacccccctcacacccaacctgcgtccatggccgaggttgagtgaggagtcctggagactctggcttctgtgaggtagagagtcttcagatccaacgcgcggaccttggcaaccaatttctcttcctcatcatcctcaggtacagtcctgaacccataaatatcatattcactgacaagatgaggtttaacaaatgcttgctccggctgctcttggctctcaacctgcagagcatcctccagcaactgggctatgacctcccgggtgggcccctggtcttctgagcacactggtgccttcatt

SEQ ID NO: 361298 - DNA, 922 bp, Homo Sapiens
  misc_feature (540)..(540): n is a, c, g, or t
  misc_feature (634)..(634): n is a, c, g, or t
  misc_feature (797)..(807): n is a, c, g, or t
  misc_feature (849)..(857): n is a, c, g, or t
ttcactttgtacctttctctcctcgactgtgaagcgggccgggacctgccaggccagaccaaaccggacctcgggggcgatgcggctgctgcccctgctgcggactgtcctctgggccgcgttcctcggctcccctctgcgcgggggctccagcctccgccacgtagtctactggaactccagtaaccccaggttgcttcgaggagacgccgtggtggagctgggcctcaacgattacctagacattgtctgcccccactacgaaggcccagggccccctgagggccccgagacgtttgctttgtacatggtggactggccaggctatgagtcctgccaggcagagggcccccgggcctacaagcgctgggtgtgctccctgccctttggccatgttcaattctcagagaagattcagcgcttcacacccttctccctcggctttgagttcttacctggagagacttactactacatctcggtgcccactccagagagttctggccagtgcttgaggctccaggtgtctgtctgctgcanggagaagaagtctgagtcagcccatcctgttgggagccctggagaaagtggaacatcagggtggcgagggggggacacttccagcccccctctnccctctgctaatacctgctggcttctgaattcttccggcttccggcaaaattctggggagccaaaggaaaaactttcccttttctttcccaaagaagcccagaagtccccccccaaaatccccgtggagggaaggaagggaaaccctggttggccgtgaaatnnnnnnnnnnncccattttccaaaaccccaaaaaaagggggcctctttttgtnnnnnnnnnagaaacaaaaaagaggggctggaggaggggaaccccttctgtcagagagaaccctccgctcccca

SEQ ID NO: 361299 - DNA, 1006 bp, Homo Sapiens
  misc_feature (13)..(13): n is a, c, g, or t
  misc_feature (143)..(143): n is a, c, g, or t
  misc_feature (182)..(182): n is a, c, g, or t
  misc_feature (184)..(184): n is a, c, g, or t
  misc_feature (204)..(204): n is a, c, g, or t
  misc_feature (218)..(218): n is a, c, g, or t
gtggagaagccgncagggcagggcgacccacaaaaggcttcaaatcccttcttccccttccaccagggccagcagggggcggggtggggcactccccgggccaggcccgttcatggcgttcgtacttcttaccaagtccggtnggatgtgctggaagaggggtcatggagaaggcccatgcncnaggatctgcatgatgaggantgcacatcccccanccggtgcccagcacgtgcttattgtcatcgaaccacatcttcaccttttcatagcagcccgttctccacaaaggcgtggtggcgttgcgcccgcagccctggaagttctccaggcagcagcggtcgggaacgcgtgttctccaccagcaatgggtacaagtcggggtagtcagtgacaccacagcatcgcatctcagcctggatgaggttccaggcgttcttcagccccacgttgttatcggtgtggtacagcagcgaggccttcattcaggtcattcttggcgttctcgttcaccttgtccatgtagacaaagaagaggatgagtaagatcagctctgctaggaggatgaccaacaggacgatgaaaaagctgaggaggaggcacttgttttccttgatggcccccaggcagccgaggaagcccgtcaccatgacaatggtgcctatggcaatgaccaggttggctgcagacaacgaagggaagctgggggagaaggtggcaaagttaccttgggacacggagagccagatgcccactcccagcagcccacagccacagagccagaatatcaaattgaagaggaacatcatgtacttcaagcagcagaggcagcccctggccatgttgcacttcttaaattcgcgcccgcaggacctgggggtctccgctctgctcgcgctccggcaccgccgccgccgccgccagcggaaacgtgccgggaattccgaaccggcgccagcacagaagagtaagtggggaattagggagaaaagagataaggcgata

SEQ ID NO: 361300 - DNA, 791 bp, Homo Sapiens
  misc_feature (772)..(772): n is a, c, g, or t
tcctccgtgcccagcacgtgcttattgtcatcgaaccacatcttcaccttttcatagcagcccgttctccacaaaggcgtggtggcgttgcggcccgcagccctgggagttctccatgcagcagcggtcgggaaccgtgttctcccccagcactgggtaccagtctgtgtagtcagtgacaccacagcatcgcatctcagcctggatgatgttcacaggcgttcttcagccccacgttgttctcggtgtggtacagcagcaggccttccgttcaggtccttcttggcgttctcgttcaccttgtccatgtagacaaagaagaggatgagtaagatcagctctgctaggaggatgaccaacaggacgatgaaaaagctgaggaggaggcacttgttttccttgatggcccccaggcagccgaggaagcccgtcaccatgacaatggtgcctatggcaatgaccaggttggctgcagacaacgaagggaagctgggggagaaggtggcaaagttgccttgggacacggagagccagatgcccactcccagcagcccacagccacagagccagaatatcaaattgaagaggaacatcatgtacttcaagcagcagaggcagcccctggccatgttgcacttcttaaattctgttctctctgaacttcctggaaacaccttggctgctgacaaacaaaagaaggttccaggatattccgcgcccgcaggacctgggggtctccgctctgctcgcgctccggcaccgccccgccatntacgcattcgcgaccgtcc

SEQ ID NO: 361301 - DNA, 1706 bp, Homo Sapiens
  misc_feature (413)..(413): n is a, c, g, or t
  misc_feature (972)..(1061): n is a, c, g, or t
  misc_feature (1076)..(1137): n is a, c, g, or t
cagggccagactggaaacttcttgttttttggctgccgctggcgggaccaagacttctactgggaggctgagtggcaggagctggagaagcgggactgtctgaccctcatccctgccttctcccgggaacaggagcagaaaatatatgtgcagcaccggctccgggagctggggtcgcttgtgtgggaactgctggaccgccagggtgcatacttctacctggcaggcaacgccaagtccatgccagcggacgtctcggaagccctgatgtccatcttccaggaggagggtggactctgcagcccggacgcagccgcgtatctagccaggctccagcagacacggcgcttccagacagagacgtgggcctgaggcccgcggctgcccgtgccccctctgacagccatcctccntgggagcccaggaaggcatccacgagggagctcctggccagcagccgtcatcctctcggaccagccagctggtcctctgggaacagccagctcccgagcacagccgcactcctgttgaccctggatcccaccctttgagcctgaccccactgcagcctctgcccagccagccctgcgctcccccaccctgacagtgagctgtgtcctcgtccccccacccccttcccagtcaaggtggtggcctgggccgctccacctcaccggtgcagtgacccaggacggcatcagcagcccagtgagcaccaggggtggcatagggcacccatgaggctgcgctgcactcctctgccctggggccacctcggctgctgcagcctgcccagcagcacattccagtcactgcccccgcactcccacagggctcaggctgggctcagaggccactgagatgccagctccttgagagcagtgggggtgtcccaggccagagcagcctcttcctctcctggtcccagaaaaacccttgcagtaaatggtggcctctgggtggttacttctnnnnnnnnnnnnnnnnnnnnnnnnnnnnnnnnnnnnnnnnnnnnnnnnnnnnnnnnnnnnnnnnnnnnnnnnnnnnnnnnnnnnnnnnnncttgtccgcccgccnnnnnnnnnnnnnnnnnnnnnnnnnnnnnnnnnnnnnnnnnnnnnnnnnnnnnnnnnnnnnncttggtcattacttgtttcccaagaaacccggtcatagattacagtttggttttccagtattaaaaaacgccggccgggcatccgaatttctctcaacattccccaaaggaaagtcttcacggcactcttttggcatctatctcaaggaaccctcaggggagtctctttattagtttttccccgccgcccttgcccactgatccccagaagcggttgtaatccccctaataccttcccggcccgccagggaaacccgttacaaaaaggggaattaattaacaccggaaaccgcccaccgactttacaaacccctttggagcaccctggggtaataaaaaattttggccccaagggggaaaatcgcgggcgccgaaaagaaactttttctcccatatttggcgcccactctcaacatttaaaaaacgcggcccgaaacctccaccctgggggtacttttccggcacccctcaaaaactttttacctctcggattaaaacctcttttaagggagaattaagggctcagaatttttcccaaccttaatacccgcccccaaaatccttttttg

SEQ ID NO: 361302 - DNA, 796 bp, Homo Sapiens
ggatggctcggtcctctcggtggattcgtgaagtccctctctgtccagcggtgcgtcattgattgggggacttgacctcccttcaggtggtcttcggatcggatgttggagccttcgcccgcgtcccccatcccttgggcccaaatgactccctccggtgctggtggcttgctctttgaaggggaagcgtagccttgcatgtcctgagggggcacttaatcgggtctgggggccttgcgtcagccccccgccccaggcccccagagccctgcagtccctgcagccgtagctgctcctgcttgagccagcgaagacgaccacgacggaaggcagggtcctcctccatgagccgtgacacccgctcccagcttgacagtggtggcgaggggggccgggctgacggcatgcggtcactgggggctgcctcctctgctgcctctgatccttcaggcggggcccaggggacctcaccaccttcttcattctcatcctcatgatcctgggccagggggatgaccctctccatgcggagcatgcggtcccgcagggcctgcagctcccggtccttgctgctgttctgcagcttcacctcctgcagaatccccgtcagcttgtcgatgtgggcccggaggtcctccacctccgcccctcgggctccctcctcactgccaccaccactgccagctccacctccttcctcctcgcctacagtgtcccagacatcccgggccacagccctccaggcgtctccggggccgtctggccctcgtgccgaattcgccacccaggcctcgct

SEQ ID NO: 361303 - DNA, 906 bp, Homo Sapiens
tatgatggaggaagggatgaaaaaaggggaagagaatggcttccagccaacctgcggagtttgccccccggtgcttttcctgtaccaggctccgagacatagagcaactcacggggaagcactggaagatgcctccgataaggttactgaggcccagggccaccagctcctggttgctgtccacccggtagccgtgcctcagggcgaagatcttccccagtgagatggcaatggcaaacccaaccacagcgatggtgaaggcgctgcccacgagctttgagaacagctgggtgttgggggccactgggggcaccagccctgcagggatgttgcccacgacatctacctcaaatctgtgctttagacccatgccataggagatgcctgtggccccgatgagcgtgagcagctccccgggtatcggcatgggcagctgctgctgcagcttgtcattcaacagcttcaccaccacgagcaccaccccagccacagctgcagtgaccacggtgccaaccttgctctggggcagcttccagcagacctccagcactgtatagatgagggacagtggcccagagtggctgctcagatggaggccaaacacatacttgagctgtgagacgaagacctgcacagctgcagctgtggtatagcctcggacaagaggttctgacaggtaggtgaccacgaagccgaagtggatcaggcccagccccacctggaagaggccaaccaggacactgagtgtggaggccacctgtacccgggcagcatctctggctgtctcattgatcatggagtcgttcaaggcctgcggggccagggattctgtcacactgcccaccatcacagacatgacagcaaaggtccccacggagatgtgccgggaagtccaaacaggaagta

SEQ ID NO: 361304 - DNA, 869 bp, Homo Sapiens
agcggagtgggcggccgcgcgcagcacgctcaaggccgggatggcggcggcggcggcggcaggaagcgggacgccccgagaggaggagggacctgctggggaggcagcggcctcgcagccccaggccccaacgagtgtgcctggggctcgtctctcgaggttgcctctggcgcgagtgaaggccttggtgaaggcagatcccgacgtgacgctagcgggacaggaagccatcttcattctggcacgagccgcggaactgtttgtggagaccattgcaaaagatgcctactgttgcgctcagcagggaaaaaggaaaacccttcagaggagagacttggataatgcaatagaagctgtggatgaatttgcttttctggaaggtactttagattgattgccgagcggggcagttttgtgagccttcatctgaagccttcagttcacccctctgcacaggcctcagctttgaagaacggagtctttgcacttacacacactcttcctgttctgccttcacctatgccgggataagcagagatctcatcaattagctcttctctgcaaggtcttccactatttctgtctgtcttccatatcaagcctggatgcagctgctgctgcttagagcagagatgaagaaagtgttctgcataagtggcttcctgaatgatgaggaccagaataaaggtttttgatccccacacccacccatccctaatccattcctgtcggcccgcctcgggcccctcaaaagctttctacaccattcctttgggcgcgcgggtccagtaaggtaagtggaacctgggccctacttgtttccctaaggaacacccgggtcacggaataaggccttggcattcttaccc

SEQ ID NO: 361305 - DNA, 1165 bp, Homo Sapiens
  misc_feature (66)..(125): n is a, c, g, or t
aaaaggggttttccgttttgtgtcccgtgccccctttggggggccaaaaaccccaagcccaaatcnnnnnnnnnnnnnnnnnnnnnnnnnnnnnnnnnnnnnnnnnnnnnnnnnnnnnnnnnnnntggagggctttattaagagggaaacacttgtgaaggccaagaacggaaggaaaacttgagggtgttatggagggaaacttgaaagcatccaggaggaaattgaggcggtatggaggaaaactggggcggtatggaggaaacttggggcgtatggaggaaaacttgggggcgtacaaaaggaaaattgaggcggtatggaggaaaactgggggcgtatggaggaaaactgaaggcatatggaggaaaattgtggggctgtacagagaaaatttgagggcgtatggaggaaactgtggggtgtatggaagaaaactggggggcgtatggaggaaattgaggcatatggaggaaactgtggggtgtatggaggaaactgggcatatggaggaaactgtggggcgtatggaagaaactgtggggcgtatggaggaaactgtggggcgtatggaggaaactgtggggcgtatggaggaaactggggggcgtatggaggaaactgggcatatggaggaaactgtggggtgtatggaggaaactgggcatatggaggaaactgtggggtgtatggaagaaactggggggcgtatggaggaaattgaggcatatggaggaaactgtggggtgtatggaggaaactgggcatatggaggaaactgtggggcgtatggaggaaactgtggggtgtatggaggaaaccggggcgtatggaggaaactggggcatacggaggaaactgtggggcgtacggaggaaattgaggcatatggaggaaactggggcatacggaggaaacgcgggtgtacggagcaaactgtgaggcatacggaggaaacgctgtgaggcatacggcgaagcgtcgcagaaagaagccagtgtggttgggcagcttccccaagaagcctgggactcgtagccagggcctctggtgagcgcggtgcctggacccgcctaggaggacaggggctgtgtctgtgccggccacaggcagtgactgtaagccctggatgagatcccagggaattcccggacccggtaccagc

SEQ ID NO: 361306 - DNA, 1647 bp, Homo Sapiens
gggtccggaattcccgggataccgggagaggctgtgtcaaaggcgccatgagcaagatcagcgaggccgtgaagcgcgcccgcgccgccttcagctcgggcaggacccgtccgctgcagttccggatccagcagctggaggcgctgcagcgcctgatccaggagcaggagcaggagctggtgggcgcgctggccgcagacctgcacaagaatgaatggaacgcctactatgaggaggtggtgtacgtcctagaggagatcgagtacatgatccagaagctccctgagtgggccgcggatgagcccgtggagaagacgccccagactcagcaggacgagctctacatccactcggagccactgggcgtggtcctcgtcattggcacctggaactaccccttcaacctcaccatccagcccatggtgggcgccatcgctgcagggaacgcagtggtcctcaagccctcggagctgagtgagaacatggcgagcctgctggctaccatcatcccccagtacctggacaaggatctgtacccagtaatcaatgggggtgtccctgagaccacggagctgctcaaggagaggttcgaccatatcctgtacacgggcagcacgggggtggggaagatcatcatgacggctgctgccaagcacctgacccctgtcacgctggagctgggagggaagagtccctgctacgtggacaagaactgtgacctggacgtggcctgccgacgcatcgcctgggggaaattcatgaacagtggccagacctgcgtggcccctgactacatcctctgtgacccctcgatccagaaccaaattgtggagaagctcaagaagtcactgaaagagttctacggggaagatgctaagaaatcccgggactatggaagaatcattagtgcccggcacttccagagggtgatgggcctgattgagggccagaaggtggcttatgggggcaccggggatgccgccactcgctacatagcccccaccatcctcacggacgtggacccccagtccccggtgatgcaagaggagatcttcgggcctgtgctgcccatcgtgtgcgtgcgcagcctggaggaggccatccagttcatcaaccagcgtgagaagcccctggccctctacatgttctccagcaacgacaaggtgattaagaagatgattgcagagacatccagtggtggggtggcggccaacgatgtcatcgtccacatcaccttgcactctctgcccttcgggggcgtggggaacaccggcatgggatcctaccatggcaagaagagcttcgagactttctctcaccgccgctcttgcctggtgaggcctctgatgaatgatgaaggcctgaaggtcagataccccccgagcccggccaagatgacccagcactgaggaggggttgctccgcctggcctggccatactgtgtcccatcggagtgcggaccaccctcactggctctcctggccctgggagaatcgctcctgcagccccagcccagccccactcctctgctgacctgctgacctgtgcacaccccactcccacatgggcccaggcctcaccattccaagtctccacccctttctagaccaataaagagacaaatacaattttctaactcaaaaaaa

SEQ ID NO: 361307 - DNA, 706 bp, Homo Sapiens
tcttccctcccaggctccatgcgttacagggttcaggtgcttgtcagcagcggtcatgatgatcttctcccacccccgtgctgcccgtgtacaggatatggtcgaacctctccttgagcagctccgtggtctcaggtacacccccattgattactgggtacagatccttgtccaggtactgggggatgatgttatccagcaggctcgccatgttctcactcagctccgagggcttgaggaccactgcgttccctgcagcgatggcgcccaccatgggctggatggtgaggttgaaggggtagttccaggtgccaatgacgaggaccacgcccagtggctccgagtggatgtagagctcgtcctgctgagtctggggcgtcttctccacgggctcatccgcggcccactcagggagcttctggatcatgtactcgatctcctctaggacgtacaccacctcctcatagtaggcgttccattcattcttgtgcaggtctgcggccagcgcgcccaccagctcctgctcctgctcctggatcaggaactacagcgcctccagctgctggatccggaactgcagcggacgggtcctgcccgagctgaaggcggcgcgggcgcgcttcacggcctcgctgatcttgctcatggcgcctggggacagagagcacctgcagctggctgaggggcacgagcgcgcccatccctt

SEQ ID NO: 361308 - DNA, 920 bp, Homo Sapiens
aagcgaggcctgggtggcgaattcggcacgagggttggtctgggattgtgccatcagctttgcaagcaagcgccatgagcaagatcagcgaggccgtgaagcgcgcccgcgccgccttcagctcgggcaggacccgtccgctgcagttccggatccagcagctggaggcgctgcagcgcctgatccaggagcaggagcaggagctggtgggcgcgctggccgcagacctgcacaagaatgaatggaacgcctactatgaggaggtggtgtacgtcctagaggagatcgagtacatgatccagaagctccctgagtgggccgcggatgagcccgtggagaagacgccccagactcagcaggacgagctctacatccactcggagccactgggcgtggtcctcgtcattggcacctggaactaccccttcaacctcaccatccagcccatggtgggcgccatcgctgcagggaacgcagtggtcctcaagccctcggagctgagtgagaacatggcgagcctgctggctaccatcatcccccagtacctggacaaggatctgtacccagtaatcaatgggggtgtccctgagaccacggagctgctcaaggagaggttcgaccatatcctgtacacgggcagcacgggggtggggaagatcatcatgacggctgctgccaagcacctgacccctgtcacgctggagctgggagggaagagtccctgctacgtggacaagaactgttgacctggacgtgggcctgccgacgcatcgcctggggggaaattcatgaacaggggccagaccctgcggggcccccagactacatccctctggtgacccctccgatccggaacccaatttgtgggagaagccttcaagaagtccccctggaaagaggtcctaccggggaaaaatgct

SEQ ID NO: 361309 - DNA, 1330 bp, Homo Sapiens
caggcagtatctagggtttaaggtagcgaggctgggtgcagaattcggcacgaggagaaaccccggactgggatcatggcagccgagactcggaacgtggccggagcagaggccccaccgccccagaagcgctactaccggcaacgtgctcactccaaccccatggcggaccacacgctgcgctaccctgtgaagccagaggagatggactggtctgagctatacccagagttcttcgctccactcactcaaaatcagagccacgatgacccaaaggataagaaagaaaagagagctcaggcccaagtggagtttgcagacataggctgtggctatggtggcctgttagtggaactgtcaccgctgttcccagacacacttattctgggtctggagatccgggtgaaggtctcagactatgtacaagaccggattcgggccctacgcgcagctcctgcaggtggcttccagaacatcgcctgtctccgtagcaatgccatgaagcaccttcctaacttcttctacaagggccagctgacaaagatgttcttcctcttccccgacccacatttcaagcggacaaagcacaagtggcgaatcatcagtcccaccctgctagcagaatatgcctacgtgctaagagttggggggctggtgtataccataaccgatgggctggagctacacgactggatgtgcactcatttcgaagagcacccactgtttgagcgtgtgcctctggaggacctgagtgaagaccccgttgtgggacatctaggcacctcaactgaggaggggaagaaagttctacgtaatgggagggaagaatttcccagccatcttccgaagaatacaagatcccgtccctccaggcagtgacctcccaaaccagcctgcctggtcactgactgcttactctaccctagctggacctcgtctcccagggactagagaaaagagcaggagtcctgggtcttcccagttgagaatgctggagctgagacacagtactctcttaaagaaggtggggaagctgcccagggcagaacccactggtgttcatgactacccctggctcctctcaccttgtccctccactgccaacagaaaacaaagcagctgactgagatggtcaaaggactttggaccataggggatctttggaaggctgtggggtcttgctcttccttagcactcctttctccttgtgagatctctcctcagctggaatgaggaatgtagtccatctaaactgcttgctaggctcaattaccacttctgtttgctttgtggatcctgggataacatgtatatgtgtacacaaaaaaaa

SEQ ID NO: 361310 - DNA, 343 bp, Homo Sapiens
  misc_feature (314)..(314): n is a, c, g, or t
acttcatggcagccgagactcggaacgtggccggagcagaggccccaccgccccagaagcgctactaccggcaacgtgctcactccaaccccatggcggaccacacgctgcgctaagacaaacacaaagtaggatcccagtgcattaggcagccagtctcgggagaaggggaacttgtgccccagaaagggcagttacccggccaggttcacatcaaccgccagaagtggagttgggcagccctgtgaagccagaggagatggactggtctgagctatacccagagttctttcgcttccactcactcaaaattnagagccacgatggacccaaaggataagga

SEQ ID NO: 361311 - DNA, 662 bp, Homo Sapiens
  misc_feature (167)..(221): n is a, c, g, or t
  misc_feature (514)..(514): n is a, c, g, or t
ttccaggccatggctgagaagttcctggagggcgaggtgcccctggaaacgttcctggagaatttttcctccatgaggatgctgtcccacctgcgccgggttcgcgtggaaaagctccaggaagtggtgaggaagcccagggcttcccaggagctggccggcgatgnnnnnnnnnnnnnnnnnnnnnnnnnnnnnnnnnnnnnnnnnnnnnnnnnnnnnnntgtggttgaagagcagccgcagccaccatcagccatgcctccctaccctttgccctacagcccatcccccagcctgcctgtgggccccactgcccatggagccctgccaccggcccctttcccagtagtgtcccagccctccttctacagcgggcctctgggccccacttacccggcagcccagcttggacccaggggtgctgcgggttactcctggtccccacagaggagcatgccaccccggccgggctatcctgggaccccaatgggtgcctctgggcctgggtaccccnttgcggggaggcagggcccccagtcctggttatcctcaacagtccccataccccgcaacacggaggaaaacctccctacccaatacagcctcagctccccagctttccaggccagccccagccctcagtgcccctgcagccccctact

SEQ ID NO: 361312 - DNA, 1077 bp, Homo Sapiens
aggaagcgaggcctgggtggcgaattcggcacgaggctgcggtttaacccgcggtggcggcggcgacggcggccctggcagggaaggatggagacgctgaaggataagaccctgcaggagctggaggagttgcagaatgactcggaggcgattgaccagctggccctggagtcccctgaggtccaggacctacagctggaacgggagatggcactggccaccaaccggagcctggcagagcggaacttggagttccagggtcccctggagatcagccgctcaaacctctcggatagataccaggagctccggaagctcgtggagcggtgccaggagcagaaggcaaagctggagaaattttcttcagcactgcagccagggaccttgttagaccttctgcaggtggaaggcatgaagatcgaagaagagtccgaggccatggctgagaagttcctggagggcgaggtgcccctggaaacgttcctggagaatttttcctccatgaggatgctgtcccacctgcgccgggttcgcgtggaaaagctccaggaagtggtgaggaagcccagggcttcccaggagctggccggcgatgcccctccaccccgtccaccacccccggtgcgcccagtcccccagggaacaccccctgtggttgaagagcagccgcagccaccatcagccatgcctccctaccctttgccctacagcccatcccccagcctgcctgtgggccccactgcccatggagccctgccaccggccccttttcccagtagtgtcccagcccctccttctacagcgggccctctggggccccacttacccggcagcccagcttgggacccaaggggtgctgccgggttactcctggtccccacagaggagcatgcccaccccggcccggggctatcctggggaaccccaatgggggccctccgggcctggggaaccccctttgccggggaagccagggcccccccgatcctgggttattccttcaacaggtccccataaccccccccaacgggaagaaaaaccctccctaccccaatacaagcctttaggcttcccaaa

SEQ ID NO: 361313 - DNA, 885 bp, Homo Sapiens
gagagtcaggactcccaggacagagagtgcacaaactacccagcacagccccctccgccccctctggaggctgaagagggattccagcccctgccacccacagacacgggctgactggggtgtctgccccccttgggggtgggcagcacagggcctcaggcctgggtgccacctggcacctagaagatgcctgtgccctggttcttgctgtccttggcactgggccgaagcccagtggtcctttctctggagaggcttgtggggcctcaggacgctacccactgctctccgggcctctcctgccgcctctgggacagtgacatactctgcctgcctggggacatcgtgcctgctccgggccccgtgctggcgcctacgcacctgcagacagagctggtgctgaggtgccagaaggagaccgactgtgacctctgtctgcgtgtggctgtccacttggccgtgcatgggcactgggaagagcctgaagatgaggaaaagtttggaggagcagctgactcaggggtggaggagcctaggaatgcctctctccaggcccaagtcgtgctctccttccaggcctaccctactgcccgctgcgtcctgctggaggtgcaagtgcctgctgcccttgtgcagtttggtcagtctgtgggctctgtggtatatgactgcttcgaggctgccctagggagtgaggtacgaatctggtcctatactcagcccaggtacgagaaggaactcaaccacacacagcagctgcctgcctgccctggctcaacgtgtcagcagatggtgacaaggtgcatctggttctgaatgtctctgaggagcagcacttcgggctcttccctgtactggaatcaggtccagggcccccaaaaaccc

SEQ ID NO: 361314 - DNA, 1061 bp, Homo Sapiens
  misc_feature (152)..(160): n is a, c, g, or t
cgtgctggaagtaggaggagagtcaggactcccaggacagagagtgcacaaactacccagcacagccccctccgccccctctggaggctgaagagggattccagcccctgccacccacagacacgggctgactggggtgtctgccccccttnnnnnnnnncagcacagggcctcaggcctgggtgccacctggcacctagaagatgcctgtgccctggttcttgctgtccttggcactgggccgaagcccagtggtcctttctctggagaggcttgtggggcctcaggacgctacccactgctctccgggcctctcctgccgcctctgggacagtgacatactctgcctgcctggggacatcgtgcctgctccgggccccgtgctggcgcctacgcacctgcagacagagctggtgctgaggtgccagaaggagaccgactgtgacctctgtctgcgtgtggctgtccacttggccgtgcatgggcactgggaagagcctgaagatgaggaaaagtttggaggagcagctgactcaggggtggaggagcctaggaatgcctctctccaggcccaagtcgtgctctccttccaggcctaccctactgcccgctgcgtcctgctggaggtgcaagtgcctgctgcccttgtgcagtttggtcagtctgtgggctctgtggtatatgactgcttcgaggctgccctagggagtgaggtacgaatctggtcctatactcagcccaggtacgagaaggaactcaaccacacacagcagctgcctgactgcagggggctcgaagtctggaacagcatcccgagctgctgggccctgccctggctcaacgtgtcagcagatggtgacaacgtgcatctggtgtctgaatgtctctgaagagcagcacttcgggcctctccctggaactggaattcagggtccaggggcccccccaaaaaaccccggtgggcaccaaaaaaccttgactgggaacccgccaaaatccattaaccctttggaaccccacaccgaaccctgggtttccccggcgccccccctggggaaaat

SEQ ID NO: 361315 - DNA, 1144 bp, Homo Sapiens
  misc_feature (184)..(191): n is a, c, g, or t
gctggaccggtccggaattcctgcgatctccgtgctggaagtaggaggagagtcaggactcccaggacagagagtgcacaaactacccagcacagccccctccgccccctctggaggctgaagagggattccagcccctgccacccacagacacgggctgactggggtgtctgccccccttgtnnnnnnnncagcacagggcctcaggcctgggtgccacctggcacctagaagatgcctgtgccctggttcttgctgtccttggcactgggccgaagcccagtggtcctttctctggagaggcttgtggggcctcaggacgctacccactgctctccgggcctctcctgccgcctctgggacagtgacatactctgcctgcctggggacatcgtgcctgctccgggccccgtgctggcgcctacgcacctgcagacagagctggtgctgaggtgccagaaggagaccgactgtgacctctgtctgcgtgtggctgtccacttggccgtgcatgcctctctccaggcccaagtcgtgctctccttccaggcctaccctactgcccgctgcgtcctgctggaggtgcaagtgcctgctgcccttgtgcagtttggtcagtctgtgggctctgtggtatatgactgcttcgaggctgccctagggagtgaggtacgaatctggtcctatactcagcccaggtacgagaaggaactcaaccacacacagcagctgcctgccctgccctggctcaacgtgtcagcagatggtgacaacgtgcatctggttctgaatgtctctgaagagcagcacttcggcctctccctgtactggaatcaggtccaggggccccccaaaaccccggtgggcacaaaaacctggtgaggcctccccccttccccagtccattcccactgtaggccgatgcctgtgcaaaggacgcagtgccatatcaaaaaaggattcttgaaaaggactcaccccaaccaagggaaaaatttggtgggggaacttctgccctttcgggtttcccttgaacttttgggcttcttcctcttttcctccttatctttctccaacccccctttccctttaattgttccccagaaactggaacccccaaaatcatttacctttgaaaccacac

SEQ ID NO: 361316 - DNA, 2075 bp, Homo Sapiens
  misc_feature (1833)..(1848): n is a, c, g, or t
  misc_feature (1985)..(1985): n is a, c, g, or t
  misc_feature (1997)..(1997): n is a, c, g, or t
  misc_feature (2001)..(2001): n is a, c, g, or t
  misc_feature (2005)..(2005): n is a, c, g, or t
  misc_feature (2018)..(2018): n is a, c, g, or t
ccggcggtcgcagagccaggaggcggaggcgcgcgggccagcctgggccccagcccacaccttcaccagggcccaggagccaccatgtggcgatgtccactggggctactgctgttgctgccgctggctggccacttggctctgggtgcccagcagggtcgtgggcgccgggagctagcaccgggtctgcacctgcggggcatccgggacgcgggaggccggtactgccaggagcaggacctgtgctgccgcggccgtgccgacgactgtgccctgccctacctgggcgccatctgttactgtgacctcttctgcaaccgcacggtctccgactgctgccctgacttctgggacttctgcctcggcgtgccacccccttttcccccgatccaaggatgtatgcatggaggtcgtatctatccagtcttgggaacgtactgggacaactgtaaccgttgcacctgccaggagaacaggcagtggcagtgtgaccaagaaccatgcctggtggatccagacatgatcaaagccatcaaccagggcaactatggctggcaggctgggaaccacagcgccttctggggcatgaccctggatgagggcattcgctaccgcctgggcaccatccgcccatcttcctcggtcatgaacatgcatgaaatttatacagtgctgaacccaggggaggtgcttcccacagccttcgaggcctctgagaagtggcccaacctgattcatgagcctcttgaccaaggcaactgtgcaggctcctgggccttctccacagcagctgtggcatccgatcgtgtctcaatccattctctgggacacatgacgcctgtcctgtcgccccagaacctgctgtcttgtgacacccaccagcagcagggctgccgcggtgggcgtctcgatggtgcctggtggttcctgcgtcgccgaggggtggtgtctgaccactgctaccccttctcgggccgtgaacgagacgaggctggccctgcgcccccctgtatgatgcacagccgagccatgggtcggggcaagcgccaggccactgcccactgccccaacagctatgttaataacaatgacatctaccaggtcactcctgtctaccgcctcggctccaacgacaaggagatcatgaaggagctgatggagaatggccctgtccaagccctcatggaggtgcatgaggacttcttcctatacaagggaggcatctacagccacacgccagtgagccttgggaggccagagagataccgccggcatgggacccactcagtcaagatcacaggatggggagaggagacgctgccagatggaaggacgctcaaatactggactgcggccaactcctggggcccagcctggggcgagaggggccacttccgcatcgtgcgcggcgtcaatgagtgcgacatcgagagcttcgtgctgggcgtctggggccgcgtgggcatggaggacatgggtcatcactgaggctgcgggcaccacgcggggtccggcctgggatccaggctaagggccggcggaagaggccccaatggggcggtgaccccagcctcgcccgacagagcccggggcgcaggcgggcgccagggcgctaatcccggcgcgggttccgctgacgcagcgccccgcctgggagccgcgggcaggcgagactggcggagcccccagacctcccagtggggacggggcagggcctggcctgggaagacacagctgcagatcccaggcctctggcgccccccctcaagattaccaagccaggacacctcaaggtctccagccccactaccccaccccaatccctggaattcnnnnnnnnnnnnnnnnaagacaggggtctcggtcccgttggccaatgtttgaaaagcctgtggccccctcaagggttcccctgtacacaccccgagatccgggggttcaaggggacccgtccccccctctatccctcttgaaaggcctcctgnctaatgggggcncaanctcnacccgggatcatngtcttggggtgtttgtgcccaacaaggagcgtgaccctctcgaggcctgccaaggcg

SEQ ID NO: 361317 - DNA, 1166 bp, Homo Sapiens
  misc_feature (43)..(43): n is a, c, g, or t
acactgttagtttccggcaccaaagaaggcacagtgaatattntgggacctcacaacggccaccttaatgcaccagattccatgccattcagggattgtatgtgacactgcttttagcccagatagtcgccatgtcctcagcacaggaacagatggctgtcttaatgtcattgatgtgcagacaggaatgctcatctcctccatgacatcagatgagccccagaggtatagtttgtgagttactgggggcgaagacatttacagacatgttcatgatcacttcatttgggcttacattggccagttcaacatatccttccttcatgatgaagaaaggactatttctaaatcattcttgcaggtgctttgtctgggatggaaattccgttttatctggcagtcagtctggtgaactgctcgtttgggacctccttggagcaaaaatcagtgagagaatacagggccacacaggtgctgtgacatgtatatggatgaatgaacagtgtagcagtatcatcacaggaggggaagacagacaaattatattctggaaattgcagtattaagtgccttttcctctcctgaatattaaattgaactctatttaatgcatttttaaaccaaacttttaaacggactggtgaatgtgcaatgttagtaattagaagttttaccacatggaaaatttgtggttttaaactttctaaatcatggtgacttcattgaaagccattagttgctattctcttagggcagataaaatgcggctgtgttaggaaaaacatgttacactgtaaggcagatgatcgtccccgtatgatgattgtcagaagacaggactaagtagccagagaatagctaagagataaattggggctggggaaacttgttcagaaagcactgaacaattaagaaattttccaagaaaatgtgcagtattctctgctacttctgaatctgttttgtcttcctaatctatcacaattgccacccatcgggttttgggtgtgtgttttcatagcgtggttactttctataatgctgtacccagattctaagaacctggagaaggattagcagttcttagtaagtttactgtgtataggaacggtttgtatttcattacagctattcatcttttctacattaaaaatatttttctctaa

SEQ ID NO: 361318 - DNA, 1435 bp, Homo Sapiens
  misc_feature (955)..(963): n is a, c, g, or t
  misc_feature (1032)..(1098): n is a, c, g, or t
  misc_feature (1204)..(1225): n is a, c, g, or t
cttttaccaggagatgccactgtcataacttcttcatgggataataatgtctatttttattccatagcatttggaagacgccaggacacgttaatgggacatgatgatgctgttagtaagatctgttggcatgacaacaggctatattctgcatcgtgggactctacagtgaaggtgtggtctggtgttcctgcagagatgccaggcaccaaaagacaccactttgacttgctggccgagctggaacatgatgtcagtgtagatacaatcagtttaaatgctgcaagacactgttagtttccggcaccaaagaaggcacagtgaatatttgggacctcacaacggccaccttaatgcaccagattccatgccattcagggattgtatgtgacactgcttttagcccagatagtcgccatgtcctcagcacaggaacagatggctgtcttaatgtcattgatgtgcagacaggaatgctcatctcctccatgacatcagatgagccccagaggtgctttgtctgggatggaaattccgttttatctggcagtcagtctggtgaactgctcgtttggggacctccttggagcaaaaatcagtgagagaatacagggccacacaagtgctgtgacatgtatatggatgaatgaacagtgtagcagtatcatcacaggaggggaagacagacaaattatattctggaaattgcagtatttaagtggcctttttcctctcctgaattattaaattgaactctatttaatgcatttttaaaccaaacttttaaacggactggtgaatgtgcaatgttagtaattacaagtttcaccccatggaaaatttgcggctatccccttccaacaccctggccccttcattcaaccaccccagctccattccactagccgcccccaaaacgccggcccgactcacacaagcatccaggcccggaagnnnnnnnnngcacgccacataacagaagggagaagcaagtctagacgaccccaatatacgagcaaaccacggaatctnnnnnnnnnnnnnnnnnnnnnnnnnnnnnnnnnnnnnnnnnnnnnnnnnnnnnnnnnnnnnnnnnnnggacatcgacaggcgcccagccgactcgtgaatcagcaactagccagcactttcagacaacactccaaacacactacccacacacccgcacggccagcttccatgnnnnnnnnnnnnnnnnnnnnnnacacaactcaccagccccgccacaacgcagcaaagagacgacacataccgcccctacaccaagacctaaccccgcgcccgaccccgcactcctcatgcagcacacgccccgcccacccagtagaccggcgcgacctcctgacgtaacgcacaagctgacacatcaacgaacgcggactagaacgacaagctatatatactaacgacagac

SEQ ID NO: 361319 - DNA, 475 bp, Homo Sapiens
tccaaatccaggggacttccatggaagcccattagttgcccaatccccttagggccggataaaaatgcggcctgtgttagggaaaaaacatgttacactgtaaggccagatgaaccgtcccccgtatgatgattgtcagaagacaggacctaagtagccagagaatagcctaagagataaattgggctggggaaacttgtcagaaagcactgaacaattaagaaattttccaagaaaatgtgcagtattctctgctacttctgaatctgttttgtcttcctaatctatcacaattgcccacccatcgggttttgggtgtgtgttttcatagcgtggttactttctataatgctgtacccagattctaagaacctggagaaggattagcagttcttagtaagtttactgtgtataggaacggtttgtatttcattacagctattcatcttttctacattaaaaatatttttctcta

SEQ ID NO: 361320 - DNA, 826 bp, Homo Sapiens
  misc_feature (116)..(116): n is a, c, g, or t
  misc_feature (149)..(149): n is a, c, g, or t
aagggccccctgaaatgccaaaagggcaggccacagaggaaggaagaccagcactgtgaggaggatggtcacgtacagcctggtcagcggcatcttccgggatccacagagaatcntgaccagcaggaccaggctggacccacagaganccacacataaaaaaaccagccacgcgattgtaatgaaatctgacgtttcacaccaaacagaatcagcaccactaaacaagaagccacagaacatccactccaagatactcagcagcagggacagggcccagagcaggacacacacgaccgatgacaggtatctggggcggcggcagcgataccagatgggccacaggacggacaggcagcgctcggtgctgacggtgctcagcatgctcaggcctgcaaggtaggcacaggtcatcacagtggtgaagaagctagggaaattgatggagatggaacagaagaagttactgaggtacaccaggcaatttataatctggaagcagaggaagaggaagtcggccccggccaggctgaggacgtagacagagaaggcgttcctgcgcatgcggaagcccaggagccagagcacaaacccgtttcctaccagcccgaccagggcaatgaaaaggatcaggaagaccgggatcagggtctccttgccacaaagcagaagaagggcttggtcatttccattcactgttgtactttctgttccccaggccggggtggttggatccatgctcagaaaacctccactggtgccccttaacacccttctttctactggagttggtgagttgagaagtgctttcctgggactggcaaac

SEQ ID NO: 361321 - DNA, 1325 bp, Homo Sapiens
  misc_feature (1019)..(1019): n is a, c, g, or t
  misc_feature (1231)..(1256): n is a, c, g, or t
aggctgagcggccaggcctccagaacatggagctggcgcctgtgcagcgcaagatcgaggctcgctcggcagaggactccttcacaggcttcgtccggaccctgtactttgctgacacctacctgaaggacagctcccggcactgcccctcgctgtgggctggcaccaatgggggcaccatctatgccttctccctgcgtgtgcctcccgccgagcggagaatggatgagcctgtgcgggcagagcaggccaaggagatccagctgatgcaccgggcgccggtggtgggcatcctggtgctcgacggacacagcgtaccccttcccgagcccctcgaagtggcccatgatctgtcgaagagccctgacatgcagggaagccaccagctgctcgtcgtatcagaggagcagttcaaggtgttcacgctgcccaaggtgagtgccaagctgaagttgaagctgacggccctggagggctcaagagtgcggcgggtcagcgtggcccacttcggcagtcgtcgagccgaggactacggggagcaccacctggcagtccttaccaacctgggcgacatccaggtggtctcgctgcccctgctcaagccccaggtgcgctacagctgcatccgccgggaggacgtcagtggcatcgcctcctgcgtcttcaccaaatatggccaaggcttctacctgatctcaccctcggagtttgagcgcttctctctctccaccaagtggctggtggagccccggtgtctggtggattcagcagaaaccaagaaccaccgccctggtaacggtgcgggccccaagaaagccccgagccgagccaggaactcagggactcagagtgatggcgaggagaagcagcccggcctggtgatggagcgcgctctgctcagtgatgagagagtcctgaaggaaatccagagcacactggagggagaccgcgggtgaggcaccgcccaggccagctggggtgggcccgaggctctgccagagggctcaggggagcgctgnagagtggaggtccctgaggccatgactcccctgtctttgcctgtgcaggagcggcaactggcgttcacatcgagcccgccgtggggtgcagcctcaccaatggcgggaaagtgagtgggctgaacgtcccagctgcgcgatgagcacacactactactgatgggccctttcgggggggtccctgcccccaaccggagaaggccggtgcacannnnnnnnnnnnnnnnnnnnnnnnnnattcccgggtttccaaaaatggcagctggccccggggccctccgggaagaagaaaaaaaccccacgtcc

SEQ ID NO: 361322 - DNA, 1467 bp, Homo Sapiens
  misc_feature (1214)..(1214): n is a, c, g, or t
aattcccgggatctccgccccacgagcacctgtttccgagcggagagcgcgggccgttttctttcctggtgtcccgtcgcggcttgggacccggcaagatgggcaagaagggcaagaaggagaagaagggccgcggcgcggagaagacggccgccaagatggagaagaaggtgtctaagcgctcgcggaaggaggaggaagacctggaagcgctcatagcccatttccagacactcgatgccaagaggactcagactgtggaacttccgtgccccccaccctcaccaaggttaaatgcctccctctcggttcatcctgagaaagatgagttaatcctttttggaggtgaatatttcaacggccaaaaaacttttttgtataacgagctctatgtctacaatatcagaaaggacacctggaccaaagttgacatccccagtccacctccgaggcgctgtgctcaccaggcggtggtagtgcctcaaggtggcggacagctgtgggtctttggaggggagtttgcctctcccaacggagagcagttctaccactacaaggatctctgggtcctgcatttggccaccaagacctgggaacaagtcaaggattacatctactacaacgacgtgtatgcctttaatctggacaccttcacatggagcaagctgtccccgtcagggacggggcccacacccagatcaggctgccagatgtccgtcactccccagggcggcatcgtcgtctatgggggctactcgaaacagagagttaagaaagacgtggacaagggcacacggcactcagacatgttcctgctgaagccagaggacggaagagaagaccaagtgggttttggactcggatgaaccccttcgggggtcaagcccaacccacggtctggcttttccgtggccatggccccgaatcaccagacactgttcttcgggggtgtctgtgacgaggaagaggaggagagcctgtcgggcgagttcttcaacgatctgtacttctacgacgccaccaggaaccgttggtttgagggacagctgaaggtagtgcaacctctgagtagcatgcgccgtggtgcgcagccctaacttgggtccctgccaccactgccttcctccagcaccttttggtattggggcccccaaagcccatgagctctctcaagaggggcgagggttccgtctctgactgtcctgggtgactangcttggagagcccttggtcacggtccccttagtctgtcctggatgctggcggggctgctacctcagaagccagttgccctgggctgaagtgcccgggacctcccgggcctctgtgtgagaaaggtttgctggaagtccctggtgtggaccagcctgtgttatgacccttggagcttccctgggttccgggaacatctttactggtcccgggagcatagctgctggcccggggccagcccacccagggcacaga

SEQ ID NO: 361323 - DNA, 1133 bp, Homo Sapiens
cgtcgtagaagagccgattcgtaaagaaactgcgcagaacgggtttcctctgtttgctgcggcacagccacccccgaaggaaccagggtttggggattcggggccctggccccggaaaaagccagcccggtggggtgggcttgacccccgaaggggttcttcggagtccaagcccactggtcttttcttccttcctcggggttcagcagggacatgtctgagtgccggtgcccctggtccacgtctttcttaactctcgtttggagtagcccccatagacgacgatcccgccctggggagtgacggacatctggcagcctgatctgggtgtgggccccgtccctgacggggacagcttgctccatgtgaaggtgtccagattaaaggcatacacgtcgttgtagtagatgtaatcccgtgtactttcatggaagccaccaaacaggatcaattgtctcttccaggccaccatccgatgtccactccgacccgaaggaccgcctgttgatttgacttgttcccaggtcttggtggccaaatgcaggacccagagatccttgtagtggtagaactgctctccgttgggagaggcaaactcccctccaaagacccacagctgtccgccaccttgaggcactaccaccgcctggtgagcacagcgcctcggaggtggactggggatgtcaactttggtccaggtgtcctttctggtattgtagacatagagctcgttatacaaaaaagttttttggccgttgaaatattcacctccaaaaaggattaactcatctttctcaggatgaaccgagagggaggcatttaaccttggtgagggtggggggcacggaagttccacagtctgagtcctcttggcatcgagtgtctggaaatgggctatgagcgcttccaggtcttcctcctccttccgcgagcgcttagacaccttcttctccatcttggcggccgtcttctccgcgccgcggcccttcttctccttcttgcccttcttgcccatcttgccgggtcccaagccgcgacgggacaccaggaaagaaaacggcccgcgctctccctcgtgccgaattcggcacccaggcctcgctaccatttaccgggggtagtactgccagtca

SEQ ID NO: 361324 - DNA, 1014 bp, Homo Sapiens
tgggtggcgaattcggcacgagggagacttcggcggacatggctcccagcgtgccagcggcagaacccgagtatcctaaaggcatccgggccgtgctgctggggcctcccggggccggtaaagggacccagttggagaaactgaagtttgaatggcttgttctctaggctacatagcaagtaatttacagagcttgcatctgaatgactccaaagctcctgctctttctgctgctatctactgccccaggcacccagattggctgaaaacttctgtgtctgccatttagctactggggacatgctgagggccatggtggcttctggctcagagctaggaaaaaagctgaaggcaactatggatgctgggaaactggtgagtgatgaaatggtagtggagctcattgagaagaatttggagacccccttgtgcaaaaatggttttcttctggatggcttccctcggactgtgaggcaggcagaaatgctcgatgacctcatggagaagaggaaagagaagcttgattctgtgattgaattcagcatcccagactctctgctgatccgaagaatcacaggaaggctgattcaccccaagagtggccgttcctaccacgaggagttcaaccctccaaaagagcccatgaaagatgacatcaccggggaacccttgatccgtcgatcagatgataatgaaaaggccttgaaaatccgcctgcaagcctaccacactcaaaccaccccactcatagagtactacaggaaacgggggatccactccgccatcgatgcatcccagacccccgatgtcgtgttcgcaagcatcctagcagccttctccaaagccacatgtaaagacttggttatgtttatctaatgttgggtccaagaaggaatttctttccatccctgtgaggcaatgggtgggaatgataggacaggcaaagagaagcttcctcaggctagcaaaaatatcatttgatgtattgattaaaaaagcacttgcttgatgtaa

SEQ ID NO: 361325 - DNA, 1212 bp, Homo Sapiens
  misc_feature (951)..(989): n is a, c, g, or t
  misc_feature (1004)..(1013): n is a, c, g, or t
agcggggtggacctgtgaggcgtgcgaactggtggcagtgagagacttcggcggacatggctcccagcgtgccagcggcagaacccgagtatcctaaaggcatccgggccgtgctgctggggcctcccggggccggtaaagggacccaggcacccagattggctgaaaacttctgtgtctgccatttagctactggggacatgctgagggccatggtggcttctggctcagagctaggaaaaaagctgaaggcaactatggatgctgggaaactggtgagtgatgaaatggtagtggagctcattgagaagaatttggagacccccttgtgcaaaaatggttttcttctggatggcttccctcggactgtgaggcaggcagaaatgctcgatgacctcatggagaagaggaaagagaagcttgattctgtgattgaattcagcatcccagactctctgctgatccgaagaatcacaggaaggctgattcaccccaagagtggccgttcctaccacgaggagttcaaccctccaaaagagcccatgaaagatgacatcaccggggaacccttgatccgtcgatcagatgataatgaaaaggccttgaaaatccgcctgcaagcctaccacactcaaaccaacccactcatagagtactacaggaaacgggggatccactccgccatcgatgcatcccagacccccgatgtcgtgttcgcaagcatcctagcagccttctccaaagccacatcctagtatcagaaggccaggcgagactgcaacactgctcatcaccccgcggcgtgatccctgctcttaggtgctgggcagaggggaaagggtggtcagggtgaggatggtgaaggaaggctggtgaagggctcagaggaatacttggaaacaccaccagggtattggagtggggcagttccttttatccctaggggagagnnnnnnnnnnnnnnnnnnnnnnnnnnnnnnnnnnnnnnncaccctgcttgggannnnnnnnnntaagaaattacccccctttttatttcctaaggaaacggggttttcatttaccccgggaacgggggaaaaaatttttttaaagcccagggctttaagaccccccatttttattttcgaaacccctggggggttccccaccaagagtcccgggagatcccaatttggtgccccggcccggccataaacttttgaaaccggg

SEQ ID NO: 361326 - DNA, 1131 bp, Homo Sapiens
  misc_feature (898)..(898): n is a, c, g, or t
  misc_feature (900)..(901): n is a, c, g, or t
  misc_feature (910)..(911): n is a, c, g, or t
  misc_feature (919)..(919): n is a, c, g, or t
  misc_feature (925)..(925): n is a, c, g, or t
  misc_feature (927)..(927): n is a, c, g, or t
  misc_feature (965)..(965): n is a, c, g, or t
ccactttcgctctccctccacaacccgcacgcttgaccccgcgctttcccccgcgtgccggccctggattttcccgattggacctgtgaggcgtgcgaactggtggcagtgagagacttcggcggacatggctcccagcgtgccagcggagagacccgagtatcctaaaggcatccgggccgtgctgctggggcctcccggggccggtaaagggacccaggcacccagattggctgaaaacttctgtgtctgccatttagctactggggacatgctgagggccatggtggcttctggctcagagctaggaaaaaagctgaaggcaactatggatgctgggaaactggtgagtgatgaaatggtagtggagctcattgagaagaatttggagacccccttgtgcaaaaatggttttcttctggatggcttccctcggactgtgaggcaggcagaaatggctgatccaccccaagagtggccgttcctaccacgaggagttcaaccctccaaaagagcccatgaaagatgacatcaccggggaacccttgatccgccgatcagatgataatgaaaaggccttgaaaatccgcctgcaagcctaccacactcaaaccaccccacctcatagagtactacagcgaaacgggggatccactccgccatcgatgcatcccagacccccgatgtcgtgttcgcaagcatcctagcagccttctccaaagccacatgtaaagacttggttatgtttatctaatgttgggtccaaagaggaatttctttccatcccctgtgagcaatgggtgggaatgataggacaggcaaagagaagcttcctccagctagcaaaaatatcattttgatgtattgattaaaaaagcacttggctttgatgtaaaanannaacccccannaacaacancaaccncnaggggggcggccccctctaggatatcccctccgagggncccaaagcttaacccgtacccagcctttcttggtacaaagggggcccctaaaagtgggtcccaattataagccttaggacctggcccgtccttttttaaaccttccggaaatgggaaaaaccgcctaagcttggggatctttgtgggaagggaaccttaacttctt

SEQ ID NO: 361327 - DNA, 1274 bp, Homo Sapiens
  misc_feature (1004)..(1004): n is a, c, g, or t
  misc_feature (1032)..(1037): n is a, c, g, or t
  misc_feature (1039)..(1087): n is a, c, g, or t
  misc_feature (1089)..(1096): n is a, c, g, or t
  misc_feature (1098)..(1119): n is a, c, g, or t
  misc_feature (1121)..(1121): n is a, c, g, or t
  misc_feature (1126)..(1126): n is a, c, g, or t
aggccgccgcgcgcacacaccgggcccggctcctgagggcgccagcgcggccccggggagcgcgaggagccggcgaagcgcgcggcctgccgttggcggcctggtccgcagcgccctgcgcccacccgccccggacgtggggcccaagcccccgtgaagatggtgtcctggatgatctccagagccgtggtgctggtgtttggaatgctttatcctgcatattattcatacaaagctgtgaaaacaaaaaacgtgaaggaatatgttcgatggatgatgtactggattgtttttgctctctatactgtgattgaaacagtagccgatcaaacagttgcttggtttcccctgtactatgagctgaagattgcttttgtcatatggctgctttctccctataccaaaggagcaagtttaatatatagaaaattccttcatccacttctttcttcaaaggaaagggagattgatgattatattgtacaagcaaaggaacgaggctatgaaaccatggtaaactttggacggcaaggtttaaaccttgcagctactgctgctgttactgcagcagtaaagagccaaggagcaataactgaacgtttaagaagcttcagtatgcatgatttaacaactatccaaggtgatgagcctgtgggacaaagaccataccaacctctaccagaagcaaaaaagaaaagtaaaccagcccccagtgaatcagcaggttatggaattccacttgaaagacggagatgagaaaacagatgaagaagcagaggggccatattcagataatgagatgttaacacacaaagggcttcgaagatcgcaaagcatgaaatctgtgaaaaaccaccaaaggccgcaaagaggtgcggtacgggtcactaaaatacaaagtgaagaaacgaccacaagtgtatttttagtcatctacacgtcaaatatcccaagacagattatgctaaatacatcgacttcatcttctaacatgatatattcangatttacacattaaaatgattatttaannnnnnannnnnnnnnnnnnnnnnnnnnnnnnnnnnnnnnnnnnnnnnnnnnnnnnannnnnnnnannnnnnnnnnnnnnnnnnnnnnanttgtngggcggcctcgggccctaaaaaaatttttcaaaaacatttcttttgggccccggggccccatagggggaaagggaaaagggggcctaaactgttttccccaaaaagaaaacccgggccaaaaacaaaagggctggggattccccccac

SEQ ID NO: 361328 - DNA, 1512 bp, Homo Sapiens
gttgctccaggagtttctgcctctgcttttctctgattttatctttaaatggaatcgggtcggtattaacgtccacgggcacaaaatctggaaactgcttccctctcaattctggcatcttgggcatcctcagcagggcaaaacctcgagcaaggcctttaatctgaaaatcaggttgcattcatgctttgcataagcttggacatatgacacaaaagctttcatgcccttttcaaacacagctctgtcagccagggccatggacttgagttttggcagaaggtccgctgtgtttctctggggcttcatctcctgcagggggcatttttggttaattgcaaggaaattgatgtatgactcttccatgggcaggaggaacaccagagcgctgcccccgtggccaatgcgagctgtgcgaccgcagcgatgcacgaaggcacttgcattgctgggagggtcatactgcaaaacccagttgacttcaggaatatcaattccccgggccatcacatcagtgcacactaaaatcccactttgcaatttgcggaactccatgaagatcttattgcgtttatatttcatctttccgtgaatgcacataatcttcacgcccttcaccagcacttccagagccttcccatagtattccacacaggcacaggtgctgaagaagaccaggtgtttctcctgcttatgattgcgaagaaaatggaccagctgattaaatttctcatctgccttgcataccatgtagtagttttccaggcgggagggggtcttctgggcactgctggctgccacgcccttctccttcactgagacccggacagggttccggaggcccgctctcaccaggttctccacttcctgcgtctgagtggcagagaaaaggcctgttctcctctgctttggcaaaaactccagatatggtgttgatgcttgcctcaaaccccatgtccagaagtctgtctgccgtcagccaacaccaggacatccagggatcgcacacagctggccagatccaagccttcggccttcctccggaacatgtcctccaagcggcctggagtggccacaatgatgttcccaccttgttgcttaaacctctcaacatcttctccaggattcctgcctccgatccaaagaatctggctgaactcggggaagtgcttcgtgaaatgcgacaggacctcgtctatttgaatggccagctctcgagtgggggtgatgattatggctccaacctgactcttttttaacttctcttctcttctcagaagaatttccaggatggggatgacaaaagcgagtgttttgccactacctgtgaccgcttctgcagcgacatctttgtttcgcatgaacagagggatggttgcggactgcaccggcgtcatgtacgggaagcccagctcccgcagcgcgcccaacacctgcgggtgcagcgcgcacaggcagcgactcccaggagccctctgtcacatgctccatggcgcgctccttcgccgcgtg

SEQ ID NO: 361329 - DNA, 962 bp, Homo Sapiens
  misc_feature (115)..(115): n is a, c, g, or t
  misc_feature (345)..(381): n is a, c, g, or t
tctacaaatctctcgggacttcataaattccaataaaaattggagggaggtgagagacagcaaagggattttaaaaattacagcactgccatttgaaaaccaaaactgtatgggnctaatcctttgtagccatctgaaaaacaacggacaattcactccataactcgaggcctagcagtcaggtatatcactttgtccaaaagaagacttttaatatagtcagatgttcaatgattaagaaaaacagaaaactattatttgtcagcacaagcagatacaagttatggtcattggtagacacaagttgcctgctgtatagtcacaagcctaataagccacagacannnnnnnnnnnnnnnnnnnnnnnnnnnnnnnnnnnnngagatggagtctcactctgtcacaaaaattaaaaaaattacatttttacaaaggttaaaaggaatactcagcagccagtggccagtttattctggtgtctactcaaaacctgggaacacttccttttatgagaccaagcaatctcatacttgtaagaccaccacatagttaagatggagacattatcacatgaagaagtccaacttaccctttaatctgaaaatcaggttgcattcatgctttgcataagcttggacatatgacacaaaagctttcatgcccttttcaaacacagctctgtcagccagggccatggacttgagttttggcagaaggtccgctgtgtttctctggggcttcatctcctgcagggggcactacacacacacacataccacattctcaccttccctggctggcatcatatccccagggctccccatcacaaccaagaaaaacaaaagcgaaacaattccttttcaactgttgaggtctgaagcccaactccaacccaaatatttcacatgctctgtaaagtatgttaaatttttaaaagaaaatttaaaaatcagatttcacat

SEQ ID NO: 361330 - DNA, 899 bp, Homo Sapiens
  misc_feature (454)..(454): n is a, c, g, or t
  misc_feature (886)..(886): n is a, c, g, or t
acaaacgcaaggagatgctgaagaggcacccactgtctgtcatgctcgacctgaagtgcaaagatgacagtgtgcttcacctgactttctactacctcatgaacctcaacatcatgacagtaaaagccaaagtgacaactgccatggagctgatcacccccatcagtgcaggtgacttgctgtctcctgactcagtcctgagttgcttgtatcctggggatcatggaaagaaaactccgaatccagccaatcagtatcagtttgataaagttggcatcctgactttgagcgactatgtacttgagctaggtcacccctatttgtgggtgcagaagctgggtggcctccacttccccaaagagcagccccagcaaacagtgattgctgaccactcgctgagcgccagccacatggagaccaccatgaaacttctgaagaccagggtgcagtcccngcctgggccctccacaaacagtttgcatccctagaacatggcattgtgcccagttaccagtgattgccagtacctcttccctgccaaggttgtctctcgcctggtgaaatgggtgacagttgcccatgaggattacatggagctgcacttcaccaaagacattgtggatgcgggactggctggggacaccaatctctactacatggcgctcatcgaaaggggcacagccaaactgcagggccgctgtggtgttgaaccctggctactcctccatcccacctgttttccagctctgtttgaactggaaaggggagaaaaccaacagcaacgatgacaacattcgggccatgggagggcgaaagtcaatgtgtgctacaaaggaggctgtgtggccccttggccccagccacccagctggttgaaccaaccagnctggcaagcgggc

SEQ ID NO: 361331 - DNA, 2189 bp, Homo Sapiens
  misc_feature (1204)..(1237): n is a, c, g, or t
  misc_feature (1847)..(1871): n is a, c, g, or t
gaagaaggtattctgcaagtactgtagatgttatagaaatgatggaggatgataaagttgatctgaatttgattgtggccctcatccgatacattgttttggaagaagaggatggtgcgatactggtctttctgccaggctgggacaatatcagcactttacatgatctcttgatgtcacaagtaatgtttaaatcagataaatttttaattatacctttacattcactgatgcctacagttaaccagacacaggtgtttaaaagaacccctcctggtgttcggaaaatagtaattgctaccaacattgcggagactagcattaccatagatgatgtcgtttatgtgatagatggaggaaaaataaaagagacgcattttgatactcagaacaatatcagtacaatgtccgctgagtgggttagtaaagctaatgccaaacagagaaaaggtcgagctggaagagttcaacctggtcattgctatcatctgtataatggtcttagagcaagtcttctagatgactatcaactgccagaaattttgagaactcctttggaagaactttgtttacaaataaagattttaaggctaggtggaattgcttattttctgagtagattaatggacccaccatcaaatgaggcagtgttactctccataagacacctgatggagcttgaacgctttggataaacaagaagaattgacacctcttggagtccacttggcacgattacccgttgagccacatattggaaaaatgattctttttggagcactgttctgctgcttagacccagtactcactattgctgctagtctcagtttcaaagatccatttgtcattccactgggaaaagaaaagattgcagatgcaagaagaaaggaattggcaaaggatactagaagtgatcacttaacagttgtgaatgcgtttgagggctgggaagaggctaggcgacgtggtttcagatacgaaaaggactattgctgggaatattttctgtcttcaaacacactgcagatgctgcataacatgaaaggacagtttgctgagcatcttcttggagctggatttgtaagcagtagaaatcctaaagatccagaatctaatataaattcagataatgagaagataattaaagctgtcatctgtgctggtttatatcccaaagttgctaaaattcgactaaatttgggtnnnnnnnnnnnnnnnnnnnnnnnnnnnnnnnnnnccgatggcctggttgctgttcatcctaaatctgttaatgtggagcaaacagactttcactacaactggcttatctatcacctaaagatgagaacaagcagtatatacttgtatgactgcacagaggtttccccatactgtctcttgttttttggaggtgacatttccatccagaaggataacgatcaggaaactattgctgtagatgagtggattgtatttcagtctccagcaagaattgcccatcttgttaaggaattaagaaaggaactagatattcttctgcaagagaagattgaaagtcctcatcctgtagactggaatgacactaaatccagagactgtgcagtactgtcagctattatagacttgatcaaaacacaggaaaaggcaactcccaggaactttccgccacgattccaggatggatattacagctgacagcttttcaggggtggtctgaaaagccagtttgacagccattcttcatcattgtttaaattttggctggatgccaaaccctgggacatgaacaattttcatgtgtaaggtagaagccttcagtaggtagtaaagacttaatgtgcatgacttgatgttatatgtagagnnnnnnnnnnnnnnnnnnnnnnnnnccataaaagcaatatgttctctgatcatatactctgctgtggtcatgcccactctttgggagtatattccctttatatatattgagtattgtaccacttgagaaattcctttgttctgttatacaaaattaatctttctgctcataatgattgatgataccaccagtaaaaataggatgtttaccccaaaacaagtgtcaattaagaatttgaacacaaccacattttttaaaatgaaacttctatcggaagtaaattaatttgttgtaataaagtccagtatttaataaaatgtacaatgttaaatctcaaaaaaaa

SEQ ID NO: 361332 - DNA, 373 bp, Homo Sapiens
cacttggcacgattacccgttgagccacatattggaaaaatgattctttttggagcactgttctgctgcttagacccagtactcactattgctgctagtctcagtttcaaagacccatttgtcattccactggtaagaaaaatggaaataaaaccgagttattttagatgtgaacaggagttgcttagatatatttttcattagcgttttattagaatgtcattctccattatagcatcagagcaatttaaattggctatgtctgctatttttaagggaaaagaaaagattgcagatgcaagaagaaaggaattggcaaaggatactagaagtgatcacttaacagttgtgaatgcgtttgaggtaaaaaaaa

SEQ ID NO: 361333 - DNA, 2178 bp, Homo Sapiens
  misc_feature (394)..(394): n is a, c, g, or t
cgtgaaaattggcccgcttctattgattcggctgccggatcccttatggtgaaaacctttgttgaaattggaccttctttttgaaatggtggcactgtgttcttcttctctgtgagggaaggaagtgtctggcctctggtgaacacccaaatctttctgcgggtgtacctcgcaaaatgtgggtaagagtcgagtcgctgcgttctgtgaagtaaatttccgaagactgctcgaaagttccaaattaggagggggaatatataatgaagcctgtgtggagacatgactgcaatcacgatctgttggcaaaatcttggttccacaaaaagttaacctggcatcaaatcactgaagctaggtttttcagcttccaatccctctggaagacatgtgngaactgcaaccaggacatgactgatagagcctgtcaattgggacattcctcacggccacctggccttgcatgttgacacagtacttgttgaacactgagttgatctgggcatcctgaagggccccaaaatagcagtgtctggcgatagtacttggaccaattattgaggctccacatccgcactcgagaaaagtctaccccatgtgagtccaggggtagtaggttcatgtgattcatcaaatgcaggacatgctcccagttctgcatcaggtaaatgtcagcttgatcaatgatgagaagctcgatagaagacagaaagtcaaaatctctcttcttctctccttctccaccaatgatggtcctcaagcccaggggggaagcaatgaggatatccgaggagtaaaacggggcatagagtcggatgcttctctgaagtattgccactccaatcctgaagtggtcatcaatattgcccacaaatacggcttcataatcctcaggcctcttcaagttgggtggtctctcctcgggatctgatccatattctccctgaaacctctttttgttgctcacaatgattttcttcttgctgtcaccctcgaggaggctgatgaagagctgcaccacccgcaaagcagcttcccggaatggcaccactatcagtaccttgggccttgttaacccttggtctctgaagtcatcatcatcacccactccaaacttctggcttcggcgtctgctattgttgccaagcacctgggcattggctttgaggatgtgatttatcacatgcaggcaatacacatggcggatctcttccccgttcttcagaacagtcctttccgggtagaacaggtcccggtaagaatttcataattaagaagagttccttctggaggggggtgaatgggctgcttgatttttggggaccagataggaactggctgttggtcttagtccagggggattccagaggcttctggagatgaagtgactttaagtcaatatcctttgggggtttaaatgtttccaacttctgaaacttagaggaaaagaaaagctggcccagaataggccatttaagctcgtgggtagttttgggatttgtggcaacagcctgaattgctttttctttcagttctttgttcacatgttgaagaaatggatcttgagaggctttcaaaagaagagttgtctccaactgtcctcttccagaaaattggtttccaggctgaacagtgactcgtgttttgcatctgtgaactcttcgggggatgtttgtgatgtgcccggtggctcttccccatcttcttttccctcagggtcagcagataaagctacattctctggactttcagtagactctgcagccatctcttcttccacactgacatcgctaccaccatcttcatcgttcatttctgcatcatctacaatactgtcttcttcctcttcctcctcctcatcgttcctcttcttcctcagaaacattctttaatgtagcaagtagtctgtggtagccagaaacttgttgtggttcactctctgagtcgctttcagaatctgaagaatctgaactctctgacagttgacaaatctgtggctttgcttcctttctggaaaccctgtcatagaagggatgctcctcgccgaaatctcgaagatgtttcttctgctttttagttagggtgttgagtagctggctctggctccggctcccgcgtttgcccatagcgaaaacgtcaagtttgcccacttgcaagagtcgcggttttccacccgct

SEQ ID NO: 361334 - DNA, 969 bp, Homo Sapiens
  misc_feature (267)..(367): n is a, c, g, or t
  misc_feature (371)..(389): n is a, c, g, or t
cccgcgggcttccccgggcggctgcgtccccagtagcccggccggcctcggcaccgcgtgtcgtgggggtcccgggccgcggctgcagggccggggcggcggcgaggccgaggggcgggaagccactgcccggcctggcagtgtgaacgtgcaagtcgatcccctaacccagaaagccccaggcgcggtctctatgggcggccccgctcctgcttctgttttatttttttacggacagggtctcgctctaccgcccgggttgtaatnnnnnnnnnnnnnnnnnnnnnnnnnnnnnnnnnnnnnnnnnnnnnnnnnnnnnnnnnnnnnnnnnnnnnnnnnnnnnnnnnnnnnnnnnnnnnnnnnnnnntggnnnnnnnnnnnnnnnnnnngggtcgagatgggggtctcgctttgttggccaggcggggtctcgaatttcctgtggccttcaagcgactcgctccgtgtctcggccttcccaaaggtgccgggattgacgggcttgtagccaccgggcccgtggcccctttctttggaagtgggccctccttggcgttcccgcttctcaatgtgccccggtgcaactttttggggagccccagggcgtgtacgtgtatggatggacctcctttttttcccccttttcttttaaccttaatttaaggcgtgccacttgaaaagccccgccagtggtaaaacacgccgtggcggatcctcgaggcagaagacggaggtggcgtgtgccggggtcccccaccccaggtggtgttgtccgggccctaccgggcaggtcacattccgtgggtgcgtgggctgccccccgtttgcggcaactattgggcccccccgtgttctcccttggaccccatcagctgtgtccccgtgaccgctcgccaagccttgtgtcccaccagaaagcgtcctcctggcgcgggtgtagccctctactcactggtctctgcaaggacc

SEQ ID NO: 361335 - DNA, 1037 bp, Homo Sapiens
  misc_feature (825)..(860): n is a, c, g, or t
  misc_feature (924)..(950): n is a, c, g, or t
gtggaccggtccggaattcctgggatccggccggagccgccatgtaaccggcgccgcccggagcccgagccgcgcgggccccagcgacccgcccgccatgggggacgaggacgacgatgagagctgcgccgtggagctgcggatcacagaagccaacctgaccgggcacgaggagaagcctacggcaaggtgttcctggtgcggaaggcgggcgggcacgacgcggggaagctgtacgccatgaaggtgctgcgcaaggcggcgctggtgcagcgcgccaagacgcaagagcacacgcgcaccgagcgctcggtgctggagctggtgcgccaggcgcccttcctggtcacgctgcactacgctttccagacggatgccaagctgcacctcatcctggactatgtgagcggcggggagatgttcacccacctctaccagcgccagtacttcaaggaggctgaggtgcgcgtgtatgggggtgagatcgtgctggccctggaacacctgcacaagctcggcatcatttaccgagacctgaaactggagaatgtgctgctggactccgagggccacattgtcctcacggacttcgggctgagcaaggagttcctgacggaggagaaagagcggaccttctccttctgtggcaccatcgagtacatggccccccaaatcatcccgtaccaagacggggcatggcaaggctgtggactggtggagcctgggcatcttgctcttcgagctgctgacgggggcctcgcccttcaccctggagggcgagaggaacacgcaggcctgaggtgtctcgaccggatcctgaagtgnnnnnnnnnnnnnnnnnnnnnnnnnnnnnnnnnnnngtgggcgcaaggacctgcctgcagcgggctgcctttgtaaagggatccctaaaaaggcgaattnnnnnnnnnnnnnnnnnnnnnnnnnnnccacaaaaaagtcccgggaaacccattcccctttcttccaaggggccccccaatttggggtgggtttccgggcttgtccaagaaaaa

SEQ ID NO: 361336 - DNA, 1651 bp, Homo Sapiens
  misc_feature (1339)..(1347): n is a, c, g, or t
gattctcgggatgccggagccgccatgtaaccggcgccgcccggagcccgagccgcgcgggccccagcgacccgcccgccatgggggacgaggacgacgatgagagctgcgccgtggagctgcggatcacagaagccaacctgaccgggcacgaggagaaggtgagcgtggagaacttcgagctgctcaaggtgctgggcacgggagcctacggcaaggtgttcctggtgcggaaggcgggcgggcacgacgcggggaagctgtacgccatgaaggtgctgcgcaaggcggcgctggtgcagcgcgccaagacgcaggagcacacgcgcaccgagcgctcggtgctggagctggtgcgccaggcgcccttcctggtcacgctgcactacgctttccagacggatgccaagctgcacctcatcctggactatgtgagcggcggggagatgttcacccacctctaccagcgccagtacttcaaggaggctgaggtgcgcgtgtatgggggtgagatcgtgctggccctggaacacctgcacaagctcggcatcatttaccgagacctgaaactggagaatgtgctgctggactccgagggccacattgtcctcacggacttcgggctgagcaaggagttcctgacggaggagaaagagcggaccttctccttctgtggcaccatcgagtacatggcccccgaaatcatccgtagcaagacggggcatggcaaggctgtggactggtggagcctgggcatcttgctcttcgagctgctgacgggggcctcgcccttcaccctgggagggcgagaggaacacgcaggctgaggtgtctcgacggatcctgaagtgctcccctcccttcccccctcggatcgggccccgtggcgcaggacctgctgcagcggctgctttgtaaggatcctaagaagcgattgggcgcggggccccagggggcacaagaagtccggaaccatcccttcttccagggcctcgattgggtggctctggctgccaggaagattccagccccattccggccccaaatccgctcagagctggatgtgggcaactttgcggaggaattcactcggctggagcctgtctactcaccccctggcagccccccacctggggacccccgaatctttcagggatactcctttgtggcaccctccattctctttgaccacaacaacgcggggatgaccaaggggctggaaccgcctggtgcctggacaccggccaggtcgggcagaggtgggccaaggccccctaggatccccgacctccccattgctgcagcacaaagaagctgcccctggcaagagccactcaannnnnnnnngcgcgaattctgtatacacaaccccctccctcctattccctgaaagcaaaccccccgcgaccctcatatcccactcgatgattatagacagtgactcccggctgcgacactaccatcccctggtcctcctgcccccgagctgtgctcacaggctgaagtcgtgatgacagaatctaaagccagtccagtccgacacgcgtgtggaataaattcacgccccccacgagactctatccagcggacgtcacgtacgaataagatgccattctgtacctgcaccccccgcagaacaaatagcgagcaa

SEQ ID NO: 361337 - DNA, 1108 bp, Homo Sapiens
  misc_feature (949)..(949): n is a, c, g, or t
  misc_feature (1054)..(1054): n is a, c, g, or t
gggcctctgggggcggccccggggcgggccacgctggtgtgagggctgcaggcgcagctccggagcgcctagagcgcggcgcggggcgggagcttggtggagcaggagcggctgggcatcctcctgagactccggggtcagacgcccactccagcgctttctgcgcagcacaggcaccctcgcctgtcacgcctccctctcctcttcccgtctcccagcgtggatgagggcgcctgcagatcccggctagggcacggaccgcctaggccgagatttctttaaagactcgtgcagcacatcattatcgctggatgcccggacatgtaatacacctgacagcatgtgaagtgctcagaatggggcaggatgtcacctggaatcagcactaagtgattcagactttccttacttttaaatgtgctgctcttcatttcaagatgccgttgcagctctgataaatgcaaactgacaaccttcaaggccacgacggagggaaaatcattggtgcttggagcatagaagactgcccttcacaaaggaaatccctgattattgtttgaaatgctgaggacgttgctgcgaaggagacttttttcttatcccaccaaatactactttatggttcttgttttatccctaatcaccttctccgttttaaggattcatcaaaagcctgaatttgtaagtgtcagacacttggagcttgctggggagaatcctagtagtgatattaattgcaccaaagttttacagggtgatgtaaatgaaatccaaaaggtaaagcttgagatcctaacagtgaaatttaaaaagcgccctcggtggacacctgacgactatataaacatgaccagtgactgttcttctttcatcaagagacgcaaatatattgtagaaccccttagtaaagaagaggcggagtttccaatagcatatttctaatagtggntcatcacaagattgaaatgcttgacaggctgctgagggccatctatatgcctcagaatttctaatgcattcatgtggacaccaaatccgaggatttctattttanctgcactgatgggcatcgccttcctgttttaagaaatgtcttttgtggccggct

SEQ ID NO: 361338 - DNA, 1754 bp, Homo Sapiens
  misc_feature (41)..(41): n is a, c, g, or t
  misc_feature (1721)..(1721): n is a, c, g, or t
aggggggggccccccaaaatttccttccaacaacccaaggncttgggggaaggggtggtggccccaggggaggttcacagccttgagccattctggggaccccattctcattcagagctacttccccagacccagggccccagtggcttcaggtggaggtgaaagccattcttggagcgcaggacaagctggggcatcttgatgggcagccgtgaggggtccagagagaactcaaagcggagcaagcacatggctgtgaccaccttcatctcactcatggcaaactgctgcccaatgcagttcctgggcccagcagagaagggcataaaggcaaagggatggcgtttggatgcattctcagtggaaaagcgcagagagtcaaagacctcagggtcgggccatacagcactgttcctatggagggcatagatatgcatagagatcaggcttcctgcaggtagagaccggccatccacaaaggtgacaggcttgctgagctggcggtacacctggggcacaggtgggtagaggcggaagctctccttgatgcacatggtcagataagtcattttgccccagatcatcccactggaagaagtccctggtccccctaggatctcgcggacctcctctttacaacgatgctggtgctcagggtacagggccatgcagtagagaaaccaggagataccactggtggtggtgtcatggccttcaaacatgaatgtgtccacttcagccccggaggtctgcatctgacagtttgatgtcatcttcatcccgggcacccaggagaatgtccaggaagtccaggtgcctccggttctggatcttcttccgcaccttctcatcctgcagggctgccttccgctccctgatgacctggtctgtatggtcatgggccacctggcaggcccgcaggaagcggcggccatgtggggtgagccagtagatgaagtcattatggtactggaaggacacaaggcgctgctgcatcaacagagtgagatcgctgactgcaaggtagtagctgctgtccctgctgtggcccaggccggtgtctcctcttccaaaggtgcacttcatgagtgtgttcagcgccatgtgacccacatcgcagaagatgtcaaaggacttaccctcccgagctttctcttcccacttgtccagcatgatacgtgtagactcagtgaacacggccacatagggcttcagcacatcataatgaaagccaggtgtgagcagcttgcggtgctgcaaccacttgggcccctcaagaaccagcaggcctctcccaatccactggaggaagaagtcatacacatcaggggccttagggtccccacggctgtacacagctttggcatagtcaggctcatagatgttcaggaagccaatgaactgtccgaaccagagtgggtgggcatacgggaactggtgggcccaggacaccactttgtccaggctccccgtctcctggatctcgagggcatgtccaaaaagccagtgggtgggaggccctgggaatttgtccatagccttagccaacgtctgcctccgcagcagcaggtggatgagcttgagaaagcctaagaccaagatcagcccagaagcccacaggcccaaggaggagaagctcagggagaggagggaaggcaccatggttgcagctcctttatttcgcggaattcccggactcggtacctagcctgcttattgangaacctgcacgttgctttttgtgttgggtgggt

SEQ ID NO: 361339 - DNA, 944 bp, Homo Sapiens
cgaggttcttgtcggcagactttcccatgaaacgtgaagaaaggactggggcaagagggaaaaataaaaaagggcaagtaagtcacaggatgaatccttgttgctaatctcctggcccccagcccagacccttcaggggatcctggcgattcgaacagcatagcctgataggcctctggtgaggtttgggagggttttttcttgccgcctgttccaggatgctcaagatgatgctgtgggcctcctggcatagctcagcacccaggaaagcctccactcgtccacgccatgctgccagtcgtgccgtccctcaaacagttcataccgagagccaccggctgcatcagctcctccagggccatgagatcagccagtgtcacctgctggccagcgaggaagggcctgtcccccaggaacttgtcctccagccaattgcagggcctggtccatggcagtcctgttgcgttccaccttctcctcgggcacctggaccccaatgagtggccccaacacctggacccacaggggtataccaaaggtgccacggatgcagtcggcatgccagcccaggtactcatgaacacgggcacgagcctgcaggtcagatggataccagtggtccggcgtctggtacttacagctcaggtaaatcaggatggccgagctttcggtcaagatgaaatcaccatccttgagcgtcggcagtttccccaggctgttgatctgcaagaactccttgctcttgtgctgccctttgaccaaatccacggtgcgcagctctaaggggatgccattcttcttggcgaagatgtagacggcgcggctgggctgggacaccaggtcaagaaacagctctaggcccatggcggggcggcaaggacagcggggatggcagtgaaggcgctgagcacggtgtgcaccacccggcctcgtacctagcctta

SEQ ID NO: 361340 - DNA, 706 bp, Homo Sapiens
  misc_feature (151)..(202): n is a, c, g, or t
  misc_feature (257)..(270): n is a, c, g, or t
  misc_feature (274)..(406): n is a, c, g, or t
agatttggccactgggagccctttcaagctagctcatgtgtgagtgggaatctatctagaagatagaatttcctgatggattgggtgggttgtgtgtgagagaaagctggggtttattcttttttttagagacagtgtctcactctgtcannnnnnnnnnnnnnnnnnnnnnnnnnnnnnnnnnnnnnnnnnnnnnnnnnnntgggctcaactaatccttctccctcagcctcctgagtagcccagctaatgtaaannnnnnnnnnnnnntttnnnnnnnnnnnnnnnnnnnnnnnnnnnnnnnnnnnnnnnnnnnnnnnnnnnnnnnnnnnnnnnnnnnnnnnnnnnnnnnnnnnnnnnnnnnnnnnnnnnnnnnnnnnnnnnnnnnnnnnnnnnnnnnnnnnnngcaaatatttattgcctataagttgagataaaaacattataaaagcagacaaaggtccttgccttcacggggctcatgtttttgtgcatgtgacacttttgtttctgatccaagccattgggggacgatggcacagattttaggagggtggatcagtctggggcaggtgcagtggagctgcctggtagaccagcctctgcttccactcctccctcctccattagccccatgcttaccatgtaatgacttcctgctctttttcttcacccaacagccaagacaatgcagactccagtgaac

SEQ ID NO: 361341 - DNA, 827 bp, Homo Sapiens
  misc_feature (19)..(19): n is a, c, g, or t
  misc_feature (31)..(31): n is a, c, g, or t
cggagggttccctgagganggactttcagcntttctgcggctcattggtgcgtctccctgttgaagtcagctcgtgggtgtgtttgggcacagtggtctgtctgcaggatgtggaagaggctggccatgttaggcccaattttctccatcaaggctgtctctgattgtgctgactgtgtcttcatcacattccagcaggcttcggacaagtctgttatagtatctgttggagaagtgattgggcagctggacgacctcagtgatggcttcagggttccgcttggcgatgctgcacacattcagcttgctgtagcactcttcctgcacctcagcaatcatcctttggaaagtggagcacctccgaatggcgaggaagaccttggaggtgaccccgttggcgatgcattttaagctctctttgacgaatgcttttccctgagtgtcaaatttagcagcgctgtacaagaaggatttacagatgtcatacatcccatctgtgtcacaggtggagttttccaggcatgcaaaagccccgcagccgacctgtagagcactgttgaggcaacgaaccacttcagctgagttttgagccgccactcgggatttcctggggctcacagagtcattctgctccgcctcatgggttgcagaagcactgatcaccagcaccagaagcactgctgagttttggagcattctctgagaagtttccgctaagttgttgggtttattttttttcctgcccccctttcctctttccctctcctggcttgagtgaagatgtggatctggatacactgaaagcttaggtgaggatttgatgagga

SEQ ID NO: 361342 - DNA, 1343 bp, Homo Sapiens
  misc_feature (996)..(996): n is a, c, g, or t
  misc_feature (1008)..(1008): n is a, c, g, or t
  misc_feature (1171)..(1171): n is a, c, g, or t
  misc_feature (1181)..(1181): n is a, c, g, or t
  misc_feature (1270)..(1271): n is a, c, g, or t
  misc_feature (1273)..(1273): n is a, c, g, or t
ggaccggtccggaattctcgggatggcgcagccagcccgtggacctggattggaactccccgctggtcacgctgtgttttggcctgtgtgtgctgggccgccgggccctggggacagcctctcacagcatgtctgcaagcctggagcccttcctctacggcctgcacgccctgttcaagggggattttcgcatcacctccccacgtgacgagtgggtctttgccgacatggacctgcttcaccgcgttgtggcgcctggggttcgcatggccctcaagcttcaccaggaccacttcacgtccccagatgaatatgaggagccagcagccctatacgatgccattgcggccaacgaggagcggctggtcatctcacatgagggtgacccagcatggcgcagcgccatcctcagcaacacgccctccctgctggcgctgcgccatgtcctggatgatgcctccgacgagtacaagatcatcatgctcaaccggcgccacctcagcttccgagtcatcaaggtgaaccgggagtgcgtgcgcggcctgtgggccgggcagcagcaagagctggggttcctgcgcaaccgcaaccccgagcgggggaagcattcagaacgcccagcaaggggcttcgcaaacagggagcaatgcctccctgtgaccagccggctggggctaaccccattctaaatgttccgcctccttcaccaccctcgcctggccttggtcacccacccccccaaacttaacgggaaattgcggggaggtggcgccccaatcaaaccccggagatgcgaaatttggacccaattggaacatccctgggccgacaccccggcataaaaagctttactacaaagaacggaactgttataccacctccaagctctgctaaatgcaccagcgcgacggcaaaacctaagagaagtggatggtcagcgaaaacttcgtaaaactggggggagccaccggaaaggtatccgcaacagcatacaancgtcgaatcaanacgtaacccgcactaggatacgagtcacagaaaatagccctttacccctccatagatcaacaccagcaccacagcacaacaagaggaacggacagaaagacagaccgctgcacacccatatagatatacagtcacatctgtgataggaagccacactaccacngcacaccgcncccgatgcatatacagaagatcacacaagcacaaagtctgagtcttagacagacacatcgctcgggtgcaactccacaaattaagtatnnanccaattctcagcacaacgaaatacccagatcgcctctacgacacgacgattacgtctctcctctcaacca

SEQ ID NO: 361343 - DNA, 1415 bp, Homo Sapiens
tttcaattaagattgtatatctcccatcacccctacggagcgaggcctgggtggcgaattcggcacgagggcggcatggcgttccggcaggcgctgcagctggcggcctgcgggctggccgggggctcggccgccgtgctcttctcggccgtggcggtagggaagccgcgcgcaggcggggacgcggagccacgcccggctgagccgccggcctgggcggggggcgcgcggccgggccccggtgtctgggaccccaactgggacaggcgagaaccactgtctctgatcaacgtgcggaagaggaacgtggaatctggggaagaagagctggcgtccaagctggaccactacaaagccaaggccacgcggcacatcttcctcatcaggcattcccagtaccacgtggatggctccctggagaaggaccgcactctgaccccgctgggtcgggagcaggctgaactcactgggctccgcctggcaagcttggggttgaagtttaataaaatcgtccattcgtctatgacgcgcgccatagagaccaccgatatcatcagccggcacctgccaggcgtctgcaaagtcagcacagatctgctgcgggaaggcgcccccatcgagccagacccgcccgtgtctcattggaagccggaagctgtgtattacgaagacggagcccggatcgaggccgccttccggaactacatccaccgcgcagatgccaggcaggaggaggacagttacgagatcttcatctgtcacgccaacgtcatccgctacatcgtgtgcagagcactgcagtttcctcctgaaggctggctccggctctccctcaataatggcagcatcacccacctggtgatccgacccaacggccgagttgcgctcaggaccctcggggacacggggttcatgcctcccgacaagatcactcgatcctgagggctccggcctctccttccctctgtcctccctgcacaggccgcacacacttaacgttttgttcccaaggagaccggcggaaagtagaaacctgcaatgctgcatctgggaactgacttgtgaccaggctgagaaggggagagttgggatcagacagcctgacttctctgcagggttttatacctgaccatgaacccccaggatggcgtggggtttaaaggtgaaagcgtctcacgcacaagtcaggcctgttgtggggacttgaaagaggcctgacccagaacaccatgttcgcacccacagctgacccgtgcttgagggtccaggctccattggcaaagccgggtcaggcacgaagggcgactgaggcaccttggatgaggaaggcaccccaggttctggttcacaactcacttcacttcataacatccttttaatttccttaaaaccctcctggcccctaaatattttgc

SEQ ID NO: 361344 - DNA, 1019 bp, Homo Sapiens
  misc_feature (26)..(26): n is a, c, g, or t
  misc_feature (66)..(66): n is a, c, g, or t
  misc_feature (104)..(104): n is a, c, g, or t
  misc_feature (132)..(132): n is a, c, g, or t
gggggtcagctcaatctcccttgccntgttgcatttacagtgcgcccttgctcatccagggatcangtgtgtaggtttcgtttggtcttttaactccaaccttngggggggaagcaagcccatggcatgagnattagccaggcccaccaatgttgggccatgccgatgagtcctggcttcagtgccagctgggcttggattcgagcttgccagttcagctgctttccctgcccttctcaatggcatcattcatgaaagtggcagcctgggagggctgaatagtgttgccaataggaagtcgttctggttgggaggaagaaggagtctttggctgaggtgtaggggggctaatgaagctcagctgttttttcctctccccgatttgtcgtgttgctgcctccatcatctgtttgatctggagcttagtcagcatgccagggctctctgatggaggcccagggatcacctctggctcttcttccacctcctcaaaacggggtattcgtcgcttctttactcctgatgattctttagagatctcagagtcatcaccaaacacctccggtggtaggctttgggtgacatcccctcttcactaggagggctcgtgttttgcaaggacatatcctcggccaggggcgagcgcttcctggaactcctttagctctcgttttctgctcctgtcactgctagacttggaatgcctagagcttcggccttcctccacagcctcaaacagtttgtccacaaatcggagagtagaatcatcaagaaaaggtttcagatgatcggctgccttcttcttgtccatgcccttccccacacagttcaatgctgctgtgaccaccgtaggctctgagaaacccaggaccctcttcactgtcttctctatccatggtttcagctcatccagctccctctttgacagtgccatttttcaggaaaaagagaacaatagctcaaacaggactcaatactacacctcacaaacttcagcctcgtgccgaattcgccaccca

SEQ ID NO: 361345 - DNA, 1164 bp, Homo Sapiens
ggaattttcgggatgcggcggcggtggcggtagcgacggcacgccgtagggcggtcagaaggtttccggttccggtgtaacgttcgggctccgtctcaggggctgaagtttgtgaggtgtagtattgagtcctgtttgagctattgttctctttttcctgaaaaatggcactgtcaaagagggagctggatgagctgaaaccatggatagagaagacagtgaagagggtcctgggtttctcagagcctacggtggtcacagcagcattgaactgtgtggggaagggcatggacaagaagaaggcagccgatcatctgaaaccttttcttgatgattctactctccgatttgtggacaaactgtttgaggctgtggaggaaggccgaagctctaggcattccaagtctagcagtgacaggagcagaaaacgagagctaaaggaggtgtttggtgatgactctgagatctctaaagaatcatcaggagtaaagaagcgacgaataccccgttttgaggaggtggaagaagagccagaggtgatccctgggcctccatcagagagccctggcatgctgactaagctccagatcaaacagatgatggaggcagcaacacgacaaatcgaggagaggaaaaaacagctgagcttcattagcccccctacacctcagccaaagactccttcttcctcccaaccagaacgacttcctattggcaacactattcagccctcccaggctgccactttcatgaatgatgccattgagaaggcaaggaaagcagctgaactgcaagctcgaatccaagcccagctggcactgaagccaggactcatcggcaatgccaacatggtgggcctggctaatctccatgccatgggcattgctcccccgaaggtggagttaaaagaccaaacgaaacctacaccactgatcctggatgagcaagggcgcacctgtagaatgcaaccaggcaaaggagattgagctgacacaaccgcatgccctactctgaaagcccaaatatcctggctggtgaaaagggaaccatttccagccaccaacttaagggaaaaaccctttcaaaacacctgtggaatccaataccctttttttggccccccaaggtctcccttttgccccttttccacagccgccaaaaaac

SEQ ID NO: 361346 - DNA, 1190 bp, Homo Sapiens
  misc_feature (164)..(172): n is a, c, g, or t
  misc_feature (174)..(185): n is a, c, g, or t
atttggtgaggaattcccaagcacttagtccatggcccagggatctccctagggaaaccagcttatgacccatggttcacttaccctgactggggcccggcgcgccaaaaccgaatggttctagaaaagcttctccgagggccgaggccgggccgacatgtttnnnnnnnnntnnnnnnnnnnnnttttgaaatgaaatgaatcatttaatgagaatcttcaaactgtggcactggctgagtactaagcaaatccaggggaagacgtgaagcccaccaaggcgcacagcctcaactccggtgcctgcccctgatctgaaatacaacatccaagagctcgaggcctttttaccacccgtttgtggagcacctgcacctttctgacaacaactctcaagccaactttcagagagaaaacatgaagggaaaaaatagatttcctttggccagacagctctttcttcctcaataaataggaaccacacttggaacaaagagacagcgtgagctcggtgggggaagcacaagctttattggctgaaagttcttctcaggagcctggtctgctgggactgcatgttcctggatgggctcccccaggcctaagctccaggtttcctctggccttccgaaggattttgtgggttacgaccaattgatcaaagatgactttttcctggcgcttgctcagctgcaaaagcttcatggtgttttgcaacttcttttcttgttcaaacaattttttatgtagtttggtgacctctgccttcatttctccaatctgctcacagtgaagggggcactggccatcctcggggagtgagactctccagagaagcttcagccgcctgtaggcctcttccagggtcagcttggccgtgctcacactgctcacaaacttgctcagtggtgctgggtgtggaccctttgttcccagctcttgacttgtggagctgggagcctcttgggtttgaatgtccatttcagcaaggagcctctgtccctggctgatctgtttgagcagggcctcatagtcctcaatcaggcccaggacatggcggccattcttgctggcccacaggtggtggccagtgaccaggcgggacacacacggagtgctagttgccgaactgccactgtcgcaggagagggagtccgtgtcattcccagagagtggaggagtctctgaaa

SEQ ID NO: 361347 - DNA, 895 bp, Homo Sapiens
  misc_feature (846)..(846): n is a, c, g, or t
agagagtgaaccccccaccaccacctcaagtaaggagtgttactcctccaccacctccaagaggccagactccccctccaagaggtacaactccacctcccccttcatgggaaccaaactctcaaacaaagcgctattctggaaacatggaatacgtaatctcccgaatctctcctgtcccacctggggcatggcaagagggctatcctccaccacctctcaacacttcccccatgaatcctcctaatcaaggacagagaggcattagttctgttcctgttggcagacaaccaatcatcatgcagagttctagcaaatttaactttccatcagggagacctggaatgcagaatggtactggacaaactgatttcatgatacaccaaaatgttgtccctgctggcactgtgaatcggcagccaccacctccatatcctctgacagcagctaatggacaaagcccttctgctttacaaacagggggatctgctgctccttcgtcatatacaaatggaagtattcctcagtctatgatggtgccaaacagaaatagtcataacatggaactatataacattagtgtacctggactgcaaacaaattggcctcagtcatcttctgctccagcccagtcatccccgagcagtgggcatgaaatccctacatggcaacctaacataccagtgaggtcaaattcttttaataacccattaggaaatagagcaagtcactctgctaaatctcagcccttcccgctacaacagtcactgcaattacaccagctcctaatcaacagcctgtgaaaagtatgcgtgtatttaaaccaaagctacagactggctttancacctacccaccccttcttggataccacagccaaattcaactggttcaa

SEQ ID NO: 361348 - DNA, 1179 bp, Homo Sapiens
  misc_feature (103)..(103): n is a, c, g, or t
tgagaactggatcagcctcagatatgcaagtggcataaatgtcaacctgcagaagaatttaacccttcccaaaaacttactgaataaagaagaaaacacactngaaaaacacaattgttttcagtaatccttcttcagaatgtagtatgaaggagggaatacagacatgtatgtttcctaaggaaactgacattaaaacttcagagaacacagccgagttcaaggaacgggagctctgtccactgaagacctccaagaaactacctgaaaaccatttaccaagaaactcacctcagtaccaccagccagacttgccagaaatttccaggaaaaataatgggaataaccagcaagtacctgtcaagaatgaagtagatcattgtgaaaatttgaagaaggtggacacaaagccttcttcagaaaagaagattcacaaaacatctagagaagacatgttttctgagaaacaggacatacctttcgtagagcaagaagatccttataggaagaaaaagcttcaggagaaaagagaaggaaatttacaaaatttaaattggagtaaaagtcgaacatgtagaaagaacaagaaaaggggtgttgctccagtctcaaggcctcctgaacagagtgatctaaagcttgtgtgcagtgactttgagaggtctgagctgagcagtgacatcaatgtaagaagctggtgtatacaggaaagcactagggaggtcggtaaagcagatgccgaaatggcaagcagtttacctgctgcccagagagaagcagcaaggtaactaccagaagcctgaggaagaacatgtgtggacacaaggtctgctcccgattccagctctgactgtgggagctcctctggcagcgtgcgtgccagccggggcagctgggcggagctggagcagaaccagcgagctccgacggggataagaagcccatggcggaggcccagcacttgctgccggccggagacagcagtatcacaacaatgatataccttctgaacgctccatctccttgaatctttctcataacatctgcaatcccgatgaccgctgacataagactcccaccaacacgcagcagccttcctggacccagtcctccctggcgggacccacaggtgccgacagaagaataacggtctctactcacctggagaactgcggacca

SEQ ID NO: 361349 - DNA, 2327 bp, Homo Sapiens
gccacagccttctcccagcaggacctgctggatggggccgttctctatagccacaatggcagcctcagcccccgagacaccatggccttctccgtggaagcagggccagtgcacacggatgccaccctacaagtgaccattgccctagagggcccactggccccactgaagctggtccggcacaagaagatctacgtcttccagggagaggcagctgagatcagaagggaccagctggaggcagcccaggaggcagtgccacctgcagacatcgtattctcagtgaagagcccaccgagtgccggctacctggtgatggtgtcgcgtggcgccttggcagatgagccacccagcctggaccccgtgcagagcttctcccaggaggcagtggacacaggcagggtcctgtacctgcactcccgccctgaggcctggaccgatgccttctcgctggatgtggcctcaagcctgggtgctcccctcgagggcgtccttgtggagctggaggtgctgcccgctgccatcccactagaggcgcaaaacttcagcgtccctgagggtggcagcctcaccctggcccctccactgctccgtgtctccgggccctacttccccactctcctgggcctcagcctgcaggtgctggagccaccccagcatggagccctgcagaaggaggacggacctcaagccaggaccctcagcgccttctcctggagaatggtggaagagcagctgatccgctacgtgcatgacgggagcgagacactgacagacagttttgtcctgatggctaatgcctccgagatggatcgccagagccatcctgtggccttcactgtcactgtcctgcctgtcaatgaccaaccccccatcctcactacaaacacaggcctgcaggatcagttcttaagagcagccccggtaactggaggaatgggagccgttttgatgagaaaaatgggctggagagaaggagaaggattaggaaaaaacaaagaaggcaataaggaacccatcctagttgattttaagacagaccgaaaaggtcttgttgcagtaggagaaagagcacaaaagaggtctgggaacttctctgctgcaatgaaagatctgtcaggcaaacatcctgtgtctgctttgatggagatctgtaataaaagaaggtggcaaccacctgaatttctattggtccatgatagtggccctgatcatcgcaaacattttctctttagggtattgataaatggaagcgcttaccagcccagctttgccagccctaataagaagcatgctaaagccacagcagctactgtggttcttcaagcaatgggccttgtaccaaaggacctcatggctaatgccacttgcttcaggagtgcctcacgtagatagattgaggttttataataatcatttcagaattttactctgcatcacaatgtatttcctctttaatgttgtaaatatttggcaatttaagacattgtgtaaaaagcaatctgtaaaaacatctccaggctttgatttttgtaccatggaaattgtatttaaccatacagggttttggtatgtttatatcgtttaccttagtgatgtatttgtttaagtggctaacatccaaacgactgtttgaaggcatcagagtaatcttcagtgtggaatgttaaataacgcttttatactgtattttgtactatgatgtaactccccttccttatggctaggctactgtaacacttgcctgtaatcagtgaagggctgtgcaccttgtactatttcacaatgggttctgctggacagataatgggccagtgttattgaggtgatcaagatctgttccacagggctaatgccaccatctcccctcaaaattttgtagaggttctaaaaagaaagtggtatgttgtgtgatgatcagcactaagtcctgcattcctgttaaagccacttgggtcataagaagggagtaaaaaatgaagtctgactagaattctattgcagaggccaagtacatttagtatggcattgagttgtgatatagttttactttgatgtgcattttgaatttcagctacacctagatagacgtaaaatgataattaaaatgctgtaaccaacttatctaataaaattggcaaccagccactattttgttgactatgagaaagttaaaagtttatgttaatttttagggtctgatagaatatttcatgtgtattacagtggtattcatatgctatgtctctaaactttattttcaaaagcttaaggcccaaatacaaacttctctggaataaacgtggtgttttattttctgggttata

SEQ ID NO: 361350 - DNA, 1005 bp, Homo Sapiens
attgatagcctgggctcagctgaactctattcctggacagttcacaggaagtacaggagtacaggttttgacacaagaacagttggccaatactggtgcccaagcctggattaaaaaggatcagttcttaagagcagccccggtaactggaggaatgggagccgttttgatgagaaaaatgggctggagagaaggagaaggattaggaaaaaacaaagaaggcaataaggaacccatcctagttgattttaagacagaccgaaaaggtcttgttgcagtaggagaaagagcacaaaagaggtctgggaacttctctgctgcaatgaaagatctgtcaggcaaacatcctgtgtctgctttgatggagatctgtaataaaagaaggtggcaaccacctgaatttctattggtccatgatagtggccctgatcatcgcaaacattttctctttagggtattgagaaatggaagcccttaccagcccaattgtatgtttttcttgaataggtattgataaatggaagcgcttaccagcccagctttgccagccctaataagaagcatgctaaagccacagcagctactgtggttcttcaagcaatgggccttgtaccaaaggacctcatggctaatgccacttgcttcaggagtgcctcacgtagatagattgaagttttataataatcatttcagaattttactctgcatcacaatgtatttcctctttaatgttgtaaatatttggcaatttaagacattgtggaaaaagcaatctgtaaaaacatctccaagcctttgatttttgtaccatggaaaattgtatttaaccataccaggggttttgggaatggtttatattggcttacccttaacggaaggaatttggtttaagtggggttaaccttcccaaaacaactgttttgaaggggatcccaagtaaatcctttccatggggggaaaggttaaaataacgcctttttaaaaccggaatttttgggacttatg

SEQ ID NO: 361351 - DNA, 1427 bp, Homo Sapiens
actcgcgctcaccggggggtgctcttgtgggtcggcccggtgcaatcgaggggttggctggatggtcctgcccggaggtttgtgttgctgataacgtgcggcgccacgttgggggggcgtctggggggagacgcgggcaccctaagccaattcctagcctgtctgtctagggggtcctcgccgaaggggggattccccgggcgccacgggcttggtggtgggcaggggggagttcttcccggtggggccctaggtcgggggagggcccctaagggcggtcccgggatgggggccctcattcgggccggatgggtgacaggcagttccgccaggttacccggggtggcaaaggagcctcaggggccagcaccccgccaaggtcctgcacaagacgccctcctgcagcacctgcagccgtcgctctgaagggttccagccaccggaaggcccctagctgcataggccaggccggcaaggaggccgcaaaggagctgcaggaagggtggctcagagctgagcagtggggtcagggcaagcagcagccacggcgacagccacggtggcagtgccccacggggccgtctagggcggtgtccctccccagccagcatggccaggtggacaggcatgtatccacagctgccggctgcactggacagcccaaggcctgccagcagcactgccagcagcccagaagccagggcgagcagggctgaggcatgcaggaatctcagcgtgcccaggtggcactcctgctgccagcccacagtgggcaggagcagcaggctcaggagcaggcctggcagggccgtgtggcccagggcatgggtcagcagccggtgcacctgccaggggtccagcaacagctccggggccaggaccaggccggggccggcccccaccagccacagggtgctcatcagcagcatcaggactgaggaggccagaggcagtgctggggacagttggccatgggggcccctggcatgcatcgcttggttgaggacggtcaagggtggtcctggggctgtgtgcttactgggaagccgggagggcagaatggaaagacaaggacggagattcttccggtggcggatagagtagggggtcccaggatctgtctggttcgaactcagctggtgactttgcagagatactcaatttccttgggcctcagtttcccctttgcagagcgcgcccggcaaccccgaaaggccggtcggggaccccggctgggagtcaggactctagctcccgggcgcgacccgagaaccctgaatccattccgcgcacacccggccgcgtgacccctgccgaccggctggcgcgccacccattccccgcggcccgcggattagtcagcagttgttctagtccgggtcccttcccccagccatcccatcccgggaattccggaccggtaccag

SEQ ID NO: 361352 - DNA, 986 bp, Homo Sapiens; identical to SEQ ID NO: 102245
  misc_feature (16)..(16): n is a, c, g, or t
  misc_feature (967)..(967): n is a, c, g, or t

SEQ ID NO: 361353 - DNA, 957 bp, Homo Sapiens
  misc_feature (839)..(839): n is a, c, g, or t
tggaccggtccggaattcccgggattggaggcagcggagacagaggcggaagctgcagccctagaggtcctggctgaggtggcaggcatcttggaacctgtaggcctgcaggaggaggcagaactgccagccaagatcctggttgagtttgtggtggtatgtacaagatgagagcgagcctttcagaagccagggtctggtcctggctcctcttactgagatacagggcagcattggcagagagcagacttaaggaaacctgtaaggaggtaaggatgttccctgtctctgccctccctctgagcaggactctcagaagaaagacaagctgctctgcagccagcttcaggtagcggatttcctgcagaacatcctggctcaggaggacactgctaagggtctcgaccccttggcttctgaagacacgagccgtgagtaggcaggggattgtagtagcagctgacctgagtggggaaggaaggaggatttcagttaggtctcccatttggctgatgggaaggaggcccagtgttgcagggaggcaggctagcaggccaccctcactcatgtactcattcctggtggctcatctcaggacagaaggcaattgcagctaaggaacaatggaaagagctgaaggccacctacagggagcacctagaggccatcaaaattggcctcaccaaggcccctgactcagatggaggaaacccagaggaaacggacaccaactccggggagcctttgagcagctccaggccaagaaacaaatggccatggagaaaacgcagagcagtccagaaccagtggcagcctacacaggagaaagctctgagatntttgggcgggaggtttcttccaaaggtgagggaacctaaaacagggactcgccagacctttgaacgggttgtttccgaaacttggaaacctgaaacagcaggccaaaacaggaccgga

SEQ ID NO: 361354 - DNA, 1118 bp, Homo Sapiens
  misc_feature (828)..(828): n is a, c, g, or t
ggggtgggaaggcagctgaactcggcgcctggaaagatggaggcagcggagacagaggcggaagctgcagccctagaggtcctggctgaggtggcaggcatcttggaacctgtaggcctgcaggaggaggcagaactgccagccaagatcctggttgagtttgtggtggactctcagaagaaagacaagctgctctgcagccagcttcaggtagcggatttcctgcagaacatcctggctcaggaggacactgctaagggtctcgaccccttggcttctgaagacacgagccgacagaaggcaattgcagctaaggaacaatggaaagagctgaaggccacctacagggagcacgtagaggccatcaaaattggcctcaccaaggccctgactcagatggaggaagcccagaggaaacggacacaactccgggaagcctttgagcagctccaggccaagaaacaaatggccatggagaaacgcagagcagtccagaaccagtggcagctacaacaggagaagcatctgcagcatctggcggaggtttctgcagaggtgagggagcgtaagacagggactcagcaggagcttgacggggtgtttcagaaacttggaaacctgaagcagcaggcagaacaggagcgggacaagctgcagaggtatcagaccttcctccagcttctgtataccctgcagggtaagctgttgttcccctgagctgaggctgaggcagagaatcttccagatgataaaccccagcagccgactcgacccccaggagcagagtacagggagacaccatgggggaagagacccctggtgtggtcncttcaaggctgttggggtctacaacctggctgggagatggaaaatttgccatgacttcctggaggacagccgccttggagaaagatcctaaaaaaaggcctcgtgaattcccttcacctcccaacccatcattaccggaaagaactgcgaaactcctgagttccaccttggatttcggactaacctccccagcaagttttgggcatttgggggattaaaaatccccggggatcccccctccggtgggggaatttggtccatcttcccaagggcggggcgggaaaaaactt

SEQ ID NO: 361355 - DNA, 895 bp, Homo Sapiens; identical to SEQ ID NO: 262402
  misc_feature (800)..(800): n is a, c, g, or t

SEQ ID NO: 361356 - DNA, 973 bp, Homo Sapiens
ccggctcgcccgctttcgcacccagttcacgcgccacagctatgtgtccccgagccgcgcgggcgcccgcgacgctactcctcgccctgggcgcggtgctgtggcctgcggctggcgcctgggagcttacgattttgcacaccaacgacgtgcacagccggctggagcagaccagcgaggactccagcaagtgcgtcaacgccagccgctgcatgggtggcgtggctcggctcttcaccaaggttcagcagatccgccgcgccgaacccaacgtgctgctgctggacgccggcgaccagtaccagggcactatctggttcaccgtgtacaagggcgccgaggtggcgcacttcatgaacgccctgcgctacgatgccatggcactgggaaatcatgaatttgataatggtgtggaaggactgatcgagccactcctcaaagaggccaaatttccaattctgagtgcaaacattaaagcaaaggggccactagcatctcaaatatcaggactttatttgccatataaagttcttcctgttggtgatgaagttgtgggaatcgttggatacacttccaaagaaaccccttttctctcaaatccagggacaaatttagtgtttgaagatgaaatcactgcattacaacctgaagtagataagttaaaaactctaaatgtgaacaaaattattgcactgggacattcgggttttgaaatggataaactcatcgctcagaaagtgagggggtgtggacgtccttggtgggaggacactccaacacatttctttacacaggcaatccacccttcaaaagaggtgcctgcctgggaagtaccccattcatagtcactttcctgatgatggggcggaaaggtttcctgttagtccaggccctaatgctttttgggcaaataacctaggcctatcctggaaggatccgaggtttggatggaaagaagggagaaccgtcattc

SEQ ID NO: 361357 - DNA, 524 bp, Homo Sapiens; identical to SEQ ID NO: 262406
  misc_feature (372)..(385): n is a, c, g, or t

SEQ ID NO: 361358 - DNA, 1171 bp, Homo Sapiens
  misc_feature (16)..(16): n is a, c, g, or t
  misc_feature (116)..(116): n is a, c, g, or t
  misc_feature (333)..(333): n is a, c, g, or t
  misc_feature (358)..(358): n is a, c, g, or t
  misc_feature (496)..(496): n is a, c, g, or t
  misc_feature (899)..(921): n is a, c, g, or t
ccatgtaaggcagganatatccttggatcaaactgatttttccctcattcaagatcatttgaaggtgcaaagctaactttcactgttcttaaactcctaggaaagtcaaattaaanaaaatagcaatgacaatgcttaagttttaaaaaaagtttatcagcttagtctccaaaaccaggaagaaaatatttaatgattaaaaacaagtatgacctggaaagatattagactaaaaggaggaatcacaatgagcaggtgaaaatgttaaaggaaagctttcaatacaccaactgaaaaaggcatttctaattggccaaccaaattattcttttngattattttagccaaataaaaaganatttacagatggataactgaggtccactaacataaggtagaaacaaagtttaagctaaaaataaaatctatattttgttgcagataaatgtgagatttacctacagcaattttctattgatgctaaattaaaagcatngaattgacatcgttctaacagaaatggtttgacagatatttactggactttaaaatgctctgacgcatatgcatagaaatgcaatgaggataagaataatcgtctgtattgtccgtacagttcataaggcctttgtcattgttagtcaccttcgatgtgaatatcagtagggccattaaatcaaagctggcctaaaaagttttcaaagtgctactgtttccaactgatgaaatcttcagttttctggattttctgggtgacgattattttcaattctttttttctggtgatatatacaagaagttacagcagatatataaagggaagatcagaagcctgctgtccaagttcatcaccacttgttcctataagacagatttgtagattcaatgacaattagatnnnnnnnnnnnnnnnnnnnnnnntgttgaactgagtgaaccaaaggagatagtgtcctgagtgtgagatccacaactccactctccaaactcccacccattagctgtgtgaccttgtcaaatgcagcttcctcactgtaagatggggacagtaagagtacctgacttaaaggaggattacaagagataatacacagggggttttgcaaagccagctatctattaagtactcaataatggtagttattttcattattgcaaaaatttctatccc

SEQ ID NO: 361359 - DNA, 897 bp, Homo Sapiens
gcgcggtaccagcgcgactacgaggagatggccagtcggctgggccgcctggatgctgtgctgcagcgcatccgcacgggcagcgcgctggtgcagaggatgaagtgctacgcctcggaccaggaggtgctggacatgcacggtttcctgcgccaggcgctctgccgcctgcgccaggaggagccccagagcctgcaagctgccgtgcgcaccgatggcttcgacgagttcaaggtgcgcctgcaggacctcagctcttgcatcacccaggggaaagatgcagctgtatccaagaaagccagcccagaggctgccagcactcccagggaccctattgacgttggacctggatgtctccaatacaacgtacagcccagaagaggaagtgcagccagacccagtgccccaggaaggtcatcaagatggagtctgaggaggggaaggaggcaaggttggctcggagctccccggagcagcccaggcccagcacctccaaggcagtctcaccaccccaccgtggatggaccgcctagccccaggagccccgtcataggaagtgaggtcttcctgcccaacagcaaccacgtggccagtggcgccggggaggcagaggaacgcgttgtggtgatcagcagctcggaagactcagatgccgaaaactcgtcctcccgagagctggatgacagcagcagtgagtccagtgacctccagctggaaggccccagcaccctcaggggtctggacgagaaccttgctgacccccagcagaagacagacttctggttttctttggactcagattgaccaatgaaagggggttctccctggggctacccccacccctttcaaattagttctcggagtcccaaaaagaaatgcaaggcaaagccatctggc

SEQ ID NO: 361360 - DNA, 469 bp, Homo Sapiens
agctgtatccaagaaagccagcccagaggctgccagcactcccagggaccctattgacgttgacctgaggaacgcgttgtggtgatcagcagctcggaagactcagatgccgaaaactcgtcctcccgagagctggatgacagcagcagtgagtccagtgacctccagctggaaggccccagcaccctcagggtcctggacgagaaccttgctgacccccaagcagaagacagacctctggttttctttgacctcaagattgacaatgaaagtgggttctcctggggctacccccacccctttctaatttagtctctgagtcccaaaaagaagtgcaggcagagccatctgccaggcccaggagagctctgagctctggccaacaactgcagccaggctgggcagagcactccggctcacctgggctcctggcgtgtcatttgctggcttgaataaagatgtccgcctt

SEQ ID NO: 361361 - DNA, 1421 bp, Homo Sapiens
tcagatcgcagcaaggtaatccttgatggctggatctttttgctggagaatgcttggactagtgagcaagggattcactcatgtttcgtgtgtaaagagagcaagacagatgttaagcgctgtgtggtaactcagtgtggaaaattttaccatgaggcttgtgtgaaaaaataccctctgactgtatttgagagccgaggtttccgctgccccctccacagctgtgtgagctgccatgcttccaacccttcaaacccaaggccgtcaaaaggtaaaatgatgcggtgtgtccgctgccccgttgcctatcacagcggggatgcttgtctggcagcaggatgctcagtgatcgcctccaacagcatcatctgcactgcccacttcactgctcggaaggggaagcgacaccacgcccacgtcaacgtgagctggtgcttcgtgtgctccaaaggggggagccttctgtgctgtgagtcctgcccagcggccttccaccctgactgcctgaacatcgagatgcctgacggcagctggttctgcaatgactgcagggctgggaagaagctgcacttccaggatatcatttgggtgaaacttgggaactacagatggtggccggcagaagtttgccatcccaaaaatgttcccccaaatattcagaaaatgaagcacgagattggagaattccctgtgtttttctttgggtctaaagattattactggacgcatcaggcgcgagtgttcccgtacatggagggggaccggggcagccgctaccagggggtcagagggatcggaagagtcttcaaaaaacgcactgcaagaagctgaagctcgttttcgtgaaattaagcttcagagggaaagcccgagaaacacagggagagcgagcgcaagcccccaccataacagtcacatcaaggggtgtccccgcggggcgagttctgcccaaaacagtggcttccccaagcgccagtacccagaagaaccagaacatcaagaccgatggccaaaggggggggtgcctggtccccccaagagggaccctccgaaagggaaaaatttggttaaccagtaccctcgggggaacttgattcaccccagaagaagcgcctggcccaaaatccagcaccgccaccccaggaatgaacatccccccactttctaactggctcccctaataaaaaaagggacccgtaataataagaacggtgggccccaaaaagcaaaacaacccctcccaatttttgtgactcaccatctggcccagctcccaacttggggaaaccccctccagggggaacaatggaaatgtgggcgaccactcccgcgtcggagccacgtatttgcccccctctttgggaaaaattctcctctccagggacaccggacccccctgctcttttaaaatctctcagccc

SEQ ID NO: 361362 - DNA, 776 bp, Homo Sapiens
gtgtgatatggtgatgaggattgggtgtataatttttgaggtgtagttggagagtatgtagaggagaatatgaggtgtagttgatgaagggtggttgagatggggtgataagtgggtgggaagaggagaataatgggtgggacggtggttatcaagctggagcgagtcaacctggggctctgaggcgtggggtcccagcactccagggactgggggcacctcgggctcggtggggaggccgggaggaggaggaggaggactgggggatggccaggccccccgctgatggcccgttagggccacgtcatgaggctcccccttgggggccccgggctggatggaggtgatgcaggcggggtcgacgaggggcttgggccggcgagccgactcctcgatcaggctctgccactggcggggcagccccgtgaacttctgctcgtgctggtcgaagcccgtgtgcacgcggtgctcgaagttggacggcgcggagatctccacccgcttcttcctcttcccaaacatggtgccggggactcaggtgcggcctgcacacacctggtctgatgctggtgggacagaagtgccctcaggcaggtgaccactcctctaggggcttcgggttactcatcggctcggcgccgcagtcgctcgcggcctaactgctcgacactggaactccgcgccctcgcccactccctcagctctcttgcaccgccaccaccgcggacactcccgccgccatgttgaatatcccgtttatccggaggggggggtac

SEQ ID NO: 361363 - DNA, 1803 bp, Homo Sapiens
ggagtgtccgcggtggtggcggtgcaagagagctgagggaggcgcgagggcgcggagttccaggtcgagcagttaggccgcgagcgactgcggcgccgagccggccgcaccgagtccccggcaccatgtttgggaagaggaagaagcgggtggagatctccgcgccgtccaacttcgagcaccgcgtgcacacgggcttcgaccagcacgagcagaagttcacggggctgccccgccagtggcagagcctgatcgaggagtcggctcgccggcccaagcccctcgtcgaccccgcctgcatcacctccatccagcccggggcccccaagggggagcctcatgacgtggcccctaacgggccatcagcggggggcctggccatcccccagtcctcctcctcctcctcccggcctcccacccgagcccgaggtgcccccagccctggagtgctgggaccccacgcctcagagccccagctggcccctccagcctgcacccccgccgcccctgctgttcctgggccccctggcccccgctcaccacagcgggagccacagcgagtatcccatgagcagttccgggctgccctgcagctggtggtggacccaggcgacccccgctcctacctggacaacttcatcaagattggcgagggctccacgggcatcgtgtgcatcgccaccgtgcgcagctcgggcaagctggtggccgtcaagaagatggacctgcgcaagcagcagaggcgcgagctgctcttcaacgaggtggtaatcatgagggactaccagcacgagaatgtggtggagatgtacaacagctacctggtgggggacgagctctgggtggtcatggagttcctggaaggaggcgccctcaccgatatcgtcacccacaccaggatgaacgaggagcagatcgcggccgtgtgccttgcagtgctgcaggccctgtcggtgctccacgcccagggcgtcatccaccgggacatcaagagcgactcgatcctgctgacccatgatggcagggtgaagctgtcagactttgggttctgcgcccaggtgagcaaggaagtgccccgaaggaagtcgctggtcggcacgccctactggatggccccagagctcatctcccgccttccctacgggccagaggtagacatctggtcgctggggataatggtgattgagatggtggacggagagcccccctacttcaacgagccacccctcaaagccatgaagatgattcgggacaacctgccaccccgactgaagaacctgcacaaggtgtcgccatccctgaagggcttcctggaccgcctgctggtgcgagaccctgcccagcgggccacggcagccgagctgctgaagcacccattcctggccaaggcagggccgcctgccagcatcgtgcccctcatgcgccagaaccgcaccagatgaggcccagcgcccttccgcgtcaaggcaaaagagccggcgcgggtcaccccaggacgccactgaggccagtagggggccaggcctcccgactcctccgcagcccgggagatgctccgcgtggcaccaacctccttgctgggggtagatgagaccctactactgaactccagttttgatctcgtgacttttagaaaaacacagggactcgtgggaagcaagcgaggctcccaggacccccaacctctgggacaggccctcccccatgttcttctgtctccaggaagggcaagcggccctccaatcacttggaagtctgcaagtgggggtcgctggaggtggagagaacactaagaggtgaaca

SEQ ID NO: 361364 - DNA, 741 bp, Homo Sapiens
gggacccccctgagcccctcctggaagacttgggcctctttctcagggccccgcccgtcgccctgtcaccactgccgccacccgcctccgctgtgaccggcgaaccggcctcggctgcctgccttccctgggccccctctggccgtaggtggccggctcctctggcatcccagtttcctggcgggcacgggcgggccgcggcgggctgtctctccgcagggagttggagcgtgtcaccgacatgttctcaaactcgtccagcagcagcgtgagggccccatctttggcacactttgctgcccccgcacgatggtcttgggggccccgggctggatggaggtgatgcaggcggggtcagacagaggggcttgggccaggcgagccgactcctcgatcaggctcttgccactggcggggcagccccgtgaacttctgctcgtgctggtcgaagcccgtgtgcacgcggtgctcgaagttggacggcgcggagatctccacccgcttcttcctcttcccaaacatggtgccggggactcggtgcggcctggtctgatgctggtgggacagaagtgccctcaggcaggtgaccactcctctaggggcttcgggttactcatcggctcggcgccgcagtcgctcgcggcctaactgctcgacctggaactccgcgccctcgcgcctccctcagatctcatgcaccgccaccaccgcggacactcccgatcccggaaattccggacc

SEQ ID NO: 361365 - DNA, 469 bp, Homo Sapiens
ggaagcagtggtatcaacgcagagggcccattacggccggggatgtctcttgtcagctgtctttcagaagacctggtggggcaagtccgtgggcatcatgttgaccgagctggagaaagccttgaactctatcatcgacgtctaccacaagtactccctgataaaggggaatttccatgccgtctacagggatgacctgaagaaattgctagagaccgagtgtcctcagtatatcaggaaaaagggtgcagacgtctggttcaaagagttggatatcaacactgatggtgcagttaacttccaggagttcctcattctggtgataaagatgggcgtggcagcccacaaaaaaagccatgaagaaagccacaaagagtagctgagttactgggcccagaggctgggcccctggacatgtacctgcagaataataaagtcatcaatacctcaaaaagaaaatcacctaacg

SEQ ID NO: 361366 - DNA, 1516 bp, Homo Sapiens
  misc_feature (1343)..(1343): n is a, c, g, or t
acctaacaccctataaagagggaggaggacggccggcgggcgtccggcaccgcgccccataatggtacgactttacaccccctcacccaagcagttggaaccggtccggaatttccgggatgccgctccccttgcgaagaactggggcctcccgggaggagagagggctttgccttgaaacccgggacgccaggggcgctcccgcaagtgggggtcctccgggacttggaacgccccggctgggtggtgtccgggcgtcctttccccgcttcttcccacctcggctggtcccgtttcctcctgcgcccagtgcggacctgtctcggcgcccgctgccctctcaccgccccacgcaggatcccggcctggtcaccgggcagtgtgatgcttcccgactgccgcggggacagcgaggcacacacagggcttgggccgcgccggaggccacacggcctggctgagttgctcctggtctcccgcctctcccaggcgacccggaggtagcatttcccaggaggcacggtcccccccagggggatgggcacagccacgccagatggacgagaagaccaagaaagcagaggaaatggccctgagcctcacccgagcagtggcgggcggggatgaacaggtggcaatgaagtgtgccatctggctggcagagcaacgggtgcccctgagtgtgcaactgaagcctgaggtctccccaacgcaggacatcaggctgtgggtgagcgtggaggatgctcagatgcacaccgtcaccatctggctcacagtgcgccctgatatgacagtggcgtctctcaaggacatggtttttctggactatggcttcccaccagtcttgcagcagtgggtgattgggcagcggctggcacgagaccaggagaccctgcactcccatggggtgcggcagaatggggacagtgcctacctctatctgctgtcagcccgcaacacctccctcaaccctcaggagctgcagcgggagcggcagctgcggatgctggaagatctgggcttcaaggacctcacgctgcagccgcggggccctctggagccaggccccccaaagcccggggtcccccaggaacccggacgggggcagccagatgcagtgcctgagcccccaccggtgggctggcagtgccccgggtgcaccttcatcaacaagcccacgcggcctggctgtgagatgtgctgccgggcgcgccccgaggcctaccaggtccccgcctcataccagccccgacaaggaggagcgagcgcgcctggcgggcgaggaagaagcgctgcgtcagaaccagcagggagtgcctgcagggcaccatcgcacagcncagggaggcggaggtctcctgccccttcatttgacacacctactcgtgctcgggcaaacttgctgtggaaaggggaaatcaaggcgcctcctgaacccctgtaggattaccaaccgattttctagaaccctggggaatcttccattggcctggaaaaacccgcagtggccctt

SEQ ID NO: 361367 - DNA, 1392 bp, Homo Sapiens
gtgttgttggtgagtttgttggggcatagaacgtccaatccgtgggagagggcctgggtgggattcagccgaggggcgggagtccggggacccgcgatcagccccggaggacggggtggggtcgccccaaacaggagcgccgggaccgctgggaccccgcactcggcgtccgccgccgccgggtagccgggcagtggaggtcccggatgaggcgacaatttttcctggcccccaccatcccagtcccgccccacttccggggccgccactttcactttctcttccgccgaagccgctccccttgcgaagaactggggcctcccgggaggagagagggctttgccttgaaacccgggacgccaggggcgctcccgcaagtgggggtcctccgggacttggaacgccccggctgggtggtgtccgggcgtcctttccccgcttcttcccacctcggctggtcccgtttcctcctgcgcccagtgcggacctgtctcggcgcccgctgccctctcaccgccccaagcaggatcccggcctggtcaccgggcagtgtgatgcttcccgactgccgcggggacagcgaggcacacacagggcttgggccgcgccggaggccacacggcctggctgagttgctcctggtctcccgcctctcccaggcgacccggaggtagcatttcccaggaggcacggtcccccccagggggatgggcacagccacgccagatggacgagaagaccaagaaagcagaggaaatggccctgagcctcacccgagcagtggcgggcggggatgaacaggtggcaatgaagtgtgccatctggctggcagagcaacgggtgcccctgagtgtgcaactgaagcctgaggtctccccaacgcaggacatcagattcctcatggtgcaaaatggccattccagctccatccagccatcacatcaaaggaggaagggaaaaaagacacccctccacactcttctaaaaagcatacctcaaaaattggacacacttcttccggttaattcctgtgggaccgaaacggattccccagcttccagttcagctggaggggggaccgggatagcacagaaattccaccctaaaattacggggtcacccttggtcaaggaaggggaaaaacaaggatactggcggcgccgcccccgcgaaaactagaacggcatggtggaaaacgcttcggaagaagcaagtgaagaaaaaccgcggtcagaactaagcacccacggcgcaacacgcacatccgacgtttgggacaccctaaggggcatggtgtggcggggggtataaaacaaggcctcgcatcgcgatcaagacggtgctcacaagagctacgacacgagaggcagcggtatgtagaacgaacgtcga

SEQ ID NO: 361368 - DNA, 916 bp, Homo Sapiens; identical to SEQ ID NO: 262420

SEQ ID NO: 361369 - DNA, 839 bp, Homo Sapiens
  misc_feature (742)..(742): n is a, c, g, or t
  misc_feature (751)..(751): n is a, c, g, or t
  misc_feature (793)..(793): n is a, c, g, or t
gaaacaaagagcacattagtgctatgaaacgtggtattaaaagcaggctggtaccggtccgggaattctcgggcatatcagtcgacccacgctgtcgcattggggacatcggacccaagatggactttgatcaaacagacaatggcttcctgcagctgaaccatgtgcgggtccccagggaagaacatgctgagtcgcttagcacaggtcttgccagatggcacctacgtcaaactcggtacagcacagagcaactaccttcccatggtggtggtgcagggtggagctgatgtcaggggagatcctccctatactgcagaaggcctgtgtcatcgcacatgcgctactcggatcatccgccgccaatcccggactccggcccagtgaccacagaggcaaaggtcctggactaccagacacaacagcaagaaactcatttcctcagatggccatcagtatatgccttccactttcctggcagtcagccctcttggagttcttccagcactcctacactgccattctgaaccaagacttcagcttcctgcctgagctccacgcactgagcacgggcatgaaggccatgatgtcagaattctgcacccagggagctgagatggcccgcagggcctgttgcggacatggctactcaaagctgagtggcctgccatcactggtaccaaattgtcggcctcctgtacctacgagggtgagaacacagtgctctcctggcagggggcangttcctggntgagagctacctgcaacttcaaatgtcccctgggctcacccnccagagatctctctctccatctgtcgcatatctcaccgcacctgac

SEQ ID NO: 361370 - DNA, 1413 bp, Homo Sapiens
  misc_feature (1065)..(1133): n is a, c, g, or t
  misc_feature (1137)..(1137): n is a, c, g, or t
  misc_feature (1149)..(1227): n is a, c, g, or t
  misc_feature (1229)..(1230): n is a, c, g, or t
  misc_feature (1235)..(1235): n is a, c, g, or t
  misc_feature (1237)..(1237): n is a, c, g, or t
  misc_feature (1243)..(1280): n is a, c, g, or t
  misc_feature (1306)..(1348): n is a, c, g, or t
gggagatgctcagtaagtggtgcacagggttggtccctatggtggaggccccctaacaccgcccaacccccctccatgttctcacagctccacgcactgagcacgggcatgaaggccatgatgtcagaattctgcacccagggagctgagatgtgccgcagggcctgtggcggacatggctactcaaagctgagtggcctgccatcactggtcaccaaattgtcggcctcctgtacctacgagggtgagaacacagtgctctacctgcaggtggccaggttcctggtgaagagctacctgcagactcagatgtcccctggctccacgccacagagatctctctctccatctgtcgcatatctcaccgcacctgacctggccaggtgtccagcccagagggcagccgacttcctctgcccggagctctacaccacggcctgggcacatgtggcagtaaggctcataaaggactcagtgcagcatttacagaccctgacgcaatccggagctgaccagcacgaggcttggaaccagaccactgtcatacacctccaggctgctaaggtgcactgctactatgtcactgtgaagggttttacagaagctctggagaaactagaaaatgaaccagcgattcagcaggtgctcaagcgcctctgtgacctccatgccatacatggaatcttgactaactcgggtgactttctccatgacgccttcctgtctggtgcccaagtggacatggcaagaacagcctacctggacctgctccgcctgatccggaaggatgccatcctgttaactgatgcttttgacttcaccgatcagtgtttaaattcagcacttggctgttatgatggaaacgtctacgaacgcctgttccagtgggctcagaagtcaccaaccaatactcaggagaacctgcctatgaggaatatataagaccacttttacaaagttggagatccaagctatgaaataaccaacagtattcaagaagcaaccagcaccatcatgtgataatggtactatggcatatatgcaacattaaaattttaaattagnnnnnnnnnnnnnnnnnnnnnnnnnnnnnnnnnnnnnnnnnnnnnnnnnnnnnnnnnnnnnnnnnnnnnaaanaacaacaccaannnnnnnnnnnnnnnnnnnnnnnnnnnnnnnnnnnnnnnnnnnnnnnnnnnnnnnnnnnnnnnnnnnnnnnnnnnnnnnanncccananacaaannnnnnnnnnnnnnnnnnnnnnnnnnnnnnnnnnnnnnaaaaaactttttttaacccctctctnnnnnnnnnnnnnnnnnnnnnnnnnnnnnnnnnnnnnnnnnnncatctttgtcgtttctccaaaaaacaacgcggccacaaaaagaaggggtggtttttttcccccac

SEQ ID NO: 361371 - DNA, 1563 bp, Homo Sapiens
  misc_feature (331)..(435): n is a, c, g, or t
  misc_feature (740)..(740): n is a, c, g, or t
ggagagccagctgcgggccgtccagcggctgtgccacttctacagcgccgtcatgcccagcgaggcccagtgtgtcatctaccatgagctccagctctccctggcctgcaaggtggccgacaaggtgctggaggggcagctcctggagaccatcagccagctctacctgtccctgggcaccgagcgggcccagtgacattgctgcactcacaccccttcgactcaccaagagagcagggaaggagccggattccacagggacccgggagatcggctccagccttggcctcaggttcacagcaggaaaatgggccagtgtgttagagccatnnnnnnnnnnnnnnnnnnnnnnnnnnnnnnnnnnnnnnnnnnnnnnnnnnnnnnnnnnnnnnnnnnnnnnnnnnnnnnnnnnnnnnnnnnnnnnnnnnnnnnnnngctctgggggcaggccagcaagctatatggacaggcctctggatgactgtgatgcctgcgcaccttgagaaccatcggcctggatagcatctgaacactgatggctcctgggcctacaaatccgcactggactacaccaaacgaagtctggggattttcattgacctccagaagaaagagaaggaggcgcatgcctggctgcaagcagggaagatctattacatcttgcggcagagcgagctggtggacctctacatccaggtggcacagaacgtggccctgtacacaggcgaccccaacctggnggctggagctgttttgaggcggctggagacatcttcttcgacggggcctgggagcgggagaaagctgtgtccttctaccgggaaccgggccctgcccctggcagtgactacgggcaacccgcaaagcggagctgcggctgtgcaacaagctggtggcactgctggccacgctggaagagccaccagaagggcttggagtttgcccacatggccctagcactcagcatcaccctggggggaccggctgaacgagcgcgtggcctaccaccggctggccgccctgcaacaccgactgggccatggcgagctggcagagcacttctacctcaaggccctgtcgctctgcaactcgccgctggagtttgacgaggagaccctctactacgtgaaggtgtacctggtgctcggtgacatcatcttctacgacctgaaggacccgtttgatgcagccgggtactaccagctggcgctggcggccgccgtggacctgggcaacaagaaggcacagctgaagatctacacgcggctggccaccatctaccacaacttcctcctggaccgtgagaagtcgctcttcttctaccagaaggccaggaccttcgccacagagctcaacgtccgcagggtcaacctgcctcctctgccactctgcgggtgggccccctggttggcccccagccaccctcgctgaggacagcatccaagggagtgggttttgtgcaagggctgggggtctcctgcctctcctcgtgtcgccggtggctcattttctggcaaatggaggcacgaacgcaggggccaaatagcaataaatgggttttgt

SEQ ID NO: 361372 - DNA, 307 bp, Homo Sapiens
aagatcatctatcatcatcatcaatggacggatggatggatggagagtgaacatgtgcagaggccctcctgcatccctcatcactcacctggatgtagaggtccaccagctcgctctgccgcaagatgtaatagatcttccctgcttgcagccaggcatgcgcctccttctctttcttctggaggtcaatgaaaatccccagacttcgtttggtgtagtccagtgcggatttgtaggccctggtatcagacacaggtgtcagaacaagggctgtcatcctcctggaaccagtctgcctcctcccgtg

SEQ ID NO: 361373 - DNA, 937 bp, Homo Sapiens
gggaggagaaaccccaacccctttccgggggaatttaaagcatggagtgctccttttagtccccatgtgaagtccggtgatgctgtgaaggtttgagctctgccgaaagctttccccacactgcccacactggtagggctctctcccaggtgtggatcctctggtgcagcttcagggtagactgccgcccaaagcagttgccacactccacgcacgtgtagggcctctcccctgtgtgcactcgcttgtgcctcttcagctcggaattccacgtgaagcttttcccacagtcatcacatttgtaaggtttcttggccgagcgggccggctggtgaccaagacgctgcaaacggctgctcagactccgtttacctcctttgcttttctttagctctctcagtgggtggctttttagggggctgctgatgtattccaccctgcaatgtctctggtagtgagcaaatggcttttgagcatttggggagctgacctgcctccgtgacaaccgaggttcactcatatttgcccctcttggttcaggattctgcagaccattccctttggatctgccagctgacactgcacatggctttgctcctttagccccttcctgttgtggattttccttgttgtcacttctcattctgggggcctctgtcccagccaatttgggggttggttcttggaggagtggggatttctcccaatgatgggggctcagccggtcataagctcctgcctgggaaggctctgctggagagctctccctgagatctctcctaggagtctgcggttgaaagtctggcagttcctgttctccaagctgagatccagttttctccaagagcaccttttgcccctgcatacaaacggccacccactgctttggtttcttggatgctctgtgaaaatcttccacgagggtcacaatctcctt

SEQ ID NO: 361374 - DNA, 1294 bp, Homo Sapiens
ggatgatgattcccaagaagctgaagttatccagtctctgctggatgttgtggatgaggaagcccagaatcttttaaacgaaaataatgcagcaggagactcctgtggtccaggtacattaaagatgaatgggaagttatcagaagagagaacagaagatacagactgcgatggttcacctttacctgagtattttactgaggccaccaaaatgaatggctgtgaagaatattgtgaagaaaaagtaaaaagtgaaagcttaattcagaagccacaagaaaagaagactgatgatgatgaaataacatggggaaatgatgagttgccaatagagagaacaaaccatgaagattctgataaagatcattcctttctgacaaacgatgagctcgctgtactccctgtcgtcaaagtgcttccctctggtaaatacacgggtgccaacttaaaatcagtcattcgagtcctgcggggtttgctagatcaaggaattccttctaaggagctggagaatcttcaagaattaaaacctttggatcagtgtctaattgggcaaactaaggaaaacagaaggaagaacagatataaaaatatacttccctatgatgctacaagagtgcctcttggagatgaaggtggctatatcaatgccagcttcattaagataccagttggggaaagaagagttcgtttacattgcctgccaaggaccactgcctacaactgttggagacttctggcagatgatttgggagcaaaaatccacagtgatagccatgatgactcaagaagtagaaggagaaaaaatcaaatgccagcgctatttggcccaacatcctaggcaaaacaacaatggtcagcaacagacttcgactggctcttgtgagaatgcagcagctgaaaggctttgtggtgagggcaatgaacccctgaagatattcagaccagagaggtgcgcccatatttcccatctgaatttcactgcctgggccagaccatgatacacctttctcaaccagaagatctgcctaccttttatctcctaaatgaaacacctcccccgaatcaggccccaaccattccccacttgcatggctggacattggaaccgttcagggaaccctggatttgccataaaaggggggttctggggaataaatcaacccaggatcttggaatttgggccatctcccggaatttgggggcccctgtctgaaaaattccaaagaacccggaaaggggtctccaacgaagggcgcccctttatttttttcgtggtaagcaggggcgcata

SEQ ID NO: 361375 - DNA, 1036 bp, Homo Sapiens
  misc_feature (352)..(352): n is a, c, g, or t
aagacttagtagaagctttggaaagagatataatttcccagaatcccaatgttcgatgggatgatatcgctgatttagtagaagctaaaaagttgcttaaggaagccgtagtgttaccaatgtggatgcccgaattctttaagggcattaggagaccatggaaaggagtacggatggtcggccccacctggcacggcgacagacgctcctaggctaaagcagtaggctacagaatgcaagacaacattcttcaacgtgctcttcatcgaactctgacttccaaatacagaggagaatctgagaagcttgttcgtcttctgtttgaaatggctcgatttgatgtctccagccnaccatatttgaattagatgagatagactccatctgtagtcgccgagggacttctgaagaacatgaagcaagcagaagggtgaaagcggagctgctggttcagatggatggtgttggaggtacttctgcaaatgatgacccttccaaaatggttatggttctggcagctactaattttgccatgggatatagatgaggctttaagacgacgccttgagaaacgaatctatattcctttgccgtcagcaaaaggcagggaggagctattacgaataagtctacgtgagttggaattggctgatgatgttgaccttgcaagtatagcagaaaacatggaaggttattcaggtgcggacattgaccaacgtgtgcagggatgcgtccttgatggcaatgagaaggcgcattgaaggtttgactccagaggaaatccgaaatctttccgaagaagaaatgcacatgcctacaactatggaggatttcgagatgggctttaaaaaaggtttcgtaagtcagtgtctgctgcagacattgaaagatagcgagaaatggatatttgagtttggatcatgctaaattatcacatgtaaactgtgagaaatgtgccttaagtgtttgaatattaaatgcagtaattcattgtaactgagtgctatattttttataactccctcaggttggtaaa

SEQ ID NO: 361376 - DNA, 1211 bp, Homo Sapiens
  misc_feature (44)..(80): n is a, c, g, or t
tgtatagatcatatagggcgactggattcacgcggtggcggcgnnnnnnnnnnnnnnnnnnnnnnnnnnnnnnnnnnnnnatcaggccaaatcggccgagctcgaattcgtcgagagcggtgagtcgccgaggtcgtccccggcaccggaagtgaccctggcgggtttgtcttcaaattctcggcgagcaggagccgcgccggcaggtggtgttgacgattgaactgggcagtactggggccgtgagcggagagcaaagtgggctggactgggtcaggccctccttcctcgctgccgggatctccactccgccaatcccctgtgcctggcgttgggcggtttcccgaggagcttgggccgccgcagcttacagttgaacatgagtcttcttatgattagtgagaatgtaaaattggctcgtgaatatgcattgctgggaaactatgactctgcgatggtctattatcagggagttcttgaccaaatgaacaagtatctgtactcagtcaaagatacatacctccagcagaaatggcaacaggtttggcaggaaataaatgtggaagctaaacatgttaaagatatcatgaaaacactagagagctttaaactggacagcactcccttgaaagcggcacagcatgaccttccagcttctgagggagaagtctggtccatgcctgtacctgttgaacgaagaccctcaccaggacctagaaaacgccaatcttctcagtacagtgaccctaaatcacatggtaatcgtccaagtacaactgtcagagttcaccgttcatctgcacagaatgttcacaatgacagagggaaagctgttcgttgtcgtgaaaagaaagaacagaataaaggaagagaggaaaagaacaaatcacctgcgtgcagtaacagaaccagagacaaataaatttgatagtaccggatatgataaagacttagttagaagctttggaaagagatataatttcccagaatcccaatgttcgatgggagtactgatggtcggcccacctggcacggggaagacgctcctttgctaagcagtagctacagaatgcaagacaacattcttcaatgtctcttcatcaactttgacttccaaatacagagggagatctgagaaagctggtcgtcttccgtttgaaatggctccgatttaatctcccgcccaccatatttaattggatgagatagat

SEQ ID NO: 361377 - DNA, 1129 bp, Homo Sapiens
  misc_feature (965)..(965): n is a, c, g, or t
  misc_feature (1006)..(1006): n is a, c, g, or t
gcttcagctgcggctgggataacggaactctgtctgctggggcaggtggggaggagccttctcccatcccagggcttcacgcagcttccttaacgaggtttcccagctatcagaagtggaaacagaaacagaaaatgatgatcgtgactcggacgaagaaggggcatctgaccggcgaggcccagagcgaagaggtgggaagcgagaccgtggccaaggtgcatcccggccccacgccccaggcacccctgcaggccgagtccgcccggaactcaagaccaagcagcagatcctgaagcagcggcgccgggcccagaagctgcacttcctgcagcgtggtggcctcaagcagctctctgcccgcaaccgccgccgcgtccaggagctgcagcagggcgccttcggccggggtgcccgctccaagaagggcaagatgcggaagaggatgtgaggaccaggacccagccccgtggctccttgattggccttagggtgggcatcagcagacgttcccgtgcaccactgtgtgcctggccctgtgctgggcactgggggcactccctgcaggagccatcatctgtgaaaaggagcactgtatggccacagaagggcagcagctgcgtcagcctaagacagagacatttgaacagggccttgaagggtgtgcaggagttcgccagcaaagccaggcaggccaagacttgagtgggcaactcagctgctgcttgcttccatgtgttctgggttcagaggtcatggctgcaccggtcagagccctgagtgcctcagggtttggcaatggaatttttaatgtaataaatctttattgagcactgctggtggccaggagtgcggtctacttgggggaactggaatggagagacccaggtactaaaatcccagctaacgtgggcagaggagttgcgggtctcctgaaggtgagttctgctgccttgtccatttancgatgaagaaagttgaactcagagcacaaaccaggtgccanaaggcgggagttggtcccccttcctcccactggaaatggttgcacctgggatggggcttttgggggaaaggggaccgggatgccccaccccagggggggaaggaaaaaagcgtgctccccttt

SEQ ID NO: 361378 - DNA, 980 bp, Homo Sapiens
  misc_feature (54)..(54): n is a, c, g, or t
gtttgagctttggtatcccaccgtccaaaccccggaaatgagcacgggcctccngtgaagcccagccccgggccaaaaatcccaccaaccacagtttgggcagcgtggcggagaaccagcaccgtctgggtggcccccggggaggcggggcgatgatctcctgcagctgctctgcgaaacccattcacaaaaagccggtcagcttcatcgaacaccacgtattccacactctgcagcttcaggctcattttccacagccacatgcaccaaccgtccgggcgtggcaataattatgtcgggattttcgtgcagggctgcaaactggtcttccatcctgtctccacccaggatcagggcagtcttgaggccagtgaacttgcctagctccttagtgaacttcagggtctgcagggccagctctcgggtcggcgagaggatgagggcgcgggccccggtctgggcactgtgggtcttgagccgctcgaacattgggaggaggaagcaggctgtcttgccactgcccgtccgggccatggccaccacgtccttgccatccaagatcaccgggatggtcttcctctggatgggtgttggcaccttgtaccccttcttcatgatgcctttgaacaccgggtagctcaggcccatggactggaagcctccagacttcttcttcttcttgttctgggcacgcaccatctcccgggtgtccggctccacatccgaggtgcattccgaggtggggaaggtgggcaggggtcttccaggtcccagcttccgggcccgggcgtcatcttccgcctggatctcaaactcgccgtcctccgagtcgctgccgcgggcctgggaggccgcgcctcggcgcttccggagccctttcttcttcctccactgggccatggcagctcgcgaccgaggtccagccgccgggcccttgtcggccgccattcgggccgcgcgcatcccgggaattccggacc

SEQ ID NO: 361379 - DNA, 2753 bp, Homo Sapiens
  misc_feature (1954)..(1990): n is a, c, g, or t
ggctggtaccggtccggaattcccgggatcgcggcccgaatggcggccgacaagcgcccggcggctggacctcggtcgcgagctgccatggcccagtggaggaagaagaaagggctccggaagcgccgaggcgcggcctcccaggcccgcggcagcgactcggaggacggcgagtttgagatccaggcggaagatgacgcccgggcccggaagctgggacctggaagacccctgcccaccttccccacctcggaatgcacctcggatgtggagccggacacccgggagatggtgcgtgcccagaacaagaagaagaagaagaagtctggaggcttccagtccatgggcctgagctacccggtgttcaaaggcatcatgaagaaggggtacaaggtgccaacacccatccagaggaagaccatcccggtgatcttggatggcaaggacgtggtggccatggcccggacgggcagtggcaagacagcctgcttcctcctcccaatgttcgagcggctcaagacccacagtgcccagaccggggcccgcgccctcatcctctcgccgacccgagagctggccctgcagaccctgaagttcactaaggagctaggcaagttcactggcctcaagactgccctgatcctgggtggagacaggatggaagaccagtttgcagccctgcacgaaaatcccgacataattattgccacgcccggacggttggtgcatgtggctgtggaaatgagcctgaagctgcagagtgtggaatacgtggtgttcgatgaagctgaccggctttttgaaatgggtttcgcagagcagctgcaggagatcatcgcccgcctccccgggggccaccagacggtgctgttctccgccacgctgcccaaactgctggtggaatttgcccgggctggcctcacggagcccgtgctcatccggcttgacgtggataccaagctcaacgagcagctgaagacctccttcttcctcgtgcgggaggacaccaaggctgccgtgctgctccacctgctgcacaacgtggtgcggccccaggaccagaccgtgggtgtttgtggccacgaagcaccacgccgagtacctcactgagctgctgacgacccagcgggtgagctgcgcccacatctacagtgccctagacccgacagcccgcaagatcaatctcgccaaattcacgcttggcaagtgctccactctcattgtgactgacctggccgcccgaggctggacatcccgctgctggacaatgtcatcaactacagcttccccgccaagggcaaactcttcctgcaccgcgtgggccgtgtggctcgggctggccgaagtggcacagcctactccttggtggcccctgatgaaatcccctacctgctggatctgcacctgttcctgggccgctccctcaccctcgcccgacccctcaaggagccctcaggtgtggcccggtgtgggatggcatgctgggtcgggtgccacagagtgtgggtgggacgaggaggacagtggtcttgcagagcaccctgggaggcatcgctgggagctacggggcctggcccgcgttgctgataacgcccagcagcagtatgtgcgctcacgcccggcgccctcgcctgagtccatcaagagggccaaggagatggaccttgtggggctgggcctgcaccccctcttcagctcgcgttttgaggaggaggagctgcagcggctgaggctggtggacagcataaagaactaccgctcccgggcgactatctttgagatcaacgcctccagccgagacctgtgcagccaggtgatcgcgcgccaagcggcagaaggaccgcaaggccatcgcccgcttccagcagggacagcaggggcggcaggagcagcaggagggcccagtgggcccagccccgagccgcccagcactgcaggagaagcagcctgagannnnnnnnnnnnnnnnnnnnnnnnnnnnnnnnnnnnncattttctcagaggtcgtgggccggaagcggcagcggtcaggacccaacaggggagccaagaggcggagggaggaggcccggcagcgggaccaggaattctacatcccctaccggcccaaggactttgacagcgagcggggcctgagcatcagcggggaagggggagcctttgagcagcaggcagctggcgctgtcctggacttgatgggggatgaagcccagaacctgacgaggggccggcagcagctcaagtgggaccgtaagaagaagcggtttgtgggacagtcaggacaggaagacaagaagaagattaagacagagagcggccgctacatcagcagctcctacaagcgagacctctatcagaagtggaaacagaaacagaaaattgatgatcgtgactcggacgaagaaggggcatctgaccggcgaggcccagagcgaagaggtgggaagcgagaccgtggccaagcaggtgcatcccggccccacgccccaggcacccctgcaggccgagtccgcccggaactcaagaccaagcagcagatcctgaagcagcggcgccgggcccagaagctgcacttcctgcagcgtggtggcctcaagcagctctctgcccgcaaccgccgccgcgtccaggagctgcagcagggcgccttcggccgggggtgcccgctccaagaagggcaagatgcggacgaggatgtgaggaccaggacccagcccccgtggctccttgattgggcttagggtgagcatcag

SEQ ID NO: 361380 - DNA, 1064 bp, Homo Sapiens
tctggggcaggtgttggctctggtgctggtggccgctctgtggggtggcacgcagccgctgctgaagcgggcctccgccggcctgcagcgggttcatgagccgacctgggcccagcagttgctacaggagatgaagaccctcttcttgaatactgagtacctgatgccctttctcctcaaccagtgtggatcccttctctattacctcaccttggcatcgacagatctgaccctggctgtgcccatctgtaactctctggctatcatcttcacactgattgttgggaaggcccttggagaagatattggtggaaaacgagcagttgctggcatggtgctcaccgtgataggaatttcactctgcatcacaagctcagtgagtaagacccaggggcaacagtctaccctttgagtgggccgaacccacttccagctctgctgcctccaggaagcccctgggccatgaagtgctggcagtgagcggatggacctagcacttcccctctctggccttagcttcctcctctcttatggggataacagctacctcatggatcacaataagagaacaagagtgaaagagttttgtaaccttcaagtgctgttcagctgcggggatttagcacaggagactctacgctcaccctcagcaacctttctgccccagcagctctcttcctgctaacatctcaggctcccagcccagccaccattactgtggcctgatctggactatcatggtggcaggttccatggactgcagaactccagctgcatggaaagggccagctgcagactttgagccagaaatgcaaacgggaggcctctgggactcagtcagagcgctttggctgaatgaggggtggaaccgagggaagaaggtgcgtcggagtggcagatgcaggaaatgagctgtctattagccttgcctgccccacccatgaggtaggcagaaatcctcactgccagcccctcttaaacaggtagagagctgtgagccccagccccacctgactccagcacacctggcgagtagtagctgtcaataaatctatggtaaacag

SEQ ID NO: 361381 - DNA, 1062 bp, Homo Sapiens
ggaattcccgggatcggaagtagaagaagcggcgttgccatggcggcgtctctggggcaggtgttggctctggtgctggtggccgctctgtggggtggcacgcagccgctgctgaagcgggcctccgccggcctgcagcgggttcatgagccgacctgggcccagcagttgctacaggagatgaagaccctcttcttgaatactgagtacctgatgccctttctcctcaaccagtgtggatcccttctctattacctcaccttggcatcgacagatctgaccctggctgtgcccatctgtaactctctggctatcatcttcacactgattgttgggaaggcccttggagaagatattggtggaaaacgagcagttgctggcatggtgctcaccgtgataggaatttcactctgcatcacaagctcagttccatggactgcagaactccagctgcatggaaagggccagctgcagactttgagccagaaatgcaaacgggaggcctctgggactcagtcagagcgctttggctgaatgaggggtggaaccgagggaagaaggtagagagctgtgagccccagccccacctgactccagcacacctggcgagtagtagctgtcaataaatctatggtaaacagacaagaggaggtggaaggccatacagaatggagccgcagagtatggcccagcctccagctctcagccaggaggtccccaacccccaggaaggagaaactggaaaataggaactgcttcctcatttaacaagggccttctttcctgggaagaggccctgtgaaaaaaggtaccggacttccgaacggggtagctgggaaaagctatgaagaggtgcccgcttttgtgtcctgaccccctcctgctcctaggcacccccccatacactcccgggccccctttattgccttgttctaccgcccatttaaaaaacccctcccctcccccgtgatcatttcccctacaccataaatccaggcgctcccacttcactcctcgtctacctgctgctccccgtctggcggtcgcccgtctaactccaca

SEQ ID NO: 361382 - DNA, 717 bp, Homo Sapiens
agcggaagttgaagacagcggcgttgccatggcggcgtctctggggcaggtgttggctctggtgctggtggccgctctgtggggtggcacgcagccgctgctgaagcgggcctccgccggcctgcagcgggttcatgagccgacctgggcccagcagttgctacaggagatgaagaccctcttcttgaatactgagtacctgatgccctttctcctcaaccagtgtggatcccttctctattacctcaccttggcatcgacaggctggtcccagacctcagagttcaggtcttcatgctggaatcctgggaagcactgaacgtggagtcaggagatgtgggtttgagtcctgagatttgctgtgacttcatctggaagatggggttttgatacctttttttaaagatctggccctggctgtgcccatctgtaactctctggctatcatcttcacactgattgttgggaaggcccttggagaagatattggtggaaaacgagcagttgctggcatggtgctcaccgtgataggaatttcactctgcatcacaagctcagttccatggactgcagaactccagctgcatggaaagggccagctgcagactttgagccagaaatgcaaacgggaggcctctgggactcagtcagagcgctttggctgaatgaggggtggaaccgatggaagaaggtagagagctgtgagccccagcccca

SEQ ID NO: 361383 - DNA, 1853 bp, Homo Sapiens
  misc_feature (796)..(796): n is a, c, g, or t
  misc_feature (822)..(822): n is a, c, g, or t
gggtccggaattcccgggatgagcgctcgggctgtctgcggaccctgccgcgtgcaggggtcgcggccggctggagctgggagtgaggcggcggaggagccaggtgaggaggagccaggtgagcaggaccctgtgctgggcgcggagtcacgcaggctcgaggaaggcagttggtgggaagtccagcttgggtccctgagagctgtgagaaggagatgcggctgctgctggccctgttgggggtcctgctgagtgtgcctgggcctccagtcttgtccctggaggcctctgaggaagtggagcttgagccctgcctggctcccagcctggagcagcaagagcaggagctgacagtagcccttgggcagcctgtgcggctgtgctgtgggcgggctgagcgtggtggccactggtacaaggagggcagtcgcctggcacctgctggccgtgtacggggctggaggggccgcctagagattgccagcttcctacctgaggatgctggccgctacctctgcctggcacgaggctccatgatcgtcctgcagaatctcaccttgattacaggtgactccttgacctccagcaacgatgatgaggaccccaagtcccatagggacctctcgaataggcacagttacccccagcaagcaccctactggacacacccccagcgcatggagaagaaactgcatgcagtacctgcggggaacaccgtcaagttccgctgtccagctgcaggcaaccccacgcccaccatccgctgggcttaaggatggacaggccttttcatggnggagaaccgccatttggaggcattcnggctgcgccatcagcactggagtctcgtgatggagagcgtggtgccctcggaccgcggcacatacacctgcctggtagagaacgctgtgggcagcatccgttataactacctgctagacgtgctggagcggtccccgcaccggcccatcctgcaggccgggctcccggccaacaccacagccgtggtgggcagcgacgtggagctgctgtgcaaggtgtacagcgatgcccagccccacatccagtggctgaagcacatcgtcatcaacggcagcagcttcggagccgacggtttcccctatgtgcaagtcctaaagactgcagacatcaatagctcagaggtggaggtcctgtacctgcggaacgtgtcagccgaggacgcaggcgagtacacctgcctcgcaggcaattccatcggcctctcctaccagtctgcctggctcacggggctgccagaggaggacccccacatggaccgcagcagcgcccgaggccaggtatacggacatcatcctgtacgcgtcgggctccctggccttggctgtgcttccctgctgctggccaggctgtatcgaggggcaggcgctccaccggccggcacccccgcccgcccgccactgtgcagaagctctcccgcttccctctggcccgacaggtactgggcgcatcccccacctcacatgtgacaggctgactccagaagggagaaccaagtctcccactttggcagttctccctggaaacaggttcttcccgggaagtccagcttatcccctggccaccaggacgtgcgtcctctcctccatgcgggcccgcgttttggtcgccgcgcgccgcctggcccctgtatataatgcccacaagcccagcaatgccatagctacttactaccttatccgccaatacgccaagcccaagacatctgcactccccacccacaaatactcctccgttagctacacccacgcccgcttaatagtcacattgagcggacaatcgccaccaccactaccccttttacccccacttca

SEQ ID NO: 361384 - DNA, 2141 bp, Homo Sapiens
  misc_feature (25)..(25): n is a, c, g, or t
tgactggcagtaccatcggcgttanaggtagcgaggcctgggtgccgaattcggcacgagggagagggagcccagaatcggggtaaaaagacagaaggggctcaggtcaaaaaggcagaaaggagtcccaaccaaggcaaaaaaggagagggagctcccatccaggcaaaaaggcagattcggttgctaatcagggcacaaaggtagagggtattacaaaccaggggaaaaaagcagaagggtcccccagtgaaggcaaaaaggcagaagggtcccccaaccaaggcaaaaaggcagacgcagctgccaatcagggtaaaaagacagagtcagcttctgtccagggcagaaatacagatgtggcccagagcccagaggcaccaaagcaagaggctcctgccaagaagaagtctggttcaaagaaaaaaggtgagcctgggcccccagatgccgacggccctctctacctcccctacaagacgctggtctccacggttgggagcatggtgttcaacgagggcgaggcccagcggctcatcgagatcctgtctgagaaggctggcatcattcaggacacctggcacaaggccactcagaagggtgaccctgtggcgattctgaaacgccagctggaagagaaggaaaaactgctggccacagaacaggaagatgcggctgtcgccaagagcaaactgagggagctcaacaaggagatggcagcagaaaaggccaaagcagcagccggggaggccaaagtgaaaaagcagctggtggcccgggagcaggagatcacggctgtgcaggcacgcatgcaggccagctaccgggagcacgtgaaggaggtgcagcagctgcagggcaagatccggactcttcaggagcagctggagaatggccccaacacgcagctggcccgcctgcagcaggagaactccatcctgcgggatgccttgaaccaggccacgagccaggtggagagcaagcagaacgcagagctggccaagcttcggcaggagctcagcaaggtcagcaaagagctggtggagaagtcagaggctgtgcggcaagatgagcagcagcggaaagctctggaagccaaggcagctgccttcgagaagcaggtcctgcagctgcaggcgtcccacagggagagtgaggaggccctgcagaagcgcctggacgaggtcagccgggagctgtgccacacgcagagcagccacgccagcctccgggcggatgccgagaaggcccaggagcaacagcagcagatggccgagctgcacagcaagttacagtcctccgaggcggaggtgcgcagcaaatgcgaggagctgagtggcctccacgggcagctccaggaggccagggcggagaactcccagctcacagagagaatccgttccattgaggccctgctggaggcgggccaggcgcgggatgcccaggacgtccaggccagccaggcggaggctgaccagcagcagactcgcctcaaggagctggagtcccaggtgtcgggtctggagaaggaggccatcgagctcagggaggccgtcgagcagcagaaagtgaagaacaatgacctccgggagaagaactggaaggccatggaggcactggccacggcgagcaggcctgcaaggagaagctgcactccctgacccaggccaaggaggaatcggagaagcagctctgtctgattgaggcgcagaccatggaggccctgctggctctgctcccagaactctctgtcttggcacaacagaattacaccgagtggctgcaggatctcaaagagaaaggccccacgctgctgaagcacccgccagctcccgcggagccctcctcggacctggcctccaagttgagggaggccgaggagacgcagagcacactgcaggccgagtgtgaccagtaccgcagcatcctggcggagacggagggcatgctcagagacctgcagaagagcgtggaggaggaggagcaggtgtggagggccaaggtgggcgccgcagaggaggagctccagaagtcccgggtcacagtgaagcatctcgaagagattgtagagaagctaaaaggagaacttgaaagttcggaccaggtgagggagcacacgttgcatttggaggcagagctgg

SEQ ID NO: 361385 - DNA, 1146 bp, Homo Sapiens
  misc_feature (959)..(959): n is a, c, g, or t
tataatcctattccttataataaaaacctaactccccttgctggtaccggtccggaattcccgggatgccgagggggcccagaaccagggcaagaaggccgagggggcccagaaccagggcaagaaggccgagggtgctcagaaccagggcaaaaaagtagaaggggcccagaaccagggcaagaaggctgagggggcccagaaccagggcaagaaggccgagggggctcagaaccagggcaaaaaggccgagggagcccagaaccagggccaaaaaggagagggagcccagaatcagggtaaaaagacagaaggggctcagggcaaaaaggcagaaaggagtcccaaccaaggcaaaaaaggagagggagctcccatccagggcaaaaaggcagattcggttgctaatcagggcacaaaggtagagggtattacaaaccaggggaaaaaagcagaagggtcccccagtgaaggcaaaaaggcagaagggtcccccaaccaaggcaaaaaggcagacgcagctgccaatcagggtaaaaagacagagtcagcttctgtccagggcagaaatacagatgtggcccagagcccagaggcaccaaagcaagaggctcctgccaagaagaagtctggttcaaagaaaaaaggtgagcctgggcccccagatgccgacggccctctctacctcccctacaagacgctggtctccacggttgggagcatggtgttcaacgagggcgaggcccagcggctcatcgagatcctgtctgagaaggctggcatcattcaggacacctggcacaaggccactcagaagggtgaccctgtggcgattctgaaacgccagctggaaagagaaggaaaaactgctggccacagaacagaaagatgcggctgtcgccaagagcaaactgaggggagctcaacaaggagatggcagcagaaaaggccaaagcagncagccggggaggccaaagtgaaaaaacagccggtgggcccgggagcagggaaatcacggctgtgcaggcacgcatgcaagccagctacgggaaaaacacgggaaggaggggaacacctgcagggcaagaatccgaactcttcagggaccacttggaaaaaggccccaaaacccaactgggcccccct

SEQ ID NO: 361386 - DNA, 1636 bp, Homo Sapiens
ttttaggtacattggggctgacagtgacctactgttgccggggagaggaagaaaatatgatgatgagaattgcccagaaatgtaatatcaaccttctccttttaccagatcccattccttctggtctgatggaagaatgtgtggattgggatgtggaagttaaagctgctgtgcatacatatggtatagcaagtgtacctaaccaacccttaaaaaagcaaattcagaaaatagagagaacccttcaaattcagaaagctcatggtgaccacatggcttcctctagaaataattctgtatctggactatcagtcaaatcaaaaaataataccaaacaaaagcttcctgtgaaaagccactcagaatgtggaatcatagaaaaagcaacgtcaccaaaagaactgggctgtgacaggcaatccgaagagcaaatgaagaattctgttcagactcccgttgaaaactccaccaacagtcagcaccaggtcaaagaagctttacctgtgtcactcccccagattccttgtctgtcttcctttaaaatccatcagccatacacgttgacttttgctgaattggtagaggattatgaacattatattaaagaggggttagagaaacctgtggaaatcatcaggcactacacaggccctggggatcagactgtgaatcctcaaaatggttttgtgagaaataaagttactgaacagagagtccctgtattggcaagtagtagccaatctggagactctgagagtgacagtgattcttacagctcaagaacctcttcccagagcaaaggaaataagtcatacttggaaggctcttctgataatcagctgaaagactctgaatctacgcctgtggatgatcgtatttctttggaacaaccaccaaatggaagtgacacccccaatccagagaaatatcaagaatcacctggaatccagatgaagacaagacttaaagagggggctagccagagagctaagcagagccggagaaacctacccaggcggtcttccttcagattgcagactgaagcccaggaagatgattggtatgactgtcatagggaaatacgtctgagtttttctgatacctatcaggattatgaggagtactggagagcttactacagggcatggcaagaatattatgctgccgcttctcattcatattattggaatgctcagagacatccaagttggatggcagcttatcacatgaataccatttatctacaagaaatgatgcatagtaaccagtgattataggatatacctgagaccatcaggaactgtcaacaaatgatacctttggatatccatcctcctcgacttatagtacagtggtgtatagtggcatttctgataaacttgaaaagacttgagtctttccactgggacacatccatttttcagattgttttgatttaggccaggtatattatcttcatttttaagagtttctttaagaaacttcatcagattgttgaaagataatttttgggacatagagctgaaagtttcagggtgccattttctataagatcttcccaaaagaaacatttaaaaagatgacatataccaccacttacttaaaaacaataaaagcaatagatttgattagtaaa

SEQ ID NO: 361387 - DNA, 902 bp, Homo Sapiens
  misc_feature (749)..(749): n is a, c, g, or t
gatttccttctcctggaggcagatgttgcctctctctctcgctcggattggttcagtgcactctagaaacactgctgtggtggagaaactggaccccaggtctggagcgaattccagcctgcagggctgataagcgaggcattagtgagattgagagagactttaccccgccgtggtggttggagggcgcgcagtatagcagcagcacaggcgcgggtcccgggaggccggctctgctcgcgccgagatgtggaatctccttcacgaaaccgactcggctgtggccaccgcgcgccgcccgcgctggctgtgcgctggggcgctggtgctggcgggtggcttctttctcctcggcttcctcttcgggtggtttataaaatcctccaaagaagctactaacattactccaaagcataatatgaaagcattcttggatgaattgaaagctgagaacatcaagaagttcttatataattttacacagataccacatttagcaggaacagaacaaaactttcagcttgcaaagcaaattcaatcccagtggaaagaatttggcctggattctgttgagctagcacattatgatgtcctgttgtcctacccaaataagactcatcccaactacatctcaataattaatgaagatggaaatgagatttttcacacatcattatttgaaccacctcctccaggatatgaaaatgtttcggatattgtaccaccttttcagtgctttctctcctcangggaatgccagagggcgatctagtggtatgttaactatgcacgaaactggaagacttcttttaaattggaaacgggacatgaaaaatccaatggcctctggggaaaattgtaatttgccagaattatggggaaagtttttccagaaggaaaaa

SEQ ID NO: 361388 - DNA, 1004 bp, Homo Sapiens
  misc_feature (78)..(78): n is a, c, g, or t
  misc_feature (211)..(211): n is a, c, g, or t
ttcttgcgatacagacctgctgtggtggagtaactggaccccaggtctccgagcgaattccagcctgcagggctaatnaagcgacggcattagtgagattgagagagactttaccccgccgtggtggttggagggcgcgcagtagagcagcagcacaggcgcgggtcccgggacgccggctctgctcgcgccgagatgtggaatctccttncacgaaaccgactcggctgtggccaccgcgcgccgcccgcgctggctgtgcgctggggcgctggtgctggcgggtggcttctttctcctcggcttcctcttcgtgaaagtaggcaagagaaattaaaattcagaaatatctcacctaatgtcagagggtggtttataaaatcctccaatgaagctactaacattactccaaagcataatatgaaagcatttttggatgaattgaaagctgagaacatcaagaagttcttatataattttacacagataccacatttagcaggaacagaacaaaactttcagcttgcaaagcaaattcaatcccagtggaaagaatttggcctggattctgttgagctagcacattatgatgccctgttggcctacccaaataagactcatccccactacatctccataattaatgaagatggaaatgagattttccacacatcattatttggacccccccctcccggaatatgaaaatggttccggatattgtaccaccctttcagggcgttctctcccccaaggaatggccaaaggggcgatctaagggaagggtaactatgggcccaaactgaaaaactttctttaaaatgggaaccgggaacctgaaaaatcatttgcgtccggggaaaaattggaatttgcccaaaatgggggaaaggtttccccagggaaataaaggggtaaaaaagggcccaacttgggccagggggcccaaaggggaaccatttctcttcactcccggacgctgggtagaataactttgcgccccg

SEQ ID NO: 361389 - DNA, 1636 bp, Homo Sapiens
  misc_feature (1517)..(1525): n is a, c, g, or t
  misc_feature (1596)..(1596): n is a, c, g, or t
ctgtggctccccgtcctggtgcgggacctgtgccccgcgcttcagccctccccgcacagcctattgattcccctgccgcccttgctcacctcctgctcgccatggagtcgctggttttcgcgcggcgctccggccccactccctcggccgcagagctagcccggccgctggcggaagggctgatcaagtcgcccaagcccctaatgaagaagcaggcggtgaagcggcaccaccacaagcacaacctgcggcaccgctacgagttcctggagaccctgggcaaaggcacctacgggaaggtgaagaaggcgcgggagagctcggggcgcctggtggccatcaagtcaatccggaaggacaaaatcaaagatgagcaagatctgatgcacatacggagggagattgagatcatgtcatcactcaaccaccctcacatcatctgccatccatgaagtgtttgagaacagcagcaagatcgtgatcgtcatggagtatgccagccggggcgacctttatgactacatcagcgagcggcagcagctcagtgagcgcgaagctaggcatttcttccggcagatcgtctctgccgtgcactattgccatcagaacagagttgtccaccgagatctcaagctggagaacatcctcttggatgccaatgggaatatcaagattgctgacttcggcctctccaacctctaccatcaaggcaagttcctgcagacattctgtgggagccccctctatgcctcgccagagattgtcaatgggaagccctacacaggcccagaggtggacagctggtccctgggtgttctcctctacatcctggtgcatggcaccatgccctttgatgggcatgaccataagatcctagtgaaacagatcagcaacggggcctaccgggagccacctaaacccctgatgcctgtggcctgatccggtggctgttgatggtgaaccccacccgccgggccaccctggaggatgtggccagtcactggtgggtcaactggggctacgccacccgagtgggagagcaggaggctccgcatgagggtgggcaccctggacagtgactctgcccgcgcctccatggctgactgggctccggccgttcctcccgccccctccctggagaaatggggccaagggtgtgccagctttcttcaagcagcatgcaccctgggtgggggggaagcacccaccccctgggcctgggaagcgccaaccttttcgctccagaaagttcccgcaaaggagaaatggacattgggccccattctccctccaacaggggacaccgggttgaatgaaccctggcccaatcgcccccgggccaagaaacaaacctccaaggcttgcgccaaaggggcaatttccttcaaaaaaagaagaggtgggtcagcccctcctggccgaaacggggggttaaccggggagggacccccctccgggggagccttccaaccccaaattcccttgtggaagagccccacgagtggaagaggttgtgnnnnnnnnntttgttgctccccacaaaggaaggggggcagtttctttacagacaaaaacccccccctaaaaaccacgccngccaagagtcctcgtgtcatcacacccaactccccctcca

SEQ ID NO: 361390 - DNA, 1077 bp, Homo Sapiens
  misc_feature (246)..(246): n is a, c, g, or t
gtatataccgcggagggtattaaagtggaaaaaaaatgggggcccagggaaataaaggccgggggatttgtccatcccatgaagcttgggggcttattggataatttaggaggagagggagatttttaagttattctggaacaagtaccttggatataagttgaggaatgctggactggaggtccaaaagaccttaggtctagggtcttggaatctgtcagcatttagctgtatggtccaagtcanccctttttgaggctccagtttttccatctgacaggtgggaaaaacatctctctttcctaccaaaaataagttgtggatatcaaatgagacagtgtgcttaaaacttccttgtgaatgataaaattttatgtaaacataagctgtttgatggattagaaatggatatgaagaagaaaaatatggtttaaaattgttagtaaaatttcattaaaatttggacacgtaaacttaacatagttggctttctccttatagggccctatgttaattttttttctaactcactaggttgctgaccctgagtaatcatgtctgtctcttcattttataatgctctaaccttcagcttctaggagcctgtaaagatggtttttgctgtcacaaagccaggtcctaaaaggcagatttgaatctcacttgaaaaaatgcagtttcacacattaaaggcaaggagaatttttggctattggtataaaacaaagatcactgcccaaagtgaaagaaatattaaagaaaagcttccatggcagtgacttcctgtggaaaacttgatccgaccttcaactgctggataaattactttcattttggagatatatgtagaaaccacgttgatatcttggtcaccagagtcatatcttaataattcatcttttatcatctggaacccatctccaccattggccaggaagtttgggaggatcaccttatatacctcgtccattttgagagggtcataactgggcactcgacacttggtgcaaagaacatctaatttgactactctgtctccaggttttcgggaaagatcatacaccacatggattccgc

SEQ ID NO: 361391 - DNA, 927 bp, Homo Sapiens
atatcccacctacacctggccacccgaccccaccaaaggccacatgggtgttgccaagagaggatggtatccctgtgtttatacccattaaacttgctattataacaggagctataaagtgaaaaaatagagacaagaaataaagcagagatttgtcatcccatgagcttggggctattgataattatgaagagaggagatattaagtattctgaacagtaacttgatatagttgagaatgctggacttgagttcaaaagacctaggtctaggtcttggatctgtcagcattagctgtatggtcaagtcaaccctttttgagcttcagttttttcatctgacaggtgggaaaaacatctctctttcctaccaaaaataagttgtggatatcaaatgagacagtgatgctttgaaaactttccttcgctgaattgtatacaaagtattatatggtaaacaataagctaggttatgatggagttagaaagtggagtatgaagaaggaagaaatatggtttaaaattgttagtaaaatgtgcatctaaaatttggacaacaggtaaaagtaacatagttggctgtgctccattgatagggccatatggtgaatttgtgttttactaactcagctacggttcgctcgaccgctgagtgaatcatggtctggtgcatgcgatcgatgtttatgaactgcgtctcaaccttcgaggcgttcctaggtagctcgtagtagaatgatcggttttctgcgtgtcacaaagcgcaggtcctacaaaggcagatcttgaatctcacgttagagaaaatcgcagtttcacacattagaaggcaaggagatatgttttggctatgtggtataaaacaaagatcgagctgcgccacaagtgtaagaaatattaaaggaaagcttccatggcagtgacttcc

SEQ ID NO: 361392 - DNA, 1061 bp, Homo Sapiens
  misc_feature (917)..(918): n is a, c, g, or t
  misc_feature (931)..(931): n is a, c, g, or t
  misc_feature (947)..(947): n is a, c, g, or t
  misc_feature (1008)..(1008): n is a, c, g, or t
gctgggtggcgaattcggacgaggtgggtggcggttgactgtagagccgctctctctcactggtacagcgaggttttgctcagcccttgtctcgggaccgcaggtacgtgcctggcgacttcttcgggtggtccccgtccgccctcctcgtccctacccagtttcttgcttccctgccccatctccgccgctccccgcagcctccgccgagcgccatggctcctaggaagggcagtagtcgggtggccaagaccaactccttacggaggcggaagctcgcctcctttctgaaagacttcgaccgtgaagtggaaatacgaatcaagcaaattgagtcagacaggcagaacctcctcaaggaggtggataacctctacaacatcgagatcctgcggctccccaaggctctgcgcgagatgaactggcttgactacttcgcccttggaggaaacaaacaggccctggaagaggcggcaacagctgacctggatatcaccgaaataaacaaactaacagcagaagctattcagacacccctgaaatctgccaaaacacgaaaggtaatacaggtagatgaaatgatagtggaagaggaagaagaagaagaaaatgaacgtaagaatcttcaaactgcaagagtcaaaaggtgtcctccatccaagaagagaactcagtccatacaagggaaaaggaaaagggaaaaggtcaagccgtgctaacactgttaccccagccgtgggccgattgggaggtgtccatggtcaaaccaactccaggcctgacacccaagttttgactcaagggtcttcaagacccctggcctgcgtactccagcagcaggagagcggaatttacaacatctcagggaatggcaggccctcttgctgacagcaaagagatcttcctcactgtgccanntgggcggcgaaanagcctgcgattatggnccagtgacttgcagaggcacagtattgcccagctggatcccagaggccttgggaaacattnagaaggtcctccaaccgtctcgcccaaatctgcagcagcatacggacccacaa

SEQ ID NO: 361393 - DNA, 1269 bp, Homo Sapiens
ggaattccctgcatgtggagtttgaattgggtggcggttgactgtagagccgctctctctcactggcacagcgaggttttgctcagcccttgtctcgggaccgcagcctccgccgagcgccatggctcctaggaagggcagtagtcgggtggccaagaccaactccttacggaggcggaagctcgcctcctttctgaaagacttcgaccgtgaagtggaaatacgaatcaagcaaattgagtcagacaggcagaacctcctcaaggaggtggataacctctacaacatcgagatcctgcggctccccaaggctctgcgcgagatgaactggcttgactacttcgcccttggaggaaacaaacaggccctggaagaggcggcaacagctgacctggatatcaccgaaataaacaaactaacagcagaagctattcagacacccctgaaatctgccaaaacacgaaaggtaatacaggtagatgaaatgatagtggaagaggaagaagaagaagaaaatgaacgtaagaatcttcaaactgcaagagtcaaaaggtgtcctccatccaagaagagaactcagtccatacaaggaaaaggaaaagggaaaaggtcaagccgtgctaacactgttaccccagccgtgggccgattggaggtgtccatggtcaaaccaactccaggcctgacacccagggttgactcaaggggcttcaagagcccctggcctgcgtactccaagcagcaggaaagcggatttacaacatctcagggaatggaagccctcttgctgaaaggcaaagagatcttcctcaactgtgcccagtgggccggcggagaagagcctgcgaattattgggcagtgacttgcagagggcaccgttggcccagtggaatcccagaggcctagggaacacattaagaaagctcatccaacgggtcgcccaatttgagacgcatacggacccacaatgggagacaccaggtggacgggaagtgaccgtagataggggacgatcacggcgcccctgaaaaaattgcacataggacaatggatgtgggtataggacaagaagcggggaacagttacactagggagaacacgaaacaaaaggagagcagcaacgatgatacgaagagctacacaactaaagaggaaacgtagtgagaacacaagtaacacaaacaaaacaagctacgtagacggagacatcaaaataacagacagagagagaatagacccacactctcttcgtccgccgcgcctcccag

SEQ ID NO: 361394 - DNA, 472 bp, Homo Sapiens
cagaacccagagctgagcaacgatctttgcagtctgggcctctaacctgggagagaaaactgggttctgagtcccgcagaagtgtggagatcaggacccacgcactgaaaggactctgagggtgaagcgtggctgagggcccagggaaaagaaatgcttgactaagcagcacactgtggcctggcttcccttggaaatacttcacctctccgccgcccactggcacagtgaggaagatctctttcctgtcagcaagagggctgccattccctgagatgttgtaaatccgctctcctgctgctggagtacgcaggccaggggtcttgaagaccctagaaggggaaaatctctgtgaagatagcttggcaattggatgacaccaaactctataggccattttaaccttactctggcctcaagttgcaggtttttaagtcatacattcctaaaaaagcatcgttctaaatttaag

SEQ ID NO: 361395 - DNA, 1115 bp, Homo Sapiens; identical to SEQ ID NO: 261744

SEQ ID NO: 361396 - DNA, 1146 bp, Homo Sapiens; identical to SEQ ID NO: 261745

SEQ ID NO: 361397 - DNA, 1410 bp, Homo Sapiens
  misc_feature (97)..(97): n is a, c, g, or t
  misc_feature (1325)..(1361): n is a, c, g, or t
ccattcctgggcgtcaaagtagagcccatggtgaggtagtatccccgccgccgggaaggcatagaagtaatcagagatgagcagatctgcccaccgntgaagtcagtgtgatgcataaaagaaaatagagttgcacttcctgcataaatccagaggtgccacaggacaggaaagagcagggaccagacgatgatgatgcagtgagggacaaagatgtttctcaggaatctgtagagatggttccacacggggaagaaggccatgtagagcgccacgtcccccactgtcgggtaggacttaaagatggcgatgacagcgatctggataaacatgaagaagatggggtgctcctttagctttatggctaaggggatggtgtagaagaagacgttgatctgaaacacacatacaaagaagaggctgaagtgctcaaacatctctgcaaagaagtaccagaaaagaccaatgtttggagtgagatctggaacagaaagtataaagccatagactgcggggatgaaatcccaagagctgagaaggaagaaggagaggcaaatgattaccactaggcttcccacatacatcatggcatactcccaagaaaagatccagaaggctttgctcttcattttcacaggtatgtactgccgctggaggagatagaggagtcctgggacaaacaaggtgagtgggtacagagactggtatgtcgctaaggcaagaaaaatagcactgaggaaagcactgccttttatcgtagtcaaaatgaagaaagcaatgagggtgttgttgatggcacaggtagacttggcaacacaagacaaaatcgtgtaaggatttaagagatagaacagggccactttcaaagggatgtaacgcatttccataggggtccggatgagttcggccacatctggggcatactggtccagttctaggaggagtttctgctttttaaacacaactttattgaagtcctggattgcaaaatacagggcaatagcagtgagtgcatcagttatcataaacaccaattcagcatagtcaattaggaaatgaaagaggtatattattaatggagtttcatgaaatactgctccagaatacggagatactcccaagtccaacagtgaaaggccttcaaccactctcttccaagagctcagtggggacaccacctccacccgctcggaaatgaactcggccagactggagcggaacaaggccgcccgcactgtcacagccaccaccagcaccaggaccaagggagccgccatgataaccccgctctcgacgaattcgagctcggccgatttggcctgatnnnnnnnnnnnnnnnnnnnnnnnnnnnnnnnnnnnnncgccgccccgcgtgaagctccaggttccgcctatagtgattatacatcc

SEQ ID NO: 361398 - DNA, 1950 bp, Homo Sapiens
cggtccggaattcccgggatcgagaaggtcggaggcagaagccgggaaggagacttctgaatgaacagtgaatctattactgaggaaaaccagaggaagcctgtgtagataggtatcaattagataccagctactggaagagctttctcagagactgattaaaaaattctccactagatatggctgcaaattgcacatcctcatggagtctaggagaatcctgcaacagacctgggttggagctgccacggtctatggcatcctcagaaactcaacttggaaatcacgacgtggaccctgagatttctcacgtgaacttcaggatgttcagctgcccgaaggagtcggaccccatccaggctctgaggaaactcactgagctgtgccatctgtggctgaggcccgacctccacaccaaagagcagatcctggacatgctggtgatggagcagttcatgatctccatgccccaggagctccaggtcttagtcatgatgaacggtgtgcagagctgcaaagacctggaggacctgctacgaaataacagaagacccaagaaatggtctgtggtcaccttccacggaaaggaatatattgtgcaggactcagatatcgagatggctgaagccccctccagtgtcagagatgatctgaaagacgtgtccagccaacgggcctcctcggtgaaccagatgcgtccaggggaaggccaggcccaccgagagctgcagatcctgcccagggtccctgcattgtccaggaggcagggagaggactttctgctacacaagagtattgacgtaacaggtgacccaaagtctctgagacccaagcagaccttggagaaggatctgaaggaaaacagggaagagaacccaggactgacatccccagagcctcaagcttccaaagagtcccaacagatctggtgagagcaaaggaggggaaggaccccccaaaaaatagcctctgtggaaaatgtggatgctgacacaccttctgcctgcgttgtggagagagaagcttcgactcacagcgggaacagaggagacgctctgaatctgagcagtcccaaaagaagcaaaccagatgcctcctccatttcccaagaagagcctcaaggagaagccacacctgtgggccaaacagagaatccccgggacaagctgggatgaattcaagtcatgtccccaggccctgcgagcccagtcagtcacccggatggccaagaagccaaggcactgccgccctttgcatgtgacgtgtgcgagaagaggcttacgtgtaattccaagctagtcatccacaagagatcacacacaggcgagagactctttcaatgtaatctctgtgggaagcgcttcatgcagcttattagcctccaatttcaccagcgaacccacactggcgagaggccctacacgtgtgacgtctgccagaagcagttcacccagaagtcctacttgaagtgtcacaagagaagccacacaggggagaagcccttcgaatgtaaagactgcaagaaagttttcacctacagggggagcctgaaggagcaccagcgcatccactccggagagaaaccctacaaatgttccaagtgtcccaagagccttcagtcggctgaaattgttaagacgccaccagaaaacacatccagaagctacttctcagtgattgcataatccggtctatgccttcctgcaccaagaagaagtgaatgatatttttcatcaatgttatcagatgacatttgacacatgcaagggcgtctgacacacagagggagtgccctagatatgaattgccaggatgtttgagtaaatatgtgtcctccccactgagctttgttttctgtttcattatgtccattgttttcttataggtttattttggtttgtgttgctgttcttccaataaacgatcatcttattagttttcaatattgta

SEQ ID NO: 361399 - DNA, 1282 bp, Homo Sapiens; identical to SEQ ID NO: 262429
  misc_feature (788)..(984): n is a, c, g, or t

SEQ ID NO: 361400 - DNA, 521 bp, Homo Sapiens
  misc_feature (233)..(233): n is a, c, g, or t
tttggaagactatcagaggatgcttggttaccaagtaaaggattccaaagtggagcagcaagacaactttctaaaacgcatgtcagggatgatccgtctctacgctgctatcatccagctccggtggccatatggaaaccgacaggagattcaccctcatggcttaaatcatggatggcgctggttggcacagatcttaaacatgggagccccttgtccagatgtgacagccnaccctccctctttgacctcccctggaggtgtgtgggaatgcccctcatgaagcaataccaggttcagttctggaagatgctaattctcatcaaagaggactactttcccaggtatcaggcttgttgagcagacagcaggggattaagtaactcataaccaggcctcagatacccaagggtgctattacctgctggttttgattcaagttaaaaacacctgtactaagtatgacatctttcctactccagtccctctcgttgatatttgaataaatgcttttgaacctt

SEQ ID NO: 361401 - DNA, 2075 bp, Homo Sapiens
  misc_feature (50)..(86): n is a, c, g, or t
  misc_feature (1708)..(1782): n is a, c, g, or t
ggatgatacgactcatatagggcgactggagctcaccgcggtggcggcgnnnnnnnnnnnnnnnnnnnnnnnnnnnnnnnnnnnnnatcaggccaaatcggccgagctcgaattcgtcgagagcgggtttccggaacctccgggtgtcatccgcggggaaagaacttggtcctgatgtctgaccatggagatgtgagcctcccgcccgaagaccgggtgagggctctctcccagctgggtagtgcggtagaggtgaatgaagacattccaccccgtcggtacttccgctctggagttgagattatccgaatggcatccatttactctgaggaaggcaacattgaacatgccttcatcctctataacaagtatatcacgctctttattgagaaactaccaaaacatcgagattacaaatctgctgtcattcctgaaaagaaagacacagtaaagaaattaaaggagattgcatttcccaaagcagaagagctgaaggcagagctgttaaaacgatataccaaagaatatacagaatataatgaagaaaagaagaaggaagcagaggaattggcccggaacatggccatccagcaagagctggaaaaggaaaaacagagggtagcacaacagaagcagcagcaattggaacaggaacagttccatgccttcgaggagatgatccggaaccaggagctagaaaaagagcgactgaaaattgtacaggagtttgggaaggtagaccctggcctaggtggcccgctagtgcctgacttggagaagccctccttagatgtgttccccaccttaacagtctcatccatacagccttcagactgtcacacaactgtaaggccagctaagccacctgtggtggacaggtccttgaaacctggagcactgagcaactcagaaagtattcccacaatcgatggattgcgccatgtggtggtgcctgggcggctgtgcccacagtttctccagttagccagtgccaacactgcccggggagtggagacatgtggaattctctgtggaaaactgatgaggaatgaatttaccattacccatgttctcatccccaagcaaagtgctggttctgattactgcaacacagagaacgaagaagaacttttcctcatacaggatcagcagggcctcatcacactgggctggattcatactcaccccacacagaccgcgtttctctccagtgtcgacctacacactcactgctcttaccagatgatgttgccagagtcagtagccattgtttgctcccccaagttccaggaaactggattctttaaactaactgaccatggactagaggagatttcttcctgtcgccagaaaggatttcatccacacagcaaggatccacctctgttctgtagctgcagccacgtgactgttgtggacagagcagtgaccatcacagaccttcgatgagcgtttgagtccaacaccttccaagaacaacaaaaccatatcagtgtactgtagccccttaatttaagctttctagaaagctttggaagtttttgtagatagtagaaaggggggcatcaccctgagaaagagctgattttgtatttcaggtttgaaaagaaataactgaacatattttttaggcaagtcagaaagagaacatggtcacccaaaagcaactgtaactcagaaattaagttactcagaaattaagtagctnnnnnnnnnnnnnnnnnnnnnnnnnnnnnnnnnnnnnnnnnnnnnnnnnnnnnnnnnnnnnnnnnnnnnnnnnnnttcctctcagctatccttctaatttctctctaatttcaatttgtttatatttacctctgggctcaataagggcatctgtgcagaaatttggaagccatttagaaaatcttttggattttcctgtggtttatggcaatatgaatggagcttattactggggtgagggacagcttactccatttgaccagattgtttggctaacacatcccgaagaatgattttgtcaggaattattgttatttaataaatatttcaggatatttttcctctacaataaagtaacaattaactta

SEQ ID NO: 361402 - DNA, 475 bp, Homo Sapiens
  misc_feature (36)..(36): n is a, c, g, or t
tttggtaaaaccgttttaaacagctctgccttcaanctcttcctgctttgggaaaatgcaaatctccctttaaatttcctttactgtgtctttcttttccaggaatgaacagcagatttgtaatctcgatgttttggtagtttctcaataaagagcgtgatatacttgttatagaggatgaaggcatgttcaatgttgccttcctcagagtaaatggatgccattcggataatctcaactccagagcggaagtaccgacggggtggaatgtcttcattcacctctaccgcactacccagctgggagagagccctcacccggtcttcgggcgggaggctcacatctccatggtcagacatcaggaccaagttctcttgggagaggttcttgtgggttaagaaaggaaccacctcccaaggccaggaagcggcgccggttaccacctggttgagcaattccaaaaaggggatgcagc

SEQ ID NO: 361403 - DNA, 438 bp, Homo Sapiens
  misc_feature (20)..(20): n is a, c, g, or t
  misc_feature (31)..(31): n is a, c, g, or t
gttaacctcgggaaattgangtttacctccngaaaattaaaggagcctccagaaattaaggaaaggaatgggaataaatggaacccccccataataccccttccctcctggattccacccaattgttaaacatttttttccctcctcagctatcccttcctaatttcctctcctaatttcaatttgtttatatttaccctctgggctcaataagggcatctgtgcagaaatttggaagcccatttagaaaatcttttggattttcctgtggtttatggcaatatgaatggagcttattactggggtgagggacagcttactccatttgaccagattgtttggctaacacatcccgaagaatgattttgtcaggaattattgttatttaataaatatttcaggatatttttcctctacaataaagtaacaattaactta

SEQ ID NO: 361404 - DNA, 1659 bp, Homo Sapiens
aaggtggaaaggggccttctactggggaggccagggctggatggtctgggcataactgcagctctgaagaacagcatgaaaagctggcagaatacactcacacttgacacctcttgcccaacagcggtactctactcccgtcaacgtggtcacagtgtggcaattgcaagatgactgagcagagcctaggaggcagccttctcaagtgggttcaagccactgctccccattgcccaccccccatcaaaggtgacaccctcctacagccaactgagctgctcctcctcgtagcgctgggggtcgatgaacggccggtcgatagagcggatcatcagctccccacagtacacacactcagcggccaccaactcatccaggtcagccttgagctgttcccggctgggccctgccgtggcagccccaccctcggcctccttggcccgggcagagcccttggctgggggtggagcaagcccccagcttcctctgcagctcctccagccgggcctgcttgtaggctggcaggccaggtcgcacagcctgcagcaggcaagtcagcatggaacatatggccacagaggaagaggtaaaaagggcggttgagcagggggaagtcgcaggtggcacatttgtcctggggctccacagtgccgtagcggccccgcagctcctgcaggtctcgccggatgcgctgggcactggctgtagcctcttccatctcccgctgcagctcctggatgtggtggttgtaggccttaagtgagctgcagatcgcctccttgaagtggtcgatggtgacgaaatcaggaaagaagggcagcacatcctcaatcttgagcaaggggcagctagccaggcaagccatggctgtctgtacatcttcctcttcctgcaccacgtgccgtgcgatcttcagccacagcttcttgcgcaattcctcatcctcctcaggcaggtctgcacactgcttggccaggtccacatccacctgcagggccaggtccacggcctcctcatacagctctaggaccttgtagacatggacacaagcgcggtggtggccatgctcggcgcagagccgcagcgcatacttgaggtcgtaatgcacccggtgggggctggccccagcctgctccagataggccagtagtgagtccggccggccacgggcatacagtgacagcaggtagttgtggatggcctgctcagtctcccccagcacgttcacgcagaactccatgtagcggatggcctggctcacctgctggacctcaccaccctggctgtagttcaccagggcaggaatgagctgacgagcatccagccggctgcccatctcaatccaggcatctacaagctggcgggggatgtgacggatgaggatgggtgagaacttgtagaagagctgggggtcacggtggcgggcgagcacggccagggcctcctcgtaggcctcgtgctgacagtggtaagccaccacccgctcatagtcctgcatgatcactgcaaagtacaccatgtgttctgtgtccccatgactggcgagcagctcatggatagaggcccggctggcaaagagccactctttgtggcgggggctgctgaggaaggttcgaaagcattccttggtttctcggtagagagtcagggcctctgggt

SEQ ID NO: 361405 - DNA, 838 bp, Homo Sapiens
  misc_feature (700)..(700): n is a, c, g, or t
ggatattcgtcgacccacgcgtcggccggaagtgccaccgagaagcgccggcctcggggctgtctacagcggcccgggagaggctgtggtggccccgagcgcgagtgtgtaggtgacaggacagcggccaggcccgcccctcccctcgtgatggtcattgtcctccagagcagtgatggaggaaataccagcccaggaagcagcagggtcaccaagggtccagtttcagtctttggagacccagtctgagtgtctgtccccagagcctcagtttgtgcaggacaccgacatggaacagggactcactggggctccacctgttcctcaggtgcctgctcttccccgtgagggaagcccaggagaccaggcagctgcgctcttgacagccaggtaccaggagtttgtgacattcgaggatgtggctgtgcaccttactcgagaggaatggggatacctggaccctgttcagagggacctctacagagaagtgatgttagagaattatgggaacgtggtctcactgggcatacttctccgcctctccaccacccggattcatagtgtgaattcctgcccggccctgagtcatacccaggcaagtgctttctctggagaaaacacttgccgtccttacagcaggaatctccaagagatggcccaagtatcggcttccccatcgatattgctcggtcctgctcgngaaactcctttttccacgattgtgaggatattaaaaattgacttgatggaataaaaaccttcccagggatgcccaccactgtgttaaaaatcgccagcttcctcaaaattacctccctggtttaaatttccaaaaggg

SEQ ID NO: 361406 - DNA, 1159 bp, Homo Sapiens
tttaactgttggaaactctgtaattattagataaaattaacagtactttacaattatatgtatgtcactttacagtttacaaagttattaagtagatattcaatttgatgccctgaaataaatttaacttctttgccctcccttctcccctccatcaaggacagagtaaggaacacttaatcaggaaaggcaatataattgcatcaatctgtacagaaccacaaagaataaagggtaggaaggtaggaccttgaagagggccacagggacttcaaggaaggaggaaaccagaatgttaaacatgagggaagcccagggttcacaggagagttaggcaccatacggggcaggttgtgttcgccacataaaaggaggggcacacagcataagtttcacattctaaaataatatgaaaagaccataactgaagagctgaatttggaatttctggtttttcacaatacaagtagatgatgaccaccaaccatggtttctgaatgaactgggttcaaaacatatctggttgcaacagagggcttccttggaccctaacatttgaaattaaacagaggtaatttgaggagctgcgattttacacagtggtggcatcctggggagcttctattccatcagtcaattttaatatctcacaatcgtggaaaaggagtttccgagcagggacgagcaatatcgatgggaagccgatacttgggccatctcttggagattcctgctgtaaggacggcaagtgtttctccagagaaagcacttgcctgggtatgactcagggccgggcaggaattcacactatgaatccgggtggtgggaaggcggagaagtatgcccccagtgagtccctgttccatgtcggtgtcctgcacaaactgaggctctggggacagacactcagactgggtctccaaagactgaaactggacccttggtgaccctgctgcttcctgggctggtatttcctccatcactgctctggaggacaatgaccatcacgaggggaggggcgggcctggccgctgtcctgtcacctacacactcgcgctcggggccaccacagcctctcccgggccgctgtagacagccccgaggccggcgcttctcggagacacttccggcgacggagtcatcggaggaattccggacc

SEQ ID NO: 361407 - DNA, 1774 bp, Homo Sapiens
  misc_feature (1761)..(1761): n is a, c, g, or t
acctgggcagcgacgtggcgcgggccctgctggagttcgcccagggccgcccgctcggcccgcacggcctggattggctcaagatccacctggtcaatctcacggggttgaagaagcgggagccgctgcggaagcgcctggcctttgcggaggaggtgatggatgacatcctggactccgcggaccaacccttgacgggccgaaagtggtggatgggcgcggaggaaccctggcagacgctggcctgctgtatggaggtggcgaacgctgtgcgcgcctccgaccctgccgcctatgtctcccacctccccgtccatcaggacggctcttgcaacggcctgcagcattatgctgctctgggccgcgacagcgtgggcgccgcctccgtcaacctggagccctcggatgtgccgcaggacgtgtacagcggcgtggccgcgcaggtggaggtgttccgtaggcaggacgcccagcggggcatgcgggtggcacaggtgctggaaggtttcatcacccgcaaggtggtgaagcagacggtgatgacggtggtgtacggggtcacgcgctatggcgggcgcctgcagattgagaagcgcctccgggagctgagcgactttccccaggagttcgtgtgggaggcctctcactatctcgtacgccaggtcttcaagagtctacaggagatgttctcggggacccgggccatccagcactggctgaccgagagtgcccgcctcatctcccacatgggctctgtgggtggagtgggtcacacccctgggcgtccccgtcatccagccgtatcgcctggactccaaggtcaagccaaatagggaggtgggaattcagagcatcacctacacccacaacgggagacatcagccgaaaacccaacacacgtaagcagaagaacggcttcccgcccaacttcatccactcgctggactcctcccacatgatgctcaccgccctgcactgctacaggtgggcgtctccggacggcgtgggtgccgctcgcctcccgggggcgtcttctggctagcagggcacagctggccaggctgggtctagctgggggcagggactgggcagagtggatctgctgtgtctgtggggcctgtgtagaggccctgaagctgtgtgcccccgaatgtaggtggtcctgggcagctccccctcctgttggcccgacaagggagagcccgagcatgggcgctgccccttcctgctgggcatttcttggcaccgcgatgtgtggttagatctggagcacgtggaggtcgttccagcagaatctaccggccacgggagctgggaatgctcaggatgcggggtggtggccctggcaggaggggacctcgtagccgccctcggagctgaggctcccacagcagcgtggggggcggcaggggtggggcgaggaggcttctgggaacatttcctccccctgtactgatacctaacccaggatgtttggggaggggcggggcgaggggtggggcgaggcctgcaggagggtgggcttccctggacctcaagtggagggggctgagcgcagggccaggatgctggtcactgggtggccctgtgagctcccctcccttcaggagtcctccgctctgccacaggaagggcctgaccttcgtctctgtgcacgactgttactggactcacgcagcttgatgtctccgtcatgaaccaggtgcccccgtagtctgagcctcagtccacccatgggctggggcccccacactggggcgntgggtaagggtgg

SEQ ID NO: 361408 - DNA, 1579 bp, Homo Sapiens
  misc_feature (1369)..(1369): n is a, c, g, or t
  misc_feature (1371)..(1372): n is a, c, g, or t
  misc_feature (1376)..(1377): n is a, c, g, or t
  misc_feature (1384)..(1384): n is a, c, g, or t
  misc_feature (1426)..(1426): n is a, c, g, or t
  misc_feature (1428)..(1428): n is a, c, g, or t
ttccccagcgagcaccacaaggaagcctatgaggtcaagctgggggcccaccagctagactcctactccgaggacgccaaggtcagcaccctgaaggacatcatcccccaccccagctacctccaggagggctcccagggcgacattgcactcctccaactcagcagacccatcaccttctcccgctacatccggcccatctgcctccctgcagccaacgcctccttccccaacggcctccactgcactgtcactggctggggtcatgtggccccctcagtgagcctcctgacgcccaagccactgcagcaactcgaggtgcctctgatcagtcgtgagacgtgtaactgcctgtacaacatcgacgccaagcctgaggagccgcactttgtccaagaggacatggtgtgtgctggctatgtggaggggggcaaggacgcctgccagggtgactctgggggcccactctcctgccctgtggagggtctctggtacctgacgggcattgtgagctggggagatgcctgtggggcccgcaacaggcctggtgtgtacactctggcctccagctatgcctcctggatccaaagcaaggtgacagaactccagcctcgtgtggtgccccaaacccaggagtcccagcccgacagcaacctctgtggcagccacctggccttcagctctgccccagcccagggccttgctgaggcccatccttttcctgcctctgggcctggctctgggcctcctctccccatggctcagcgagcactgagctggccctacttccaggatggatgcatcacactcaaggacaggagcctggtccttccctgatggcctttggacccagggcctgacttgagccactccttccttcaggactctgcgggaggctggggccccatcttgatctttgagcccattcttctgggtgtgctttttgggaccatcactgagagtcaggagttttactgcctgtagcaatggccagagcctctggcccctcacccaccatggaccagcccattggccgaagctcctgggggagctcctggggacccttgggctatgaaaatgagccctggctcccacctgtttctggaagactgctcccggcccgcctgcccagactgatgagcacatctctctgccctctccctgtgttctgggctgggggccacctttgtggcagcttcgaggacaggaaaagccccaatcttgcccactggccgctgaacgcccccgagccctgactcctggactccggaggactgagccccccaccggaactggggctggcggcttggatctgggggtggggagtaacaggggcagaaaatggattaaaatggtttgagcccccccncnncacnntaccatnactgtgccaaaatggaaaaccacacaagggagaagagataananaaaaaattgtcgggcgcgcttcggccccctaaaaaaacttttctaaaaacatttcgttttgggggccggggccccccgtaaggaaagggaaacgggggcccaaagctggtttccccaaaagaaaacccgggggccaagaaactaaagggct

SEQ ID NO: 361409 - DNA, 1480 bp, Homo Sapiens
  misc_feature (52)..(88): n is a, c, g, or t
  misc_feature (1354)..(1366): n is a, c, g, or t
  misc_feature (1408)..(1419): n is a, c, g, or t
ggatgtatagactcactatagggcgactccggggtctccgcggtggcggcgnnnnnnnnnnnnnnnnnnnnnnnnnnnnnnnnnnnnnatcaggccaaatcggccgagctcgaattcgtcgagagcggataaaaggggcgggacgcgccgcggtcgggatgacgtgaagctgggggagctcgtcgccgcagccggcggctagcgggcgtccgcgccatggagcgctacgcggccgccttggaggaggtggcggacggtgcccggcagcaggagcgacactaccagctgctgtcggcgctacagagcctggtgaaggagttgcccagctcattccagcagcgcctgtcctacaccacgctcagcgacctggccctggcgcttctcgacggcaccgtgttcgaaatcgtgcaggggctactggagatccagcacctcaccgaaaagagcctgtacaaccagcgcctgcgcctacagaacgagcatcgagtgctcaggcaggcgctgcggcagaagcaccaggaagcccagcaggcctgccggccccacaacctgcctgtgcttcaggcggctcagcagcgagaactagaggcggtggaacaccggatccgtgaggagcagcgggcgatggaccagaagatcgtcctggagctggaccggaaggtggctgaccagcagagcacactggagaaggcgggggtggctggcttctacgtgaccaccaacccacaggagctgatgctgcagatgaacctgctggaactcatccggaagctgcagcagaggggctgccgggcagggaatgcagccctggggctaggaggtccctggcagtcgcctgctgcccagtgtgaccagaaaggcagccctgtcccaccatagccacaggcagcagaagtctgggcagagttcatcttcttgacctttggccactgccttcccagctgcccgcagggggttccccctgctgaggagagaccaggtggaccccagctgcctgtcacccttcatctgggacttgctgtcaaaccctaggatagtctcataaaggggaggctgggccagcctgctgctgtctgcttcaggaccaggcagagagtgaggctgggggttctcacaccttactccaccgggcacatcccaacctgcactggggcccacccgagcgcttgttctggtctcagccgctcccttggcagctgcagcccccatgcagaagaggctcccaggccaagctctgtgtgacccagagaaataaagatgcctcagtgggggccccccatggtgggcttgtggggaatagcctggcagggtttcttgccccataacccgggggggcccccctggggtaaagggnnnnnnnnnnnnnttttggttttggcaaacaaaaaaagggccccctctaaacccnnnnnnnnnnnncccccccttttttcctggtggggggctttttgtggtgtttcccccccacaaagggcccact

SEQ ID NO: 361410 - DNA, 1356 bp, Homo Sapiens
  misc_feature (57)..(93): n is a, c, g, or t
  misc_feature (1148)..(1148): n is a, c, g, or t
  misc_feature (1187)..(1187): n is a, c, g, or t
gggggacgatgatagatcatatagggcgaattgggagcgtcacgcggtggcggccgnnnnnnnnnnnnnnnnnnnnnnnnnnnnnnnnnnnnnatcaggccaaatcggccgagctcgaattcgtcgagagcggcttttcttcctctcggctcccctcgcaggtaatgagagtgcatacccgcccaacggcgtggagtgctacagctgtgtgggcctgagccgggaggcgtgccagggtacatcgccgccggtcgtgagctgctacaacgccagcgatcatgtctacaagggctgcttcgacggcaacgtcaccttgacggcagctaatgtgactgtgtccttgcctgtccggggctgtgtccaggatgaattctgcactcgggatggagtaacaggcccagggttcacgctcagtggctcctgttgccaggggtcccgctgtaactctgacctccgcaacaagacctacttctcccctcgaatcccaccccttgtccggctgccccctccagagcccacgactgtggcctcaaccacatctgtcaccacttctacctcggccccagtgagacccacatccaccaccaaacccatgccagcgccaaccagtcagactccgagacagggagtagaacacgaggcctcccgggatgaggagcccaggttgactggaggcgccgctggccaccaggaccgcagcaattcagggcagtatcctgcaaaaggggggccccagcagccccataataaaggctgtgtggctcccacagctggattggcagcccttctgttggccgtggctgctggtgtcctactgtgagcttctccacctggaaatttccctctcacctacttctctggccctgggtacccctcttctcatcacttcctgttcccaccactggactgggctggcccagcccctgtttttccaacattccccagtatccccagcttctgctgcgctggtttgcggctttgggaaataaaataccgttgtatatattctgccaggggtgttctagctttttgaggacagctcctgtatccttctcatccttgtctctccgtttgtcctcttgtgatgttaagacagagtgagagaagtcagctgtcacgggggaaggtgagaaaagaggatgcttaancttcctactcacttttctcctagccagcctggactttgnaacttggggggtgggtgggaacaattggctccccaaatccaaagcactgcccttcccctaattccccggaatcttttgggggaatcggggtccccccttatggcctttccttaaccaaaaccggggaaacctcctccaaggggaaggggaaccggggccctaataggcc

SEQ ID NO: 361411 - DNA, 1015 bp, Homo Sapiens
  misc_feature (874)..(874): n is a, c, g, or t
cacggaaatagccaacccttttcttccgcacggttggaggaggtcggctggttatcgggagttggagggctgaggtcgggagggtggtgtgtacagagctctaggactcacgcaccaggccagtcgcgggttttgggccgaggcctgggttacaagcagcaagtgcgcggttggggccactgcgaggccgttttagaaaactgtttaaaacaaagagcaattgatggataaatcaggaatagattctcttgaccatgtgacatctgatgctgtggaacttgcaaatcgaagtgataactcttctgatagcagcttatttaaaactcagtgtatcccttactcacctaaaggggagaaaagaaaccccattcgaaaatttgttcgtacacctgaaagtgttcacgcaagtgattcatcaagtgactcatcttttgaaccaataccattgactataaaagctatttttgaaagattcaagaacaggaaaaagagatataaaaaaagagaaacaagaggaggtaccagccaacaggaagaccacggggaagaccagaaggaacggagaaatcctatatactcactaatagataagaagaaacaatttagaagcagaggatctggcttcccatttttagaatcagagaatgaaaaaaacgcaccttggagaaaaattttaacgtttgagcaagctgttgcaagaggattttttaactatattgaaaaactgaagtatcgaacaccacctgaaagaatcattgaagcaaatgaatgttgatgaagatttagaaaatgaagattttgacagtccgtagatacaaatttttggatgatgatggatccatttctcctattgaggagtcaacgtaagtggaantcatatgaaatactttggtaataggttataaattaaatttctatgttaattgcttcatattttgcctttaatatagttatacttaaataatgaacaaagatacagagtatgacaattgggattattacagttgagccaagc

SEQ ID NO: 361412 - DNA, 1545 bp, Homo Sapiens
  misc_feature (1516)..(1516): n is a, c, g, or t
agcggggtgtggccctcgcctgtggcccccgtgctgcttgcactcgaactcgtcgccatggaggagctccagtgagcctctgagaggacagctccggctctgcttcacgcaagctgcccggactagcctcttactgctcaggctcaacgacgctgccctgcgggcgctgcaagagtgtcagcggcaacaggtacggccggtgattgctttccaaggccaccgagggtatctgagactcccagtgccctggttggtcctgcctcttctccttcatagtgtcccagtgttgtcaggagggcgctggtggtagcttggaccttgtgtgccaacgcttcctcaggtctgggcctaacagcctccactgcctgggctcactcagtggagcgcctcattatttgggcagccatggattctattccagccccatcatcagttcagggacacaacctgactgaagatgccagacatcctgaggagttggcagaacacaggaggctattctgaaggagatgcagtatcacagccacagatggcactagaggaggtgtcacgtgtcagatccactggcaagcaaccaaggacagtcactcccaggatcctcaagggagcacatggcacagtgggaagtgaggtactttggaatggcggtgcgacttaacatgggcaggctttggcattgtcttcctttctaatctccactcttaaatgttgtaataaaagatccagttccagcctcctaacctggtcttcaatcggtcccattcccttaaaatatcctagaagccagacccatgttccaaacagagaacctgttcaggcactgccttcctctgccagccggaaacgtctggacaagaaacgttcagtgcctgtagccactgtagaactggaagaaaagaggttcagaactctgcctttagtgccaagccccctacaaggcctgaccaatcaggatttacaagagggagaagattgggagcaagaagatgaggacatggaccccagattagaacacagttcctcagttcaagaagattctgaatccccaagtcctgaagatataccagactacctcctgcaatacagggccatccacagtgcagaacagcaacatgcctatgagcaggactttgagacagattatgctgaataccgcatcctgcatgcccgtgttgggactgcaagccaaaggttcatagagctgggagcagagattaaaagagttcggcgaggaactccagaatacaaggtcctggaagacaagataatccaggaatataaaaagttcaggaagcagtacccaagttacagagaagaaaagcgtcgctgtgagtaccttcaccagaaattgtcccacattaaaggtctcatcctggagtttgaggaaaagaacaggggcagctgaagttatcaagggaatttttgagcctctgcttagtgaaacacaaaagaacaaagcagctataaactaaatagaatgcaactatctggcttttctttatggctgaccactggnagtcccatgggtggccaagttagaaaaga

SEQ ID NO: 361413 - DNA, 1054 bp, Homo Sapiens
  misc_feature (90)..(90): n is a, c, g, or t
ttcccaaccagggggcatgcaggaatgcggttttcagcataattcgttctcaaaattcctggtcataaggcaatgttgctgttctggcanctgtggatgggcctgtatttgcagggaggtagttctggtatattttcaggacttggggattcaagaatcttccttgaactgaggaaactgtgttttaatctgggggtccaatgtcctcatcttcttgctccccaatcttctccctcttgtaaatcctgattggtcaggccttgtagggggctgggcactaaaggcagagttctgaacctcttttcttccagttctacagtggctacaggcactgaacgtttcttgtccagacgtttccggctggcagaggaaggcagtgcctgaacaggttctctgtttggaacatgggtctggcttctcacttcccactgtgccatgtgctcccttgaggatcctgggagtgactgtccttggttgcttgccagtggatctgacactgacacctcctctagtgccatctgtggctgtgatactgcatctccttcagaatagcctcctgtgttctgccaactctcaggatgtctggcatcttcagtcaggttgtgtccctgaactgatgatggggctgggatagaatccatggctgcccaaataatgaggcgctccctgagtgagcccaggcagtggaggctgttaggcccagacctgaggaagcgttggcacacaaggtccaagctaccaccagcgccctcctgacaacactgggacactatgaaggagaagaggcaggaccaaccagggcctgggagtctcagataccctcggtggccttggaaagcaatcaccggccgtacctgttgccgctgacactcttgcagcgcccgcagggcagcgtcgttgagcctgagcagtaagaggctagtccgggcagcttgcgtgaagcagagccggagctgtcctctcagaggctcctggagctcctccatggcgacgagttcgagtgcaagcagcacgggggccacaggcgagggccaccaccgccacctcctctccc

SEQ ID NO: 361414 - DNA, 528 bp, Homo Sapiens
ggctaaaattcaccttagtttggtttgtcctaatgccctcattatttttaccctgaagatgatgtcatttcctcaggacttgaaaatgacttggctgaactaaaggtaaaaaagccaagcctctgtcaacttttccctagactccctaggcacagcctatggaagtcctttgccacagtgccccatacccctaaaaattaataatgaaaaccaaacctcaagaacctagagcagctctctacttgccaccatggactccagtggtcagcataagaaaagcagatagttgcattctatttagtttatagctgctttgttcctttgtgtttcactaagcagaggctcaaaaattcccttgataacttcagctgcccctgttcttttcctcaaaccccaggatgagacctttaatgtgggacaatttctggtgaaggtactcacagcgacgcttttcttctctgtaacttgggtactgctgcagagaaaaagcatccatgtcaaaaagtaaaaattctcattctaccttga

SEQ ID NO: 361415 - DNA, 1751 bp, Homo Sapiens
cccccaattgggggcttttatatttttggggttccagggccaaaaagttaaagaaaaccctttcgagcccattccaagtttaacttaagaatagggggggttctttttcctttgaaaaaggcctggcttttccatttaaaaggtagctttttgccactggccctcaggggtaaatcttttatccaaactccttgaaaatattttttttggtcccccaaaatataggttaactttcttttcttttataaacataagactgccactaattatagggtagtggcaaaacctgggctgaaatcagtcgctctctttatgttattcccagaacacaggacaaattcccattcttaacagtgatttccttgtttataactatgagcttcagtgaatatcctccttcaaaatcagaggcactgacctcatcacagagaaaaacaagcaaacaagcaaattcactctgcaacgtacaaggttaaccctcaactagctcacacccattgaagaaatcttggctgtgtgcacaagaaatgaaatctatttcaaagcaatttaatacaaacccattcaaaaaagttctccaataaccatcttctttaatttgaactgctaattgaacatgaagagtgaaaattaaacacctagttcgtccggtttaaatggtcactaagactgtataggcaatttcaaaatgggcactgtaactaaaagaaagcaaacctatttagagctgaacgagactcttgcactgggttttgcttgctctaagtgacaaagtaagctgatgctcatagcacattggactacagcaagagaaagggggagaagcagatggagcatctccttcactgtcatgagcccagtgagtaaaaggagtgaggaaaccctcttttgtccacagatttacaaatacaaaaaaataaataatattctaagacagtacaaatgcaaatactgttcccttgtgtcaattacatacagcatgcctacaaagagagaatggtaattcttcttcattcacagacaggacacatggcagtgcactattcaaaatgctttgataatcttaatttttgtttctggtgctgagatattatgaaaggaactgcatttgcaacttattaaatacttccaggaacaaatagttcactttgcttgggacttgtagttttgagtaattaatcatccatggagcaggagccagtcaggagatacccgttggtaccactggtcccattggtggttgtcgcagtgtggggattctttcccggaggttctgagtcctcctcatctgagctagactcaatatcacttcgatcatccttggacaccttgcctcttgaaacagctttgcaagctattttcacaatcaagtaagaccagaagcagttcaacccttgtactagcaatagcagtaggttaaaaacccaccaggaagggtaaggtccaacgatctcccagctttcaaataatgtggtatttaacacccagagaggaaatatacccagtcgtgtggtgataaaaaccacggcaaacataacaaacaggagatcacacattttctgaaacttggcataatttgccattttggcagcctccagaagagcatcagctgaatcatgaagacaaaggaccagcgttcctactcgggccatattgttgacatatgaaaaggtaatcaagaaaatagatacaaggtggtgcaggaacataatgccaaagtcctttcttttgatatcagtgaactgagaaaa

SEQ ID NO: 361416 - DNA, 1204 bp, Homo Sapiens
aaaattgaaaaagaggtgaatgggtgggcggttaatccctatgaaatggggtttgtgatttctctccttccagggggatgggtggagaatgctcattaagatttgtagttagaggttaaccatgtgagcccctcatagagtccgtcccctgaggtggcacaagagggctgcacataccagttcctgtcccgaatccgggtcaggcccagtttctcctggatctcgtggggtttcatggcatcgggcaggtcctgcttgttggcgaagatgaggattatggcgtccctcatctcccggtcattgataatgcggtgcagctcctggcgagcctcatcgatgcggtcgcggtcggcgcagtccactacgaagatgagaccttgggtcccagtgtagtaatgccgccagagcggccggatcttgtcctggccgcccacatcccatacgttgaacttgacatttttgtaagtcaccgtctccacgttgaaacccacagtgggaatggtggtcaccgactggcccagcttcaacttgtacaggattgttgtcttgccggccgcgtccaggcccaacatgaggatccgcatttccttgttcccgaagattttggatagcaccttccccatcgcgtcggaggagccggggccgggggcattcaggtgtcccgggtcccctcagccaacaacgccgccgccgccgcgaaaccgaaacgaagcctctcggccgcgagagcgcctttgcggcctgcgtgggagttgcctcctaagggcagaggcccaggccccccgctcactcgggcatcaccgaccgcacaacttgatttctccagtcgccgccgccacccgggccctgagactgcgctgggagccgccgccctgctgaggcgcggcccggcccggaactgcccttccccccgcaggcgccgcgcgagcgccgccgcggttcccgctcctccgccttcctctcaccgcgagggagactgcagccctccggcccgcccgccggcctgcgagcactgggctccccaccgacccaggacacccgagaggcagcgcggctccggggccccgtcaggtcatggatcctcgcgggaactcggtgcgctgcctccagccgccgccccgagcgcgggctccctccggcctccaactcctcctcccagttcagccgccgccgctgccggaaaaggcgccgaggaaaccccgct

SEQ ID NO: 361417 - DNA, 1750 bp, Homo Sapiens
  misc_feature (238)..(248): n is a, c, g, or t
  misc_feature (346)..(346): n is a, c, g, or t
  misc_feature (439)..(439): n is a, c, g, or t
  misc_feature (479)..(487): n is a, c, g, or t
  misc_feature (562)..(562): n is a, c, g, or t
  misc_feature (716)..(716): n is a, c, g, or t
gagtggagggagggatgggcgacgattacgcggcgtgcgtgggttgagattagggaatgaaaaaaaagtcgtgcggttgggtcgattcgtattgattttgagccttgagcagggagcgggaagagtaagcgggcagcgctggtacgtcgaagttttatttgactgagctcgcagtcgttcgccctgacgcgggtgtggtggtggggtaggtgtgatgctttttgaggaaggtgtgaannnnnnnnnnncgagaagtcgcccgccggtcatggtggaccatcataagacggcggcggttgatgtctcatgcgctcgtgtatttgctaagtaaaaagctcgaaccttncaaggagggccgcccggagcggagcacatcaagtgtagagggagtggggggagcgtagtggtgagggaagaaggggggggcgaaggagggtgnggggagaaagaagcgttacggccgagttaaggtgagtcannnnnnnnncgccacataataccggttttaaaaggtgcccgccccacgggtactttcgcgctccactttgtttttgttgtaggngttttggcggggagggagatcaggggcgttgcaataataacgcgctttagaaccacatacggatgttacttctccttccaatttccgaacccgttttttaaacctgctttggtttttttctcaccattatctcaatagtaattgattttaaggncatcttaggtggtacaatctacggccaatttagtggccgtaaatcgatctgtgggggtgactttggtttttgtccagaacggagagtgtgaaagatacgaagtgtatggtcaataggaggctaggcggagtttaataacttcgacacggcgattgggtctttatcctgagaagaagggtggggaataagcccaatagcaccatactatttgttcacatttagtgcgccttcgagtgtcataagagggcacggaggcgctcacaagaacatgcctcgagataaagcctggggggaggaccttccgtgaccgccgtgttgtccggctggtttttccaattaacggtgacagtggaaaaaacgcgcggttgctgcgcagtgcgaagtgccgggccggagccatggagccttggtcggtagaatgaggcttcaggcaagtgaccactggtatgaagcagggtgccttcatggcccagcatcgtttgccgtcgtataaggtgctgagggtggatgctgatattacgggtgcatttggggtcctcaagatgagacatcaacatacagtcgttaaaagttcctgtgtcaggatcgtccgtcatgacatcatgcaggcattataccgaaagctttataatcccacagaatttatctgggataacactgattatcagatggcagaagagagagcaaagccaaagctgaaagttttcttctttcaggctgggtaatgttgtccattcgatcaacccacatttcaatcatatttcacaaaagctggtccatctcctgattaaatttatgggccatctcattaagtagtgaagaaaaaaaactagtgttttgtagtagaactcgacccatgacgccaagatacgtggacatcactacaggatacctctccccttctataatacccttgaaaacatagggtaaaatcggttgaaacatttgtggacactagtattgggttcactttaagatggaaaaaattccggaccgcaaccaggaagcgacagaagcaaccgggcacgagagcg

SEQ ID NO: 361418 - DNA, 2067 bp, Homo Sapiens
  misc_feature (467)..(467): n is a, c, g, or t
  misc_feature (1416)..(1448): n is a, c, g, or t
gagaagggtagaagagggtgggtgtgggatggggaggggagagtggaaaggccctgggcagaccctggcagaaggggcacggggcagggtgtgagttccccactagcagggccaggtgagctatggtgctgcacctactgctcttcttgctgctgaccccacagggtgggcacagctgccaggggctggagctggcccgggaacttgttctggccaaggtgagggccctgttcttggatgccttggggccccccgcggtgaccagggaaggtggggaccctggagtcaggcggctgccccgaagacatgccctgtgggggcttcacacacaggggctctgagcccgaggaagaggaggatgtctcccaagccatccttttcccagccacagatgccagctgtgaggacaagtcagctgccagagggctggcccagtgagtgctgaggagggccttcttcagatacantgttccggccatcccagcatacacgcagccgccaggtgacttcagcccagctgtggttccacaccgggctggacaggcagggcacagcagcctccaatagctctgagcccctgctaggcctgctggcactgtcaccgggaggacccgtggctgtgcccatgtctttgggccatgctccccctcactgggccgtgctgcacctggccacctctgctctctctctgctgacccaccccgtcctggtgctgcttgctgcgctgtcccctctgtacctgctcagcccggcctgaggccacgcccttcctggtggcccacactcggaccagaccacccagtggaggggagagagcccgacgctcaactcccctgatgtcctggcccttggtctccctctgctctgcgcctgctgcagaggcctccgggaggaaccggctgcccatgccaactgccacagagtagcactgaacatctccttccaggagctgggctgggaacggtggatcgtgtaccctcccagtttcatcttccaataatgtcatggtggttgtgggctgcacatcccaccaaacctgtcccttccagtccctggggctccccctaccccagcccagccctaatccttgctgccaggggcccagccctgctgtgctgctctcccagggaccatgaggcccctacatgtccgcaccacctcggatggaggttactctttcaagtatgagacagtgcccaaccttctcacgcagcactgtgcttgtatctaagggtggggggtcttccttcttaatcccatggctggtggccacgcccccaccatcatcagctgggaggaaaggcagagttgggaaatagatggctcccactcctccctcctttcacttctctgcctatgggctaccctccccaccccacttctatctcaataaagaacacagtgcatatgacttgnnnnnnnnnnnnnnnnnnnnnnnnnnnnnnnnngacaagacaacagacgaaaacaagagagggaggcggcgcgcgctcacgaagagaatattctctccgacgagggggaccccaagcgatcagcgagcacgcaccacccgaagcataatggaggatacacagagggtggccccaccatataggggaggagccagagaatataacagagagggaagccacgagcgagcgcggtaggatacgaacgacagacaacgcgccgccacgagacgccgggcggacgacacaccacgcgagcagaaacgcacgggggcgcacacctcagctgggagaggagagggcagccccacacaacccatcgcacaggcagggaggggaacgacacaccccgctggcggcaacgaccacctccacacaaacgagagcgattatacagacggccccggatggggggggaatacatccatgcaaacccctctgtcgacacggcgtgtctatacaaagcgggtgtagtaaccacccccaccgccagtacctacgacactccggcagagtctatatgagcaaggttttgcgcccgtccaagctgcaaccagtcaactagcccacaggaaatactatttttaccaccacggggggccatctaccaaacaaa

SEQ ID NO: 361419 - DNA, 1465 bp, Homo Sapiens
  misc_feature (1225)..(1225): n is a, c, g, or t
  misc_feature (1264)..(1264): n is a, c, g, or t
  misc_feature (1368)..(1368): n is a, c, g, or t
ggcctgggtggcgaattcggcacgagggtggcgtgtgtgctgcgaccccgagggaagatgaacgggacgcggaactggtgtaccctggtggacgtgcacccagaggaccaggcggcggcgggcaggaagacctatgccatggtgtccagccactcagctggtcattctctggcttcagaactggtggagtcccatgatggacatgaggagatcattaaggtgtacttgaaggggaggtctggagacaagatgattcacgagaagaatattaaccagctgaagagtgaggtccagtacatccaggaggccaggaactgcctacagaagctccgggaggatataagtagcaagcttgacaggaacctaggagattctctccatcgacaggagatacaggtggtgctagaaaagccaaatggctttagtcagagtcccacagccctgtacagcagcccacctgaggtggacacctgtataaatgaggatgttgagagcttgaggaagacggtgcaggacttgctggccaagcttcaggaggccaagcggcaacaccagtcagactgtgtggcttttgaggtcacactcagcccgggtaccagagggaagcagaacaaagtaatgtgggcccccttcagagagaggaggacagagtggagcagaaaagaggcaaaagtcggagagctgcagaggcgcttgctagggatggagacggagcatcaggccttactggcgaaagtgagggaaggggaagtggccctagaagaacttcggagcaacaatgctgactgccaagccagaacgagaaaaggctgctaccctggaaaaggaggtggccgggttgcgggagaagatccaccacttggatgacatgctcaagagccagcagcggaaagtccggcaaatgatagagcagctccagaattcaaaagctgtgatccagtcaaaggacgccaccatccaggagctcaaggagaaaatcgcctatctggaggcagagaatttagagatgcatgaccggatggaacacctgatagaaaaacaaatcagtcatggcaacttcagcacccaggcccgggccaagacagagaacccgggcagtattaggatatccaagccgcctagcccgaagcccatgcctgtcatccgagtggtggaaacctgagctgcctggagatggttgctgccattgctgctgcctctgcctcggagaacccactgcccctgntggctgttaacactggcctttgacatcctgacctggccnctgggctgcaccaaggaacttcgggctcccgttgtctcaccattcccaagccccctggcccactctaagcttgggccaaacggagccatggagcaccctattcnagggcacctggcaggcctttttggaaagaacattgttccctggcaagccaggggagcccaggggccaaatatcctaatatttccttaccaggggaac

SEQ ID NO: 361420 - DNA, 1061 bp, Homo Sapiens
  misc_feature (582)..(582): n is a, c, g, or t
  misc_feature (609)..(609): n is a, c, g, or t
  misc_feature (868)..(951): n is a, c, g, or t
  misc_feature (990)..(1002): n is a, c, g, or t
tgggagccagcggggggcctggccatgccattctgtccttcgattatgggcagcagagagcagagggcaacctgggcccccggctgcatggtctgcacctgagcaacataacagtgggcggaatacctgggccagccggcggtgtggcccgtggctttcggggctgtttgcagggtgtgcgggtgagcgatacgccagagggggttaacagcctggatcccagccatggggagagcatcaacgtggagcaaggctgtagcctgcctgacccttgtgactcaaacccgtgtcctgctaacagctattgcagcaacgactgggacagctattcctgcagctgtgatccaggttactatggtgacaactgtactaatgtgtgtgacctgaacccgtgtgagcaccagtctgtgtgtacccgcaagcccagtgccccccatggctatacctgcgagtgtcccccaaattaccttgggccatactgtgagaccaggattgaccagccttgtccccgtggctggtggggacatcccacatgtggcccatgcaactgtgatgtcagcaaaggctttgacccagacatgncacaagacaagcggcgagtgccactgncaggagaaccactaccgggccccaagccagcccacctgcctcttgtgtgactgctaccccacagggctccttgtccagaagtcttgtgaccctgaggaatgccccgttgtccatggcaagcccaggtgtccatccgggcggtcaggtgtgacccgctttggacaacccccttttgcttgaaggccacccacccaatggcttggtaaaagggaattattaaaaagtttgcccaccaaacaaattgaggggttgggaattnnnnnnnnnnnnnnnnnnnnnnnnnnnnnnnnnnnnnnnnnnnnnnnnnnnnnnnnnnnnnnnnnnnnnnnnnnnnnnnnnnnnaaatggtctgtgggcccccccttgtgtaaaaaacccacnnnnnnnnnnnnnttccccccccccaaaaacttttttttaaaggggggaggggccctatacccctttttttt

SEQ ID NO: 361421 - DNA, 1672 bp, Homo Sapiens
tgaccgacttccggctggcaggccttgacatcacagatgccacgcttcgcctcataattcgccacatgcccctcctgtctcgactcgacctcagtcactgcagccaccttacagatcagtcctccaatctactcactgctgtcgggtcttccactcgctactctctcacagagctcaatatggcaggttgcaataaattgacagaccagaccctgatctacctacggcgcattgccaacgtcaccttgatcgaccttcgaggatgcaagcagatcactcgaaaagcctgcgagcacttcatctcagacttgtccatcaacagcctctactgcctgtctgacgagaagctgatacagaagatcagctaagacacacccagcccagattcaacaggaaaccgatcttcccctgactccccaccgaggagagcctctcctcgaccctgcacgggctctgaggccagcgtcacactccctctctgctctcctgtcccttgagcccttcctctacaggtggggcagagagggtggtggacaccaggcttatctgcctgctcctctccctcctaaggaaaagggagtagcagattgatctgaggggaaagcacaggctgtgctgtcgaggcgcctgctcgcttactcgcctgccaggaggccgggctctcagtttggggtgtttgtgcaaccttcatctgcactgggccctgtgcccctcctccccatccatggtccccagcagtgcctggttctgagcaaactcccagggaagaaaacggccctgtctccatggccaggttcttgtggtgtccagtgcgcgtctctcctccatcacactctcccggcttgcgcaggaggggccagcagccccaggagtcccagacccgtgccgatcacactggtgctgttgagatctcccaaacctcacgtccttaactgtgctctccctcctttcctctcccttgagcttggttctgcccagcactcgtgcttgttcacataattaggtttcccaccccagcctacccgacttacttgctagtctctatgaggtccttattgcacttattggggttgaagctcttcagaggagctggaactgtctaccccagggacacacccatttcgttgctacccaagtggattctgagacaggcaccatctccttgttccccctctctcttttgcctcccactgactgcccttttccatgtgtcttcattctgcctgaagaaggctttcccaggatgcacgtcctcagagggagcagcctatctcccccaagctggaggcggcagaggactgggccaagccccaacctgcctcccagccaggctcctccaggcctctggtttagcggagccccctgagcccaggcctgtgtctagccccagtggctcactgaactttcagggcagtcagggggtcctgcttagaagccagtcaccagccctctgcctgcagccatggaagggggtgtgcacgtgcctctgtgtgtgtggctgagtgtattctgcgcgtgtgtgtggagggagggagggaggggagcatggtgtctcccgctccaccgccctttgttgagccccatcagctgcccccttttactttgcattgaacggcctgtccaaagatcctctctctagggcagcagagagctttttgcactttaaaaaaaa

SEQ ID NO: 361422 - DNA, 1552 bp, Homo Sapiens
gtttgccacaatcctgggccaccgattattcctgtgattctcctgctgttttcagttgggaaattttctataattgaaaaagatgtgggtttatataaaggcagaacaaatagtgccaaaacttgatatcacaatttttatgtagttgatttcatgtgcttgggcagcattaatgttttttttgacaattacatcctctcatgttgccctcccccatgtctctctatcctgtgattctctctctaatctccttttcaccagcaggggaagtcttcattctcttgattgtgtcctctgtgccacaagtgaagatgttgtttgtttctctacagggaggaggatgtgcgagtggctaatttgaaaccaagaatctcctttaatttctttgtcactgcacctaaaaatgtgtctgatatcattcctagaactgaagttgaaaaggccatcaggatgtcccggagccgtatcaatgatgctttccgtctgaatgacaacagcctagagtttctggggatacagccaacacttggacctcctaaccagccccctgtttccatatggctgatgttttggagttgtgatgggagtgatagtggttggcattgtcatcctgatcttcactgggatcagagatcggaagaagaaaaataaagcaagaagtacagaaaatccttatgcctccatcgatattagcaaaggagaaaataatccaggattccaaaaacactgatgatgttcagacctccttttagaaaaaatctatgtttttcctcttgaggtgattttgttgtatgtaaatgttaatttcatggtatagaaaatataagatgataaagatatcattaaatgtcaaaactatgactctgttcagaaaaaaaattgtccaaagacaacatggccaaggagagagcatcttcattgacattgctttcagtatttatttctgtctctggatttgacttctgttctgtttcttaataaggattttgtattagagtatattagggaaagtgtgtatttggtctcacaggctgttcagggataatctaaatgtaaatgtctgttgaatttctgaagttgaaaacaaggatatatcattggagcaagtgttggatcttgtatggaatatggatggatcacttgtaaggacagtgcctgggaactggtgtagctgcaaggattgagaatggcatgcattagctcactttcatttaatccattgtcaaggatgacatgctttcttcacagtaactgagttcaagtactatggtgatttgcctacagtgatgtttggaatcgatcatgctttcttcaaggtgacagggtctaaagagaaaagaatccacgggaacaggtatgaggaacattgctttttttacttcccaagggggcgttgattcaacatccttccctggacaaccacggaaaactaggaggcccaggggggccctcccgggggaaactcccacgaagccattggccttggaattagaaaaacatccccatttttcctaaccgtgggttccccccctaaaacctgggtggtggaaac

SEQ ID NO: 361423 - DNA, 679 bp, Homo Sapiens
ataaaaaacaagagaatacagataaatatgccaaacagtcaagccattgatgtagacacagataccaccttcttgtggcttctagtacttatctgccaaaacctacattagaaatatcagcttcccatagtaaccaacataatcagaactgacatccaactgcaatttttaaggagggaaaacagaataacttattttgcaatataatttaacaatttagtatattcagagatagagtccatatatccttgatataaaatctaaacccagtttcttgtatcacactaacatggccataccataccttccatgcttatttctctgtcatttagtgtgcataacaacaacgattcaagcttttcgtgaagaaaaatcctcagtaggatgctggccagtagtgttcggtcttgtccacatacatgtgataaagcatagactacatgaagttccttttgcagtataagctaaaatgacattttaaaagattgttttaaagtacgtagcattataagcatgctccatgagactaacaagaaaatatgttcttttcacaagtttcttataattaaaaatgatgtccccattgaattaaatttattttaaaaatagaaatgaaattttcctaggcctactttaatttctacccaaaaatttccggaattaaaacaagggtttaaaa

SEQ ID NO: 361424 - DNA, 956 bp, Homo Sapiens
gggtttccggtcaggtcggtcggtccccactatgggcctggagctgtacctggacctgctgtcccagccctgccgcgctgtttacatctttgccaagaagaacgacattcccttcgagctgcgcatcgtggatctgattaaagtgtggccatcctgctctacctgacgcgcaaatataaggtccctgactactggtaccctcaggacctgcaggcccgtgcccgtgtggatgagtacctggcatggcagcacacgactctgcggagaagctgcctccgggccttgtggcataaggtgatgttccctgttttcctgggtgagccagtatctccccagacactggcagccaccctggcagagttggatgtgaccctgcagttgctcgaggacaagttcctccagaacaaggccttccttactggtcctcacatctccttagctgacctcgtagccatcacggagctgatgcatcccgggggtgctggctgccaaagtcttcgaaaggccgaccccaagctggccacatggcggcagcgcgtggaggcagcagtgggggaggacctcttccaggaggcccatgaggtcattctgaaggccaaggacttcccacctgcagaccccaccataaagcagaagctgatgccctgggtgctggccatgatccggtgagctgggaaacctcacccttgcaccgtcctcagcagtccacaaagcattttcatttctaatggcccatgggagccaggcccagaaagcaggaatggcttgcttaagacttgcccaagtcccagagcacctcacctcccgaagccaccatccccaccctgtcttccacagccgcctgaaagccacaatgagaatgatgcacactgaggccttgtgtcctttaatcactgcatttcattttgattttggataataaacctgggctcagcctgagcctctgcttctaaaaa

SEQ ID NO: 361425 - DNA, 944 bp, Homo Sapiens
agcgggcggactccctctggtttccggtcaggtcggtcggtccccactatgggcctggagctgtacctggacctgctgtcccagccctgccgcgctgtttacatctttgccaagaagaacgacattcccttcgagctgcgcatcgtggatctgattaaaggtcagcacttaagcgatgcctttgcccaggtgaaccccctcaagaaggtgccagccttgaaggacggggacttcaccttgacggagagtgtggccatcctgctctacctgacgcgcaaatataaggtccctgactactggtaccctcaggacctgcaggcccgtgcccgtgtggatgagtacctggcatggcagcacacgactctgcggagaagctgcctccgggccttgtggcataaggtgatgttccctgttttcctgggtgagccagtatctccccagacactggcagccaccctggcagagttggatgtgaccctgcagttgctcgaggacaagttcctccagaacaaggccttccttactggtcctcacatctccttagctgacctcgtagccatcacggagctgatgcatcccgtgggtgctggctgccaagtcttcgaaggccgacccaagctggccacatgccggcagccgcgtggaggcagcagtggggggaggacctcttccagggaggcccatgaggtcattcctgaaggccaaggacttcccacctgcaggacccaacataaaagcaaaaactgatgccctgggtgctggccatgatccgggggagctgggaaaacctccccctgcaccgtcctcagcacgtccacaaagcattttcattttctaccgggcccatgggacgccaggtcccggaaaggcaggaaccggccttgcctcaggaacttggcccaaagccccccgagaaccctgatccttcccggaaggaactcatt

SEQ ID NO: 361426 - DNA, 870 bp, Homo Sapiens
  misc_feature (25)..(25): n is a, c, g, or t
cgggggccagtttccacccaccctnccggtggcaagtagtcggaacgcttgtcccacatggatgtaaaagaagtgctgctcgtgataaacggccttgaggagacgcttcagctggcggatggcgcgcccgtgaaccaccagcatgtagcagattcgcacccgggggcccatccatgggccttgctgggccttggctctcatcccactggattgccgggcctcatcttccccagtcagctgacaagtgccggggcacagccttgggcatgaggctcccagcctggtgcaggcacaccacattggcgatctcctgctggcactgcttggtgctggcccgggccagtgcagacagtgcgtccttgcccacgatctcgcacttgggggtgaagccattgtccgtgggctggggggcgccctccacgctccctgtatctccgtgtggtgggaagccagctgcccctaccagcgcctccccagctgctgccccactcaggttctggcggcctggggcttccggaggtggggcaggtgggacccgccggctggctctctgccggctggttactgcccgtaccaccttggccacgggcactcctgggctctcagcacggccccgccagcgcccatgccttctgcctgtgctgccccgtcgccctgctgaactgtctgtgtccttggaaccttcgccagggtccagtggccgtggcttcctctgccttcctttctcgcccgcctcgtcctcctccaggccgctgaagctccacactaccaggccctgcagcagcaggatggccagcgccgtggcaatcgccagcttgtagcgccgcaccagcttctgcactcgcgcgctcgccaccatcttcctccgct

SEQ ID NO: 361427 - DNA, 1123 bp, Homo Sapiens
  misc_feature (114)..(186): n is a, c, g, or t
  misc_feature (223)..(223): n is a, c, g, or t
  misc_feature (285)..(311): n is a, c, g, or t
cggggatatcgggttctggggccggccccgcggggccctagggttccacggaaaagggtgggaggggcctgttaatatgggggaccccttaaagaatttgccccaacccttgcnnnnnnnnnnnnnnnnnnnnnnnnnnnnnnnnnnnnnnnnnnnnnnnnnnnnnnnnnnnnnnnnnnnnnnnnngtttgccggctggcgtgcccaggggccttctgccttntggcgtctcccccgccccaatgtttcaacaaagtccccctttcttcctcccgcttcggtttnnnnnnnnnnnnnnnnnnnnnnnnnnnacaccacctcctgcacctcagcccggatcctcagttggctcagcagtgcccgcagccgcccctcggccgccccaggcgcctcccgaggccccaggcacaggaagatccggagccgggcgctatgccaagcgggcaccatgcccaagatggttgccatctgcagcaggaagaggccgcagacatccacatagccgggcccaccccgggccgcagcaggttgaggggccacacgtccacatggtgcagctgagaggtgcccccagacccccggctcagccgctcagggggcaaggccccgctggcccgggccagcaccacattcttgttcatcttgagggcgtcggccaccgtggccacatagtcctggggattgagggcccgggggctcccaggagcccggggaggagggaacagggtgctcagagctggggaactgccctccctggtgctgtctgcaggctcagagaaagccgggtccgtcaggaaatggtcctgcggtggagcgtcatcgtagaaacctaggaccaacgtgttgggcttcatgccaccgaggccggagattcgcagcagatgctgagccccctggcgcacggagggtgagagggttagatccacaaaagccttcacctgggcacggtccaccaggcatgagccatgccaccatactgcggctgtacagggtccgagggcagggagtcgaggtctcccagggtgacgtggcccagcacatacagcccccccttcctaagctggttggccaacccggacgcgtggtcgacgatatcccgggacttccggaccggtaccagccg

SEQ ID NO: 361428 - DNA, 1680 bp, Homo Sapiens
  misc_feature (1353)..(1361): n is a, c, g, or t
  misc_feature (1445)..(1514): n is a, c, g, or t
tttccgccatggcctcagtcctgggggcctctccaatgggagccgtgaggaatgctactggggccacgtcttctgggaccaggacctctggatgttcccgagtatcctgatgttccacccagaagccgccagggccatcctggagtaccgcatccgcacgctggacggggccctggagaacgcccagaacctgggctaccagggagccaagtttgcctgggagagtgcagactccggcctagaggtttgccctgaggacatttacggagtccaggaggtccacgtcaacggggccgtggtgttggccttcgagctgtactaccataccacccaggacctgcagctatttcgagaggctggtggctgggacgtggtcagggctgtggccgagttttggtgcagtcgtgttgagtggagccccagggaggaaaagtaccacctgaggggagtcatgtcccccgacgagtaccattcaggggtcaacaactctgtgtacaccaacgtcctggtccagaacagcctgcgctttgctgctgccctggcccaggacctgggtcttcccatccccagccagtggctggcggtgactgacaagatcaaggtaccctttgacgtggagcagaacttccacccggagttcgatgggtatgagcctggagaggtggtgaagcaggcagacgtcgtgctcctgggatacccagtccccttctccctgagtcctgatgttcgcaggaaaaatctggagatttacgaggctgtgacgtccccccagggccccgccatgacctggagcatgtttgctgtgggctggatggagctgaaggacgcagtgcgggcccggggcctcctggacaggagctttgccaacatggctgaacccttcaaggtgtggacggagaatgcagacgggtcaggcgctgtgaacttcctgacaggcatggggggcttcctgcaggcggtggtcttcgggtgcacggggttcagggtcacccgagcgggtgtgacctttgaccctgtgtgtctgtcggggatctccagagtgagcgtctccggcatcttctaccaggggaacaagctcaacttctctttttccgaggactccgtgaccgtggaggtcacagctcgagcagggccctgggctcctcacctggaggctgagctgtggccatcccagtcccggctctccctgttgccaggacacaaggtctcctttccccgctcggctggccggatacaaatgtcacccccgaagctgcctggaagttccagctccgagttccctgggaggactttttcagatgttagggacccgctccagagcccccctctgggtcacccctggggttcctccannnnnnnnngagtcaactccacgcggggaccctggcctctggaataatcccggcaacggtgggttttcagaaacgggtctctttggggccttnnnnnnnnnnnnnnnnnnnnnnnnnnnnnnnnnnnnnnnnnnnnnnnnnnnnnnnnnnnnnnnnnnnnnntggcggcctggcgttctccggggcaaggtccttgtcgccccttggcatccccggttacgacgcccctccttgctcgtcattcccgcccccgccctccgagcgccgtccgctgtggcaccggcgctcccttctcctggcccctgccccctactagcgcgctctggct

SEQ ID NO: 361429 - DNA, 1249 bp, Homo Sapiens
  misc_feature (17)..(17): n is a, c, g, or t
  misc_feature (1109)..(1109): n is a, c, g, or t
  misc_feature (1238)..(1238): n is a, c, g, or t
ggctggtaccggtccgngaaattcgggatcggcgccagcggctccgagtttccgaagggccaggtcgcagggctcctggagctgcaggcggcgggaggggctacaaatgcttgactcagtgatgcagaacctttcagagttagctggaagccacagccctgcctcttgatgcagcctggatccagccggtgtgaagaggagaccccttccctcttgtggggtttggatcctgtgtttctagcctttgcaaaactctacatcagggatatcctggacatgaaggagtcccgccaggtgccaggtgtatttttgtacaatggacatccaataaaacaggtagatgtcttgggaactgtcattggagtgagagaaagagatgctttctacagttatggagtggatgacagcactggagttataaactgcatctgctggaaaaagttgaatactgagtctgtatcagctgctccaagtgcagcaagagagctcagcttaacctcacaacttaagaagctacaagagaccattgagcagaaaacaaagatagagatcggggacacgatccgagtcagaggcagtatccgcacatacagagaagagcgagagattcatgccaccgcttactataaagtggacgacccagtgtggaacattcaaattgcaaggatgcttgagctgcccactatctacaggaaagtttatgaccagccttttcacagctcagccctagagaaagaagaggcactaagcaatccaggcgccctggacctccccagtctcacgagtttgctgagtgaaaaagccaaagaattcctcatggagaacagagtgcagagcttttaccagcaggagctggaaatggtggagtctttgctgtcccttgccaatcagcctgtgattcacagtgcctgctccgaccaagtgaactttaagaaggacaccacttccaaggcaattcatagtatatttaagaatgctatacaactgctgcaggaaaaaggacttgttttccagaaagatgatggttttgataacctatactatgtaaccagagaagacaaagacctgcacagaaagatccaccggatcattcagcaggactgccaganaccaaatcacatgggagaagggctgtcacttccctgcacatctttggccctggtgctcgccctggagcattccgcccgggggcccctgaagcgagggctggtggcttgcaagcaaggtttctggggagnctcccttggaa

SEQ ID NO: 361430 - DNA, 1445 bp, Homo Sapiens; identical to SEQ ID NO: 262455
  misc_feature (965)..(965): n is a, c, g, or t
  misc_feature (971)..(971): n is a, c, g, or t

SEQ ID NO: 361431 - DNA, 1155 bp, Homo Sapiens
actgcttgttccggcagtggaagagacgcgccggcgttggccgctgctgcactttaccgcggctgtccccgccgggcacaacaagtggtccaaagtcaggcacatcaagggtccgaaggacgtcgaaaggagtcgcatcttctccaaactctgtttgaacatccgcctggcagtgaaagaaggaggccccaaccctgagcacaacagcaacctggccaatatcttagaggtgtgtcgcagcaaacatatgcccaagtcaacgattgagacagcactgaaaatggagaaatccaaggacacttatttgctgtatgagggtcgaggccctggtggctcttctctgctcatcgaggcattatctaacagtagccacaagtgccaagcagacattagacatatcctgaataagaatggaggagtgatggctgtaggagctcgtcactcttttgacaaaaagggggtgattgtggttgaagtggaggacagagagaagaaggctgtgaacctagagcgtgccctggagatggcaatcgaagcaggagctgaggatgtcaaggaaactgaagatgaagaagaaaggaacgtttttaaatttatttgtgatgcctcttcactgcaccaagtgaggaagaagctggactccctgggcctgtgttctgtgtcctgtgcactagagttcatccccaactcaaaggtgcagctggctgagcccgacctggaacaggccgcacatctcattcaggctctcagcaaccacgaggatgtgattcacgtctatgataacattgaataaccaggctacatgtgcccccgggttccttcctagaaatgtggcagcccattccagcacacaggcttctgcagcaatctctgagggtaaagccggtgggaggctcagcaggccaggaggcccaaggacaggacttgcgaccttgaagccaaaggaatctcacttgtggggcctccttgtcagctctgctgctgtctcagagccatctggatgagtgtcccgacaccctctcggatgcagggcaggaccacccagctggtcagactctgatgttgggtagctggcctctgtggggattgtaagtgccctgaggcgctctgtactagaaactgctcttaataataacggtgattattggttgctgc

SEQ ID NO: 361432 - DNA, 732 bp, Homo Sapiens
tcggctaggtacgaggcctgggtgttgaatcggcacgaggcggggacagtgtagggtcattagctgttgagccgccccgggcgggcccaagcctttggatctcaggtgaccggcacaggcggccgcggggtccggaactgcttgttccggcagtggaagagacgcgccggcgttggccgctgctgctagcagcttgaaccccagggtcgggaccgatgtcggcttgggctgctgccagcctaagcagggccgctgcccgatgcttgctggcacgaggccccggggtcagggcggctcctccgcgcgaccccgggccctcccaccccgagcccctggggctgcggtgccgctccgggcaggacgctgcactttaccgcggctgtccccgccgggcacaacaagtggtccaaagtcaggcacatcaagggtccgaaggacgtcgaaaggagtcgcatcttctccaaactctgtttgaacatccgcctggcagtgaaagaaggaggccccaaccctgagcacaacagcaacctggccaatatcttagaggtgtgtcgcagcaaacatatgcccaagtcaacgattgagacagcactgaaaatggagaaatccaaggacacttatttgctgtatgagggtcgaggccctgatggctcttctctgctcatcgaagcattatataacagttaccacaagtggcaagcagacatgagacatatgctgaataagactgga

SEQ ID NO: 361433 - DNA, 2052 bp, Homo Sapiens
cggctggaccggtccggaattcttcggatgggacgccgccggggacacattgcagcccgcagaggacagcgaccacggtgggaagcctcccctcccagcggagaagccggctccagggcctgggctgccgcccgagcctcgcgagcagagggacgtggagcgagcgggtggaaaccaggcggccagccagctggaggaagctggcagggcggagatgctggaccacgccgtcctgcttcaggtgatcaaagaacagcaggtgcagcaaaagcgcttgctggaccagcaggagaagctgctggcggtgatcgaggagcagcacaaggagatccaccagcagaggcaggaggacgaggaggataaacccaggcaggtggaggtgcatcaagagcccggggcagcggtgcccagaggccaggaggcccctgaaggcaaggccagggagacggtggagaatctgcctcccctgcctttggaccctgtcctcagagctcctgggggccgccctgctccatcccaggaccttaaccagcgctccctggagcactctgaggggcctgtgggcagagaccctgctggccctcctgacggcggccctgacacagagcctcgggcagcccagggcaagctgagagatggccagaaagatgccgcccccaggcagctggcactgtgaaggagctccccaagggcccggagcaggtgcccgtgccagaccccgccaggaagccgggggcccagaggagcgcctcgcagaggaattccctgggcaaagtcaggacgttactggcggttcccaagacaggaaaaaacctgggaaggaggtggcagccactggcaccagcattctgaaggaagccaactggctcgtggcagggccaggagcagagacgggggaccctcgcatgaagcccaagcaagtgagccgagacctgggccttgcagcggacctgcccggtggggcggaaggagcagctgcacagccccaggctgtgttacgccagccggaactgcgggtcatctctgatggcgagcagggtggacagcagggccaccggctggaccatggcggtcacctggagatgagaaaggcccgcgggggggaccatgtgcctgtgtcccacgagcagccgagaggcggggaggacgctgctgtccaggagcccaggcagaggccagagccagagctggggctcaaacgagctgtcccggggggccagaggccggacaatgccaagcccaaccgggacctgaaactgcaggctggctccgacctccggaggcgacggcgggaccttggccctcatgcagagggtcagctggccccgagggatggggtcattggccttaaccccctgcctgatgtccaggtgaacgacctccgtggcgccctggatgcccagctccgccaggctgcggggggagctctgcaggtggtccacagccggcagcttagacaggcgcctgggcctccagaggagtcctagcacctgctggccatgagggccacgccagccactgcccctcctcggccagcagcaggtctgtctcagccgcatcccagccaaactctggaggtcacactcgccttctccccagggtttcatgtctgaggccctcaccaagtgtgagtgacagtatacaagattcactgtggcatcgtttccagaatgttcttgctgtcgttctgttgcagctcttagtctgaggtcctctgacctctagatctgagctcactccagcctgtgaggagaaacggcctccgctgcgagctggctggtgcactcccaggctcaggctggggagctgctgcgtctgtggtccaggcctcctgctcctgcccagggagcacgcagtggtcttcggggttgagctcggccgtgcgtggaggtgcgcatggctgctcatggtcccaacacaggctactgtgagagccagcatccaaccccacgcttgcagtgactcagaatgataattattatgactgtttatcgatgcttcccacagtgtggtagaaagtcttgaataaacacttttgccttcacccagaaa

SEQ ID NO: 361434 - DNA, 842 bp, Homo Sapiens
aaagatggtaaggtcggtttcaaacactcttccactgaggtactgctgtctgtcacaggagaacaatatggtcgacctatcagtgggcaaaaagaggtgcatggcatggcccagccaagtcagaacaactactggaaagccatggaaggcatcttcatgaagcccagtgagttgttgaaggcagaagcccaccatgcagagctgtgaatctagaggctctgagccactgttaacgcacaatgttcacagacatctgttgctgcctcaccttgggatccctgccacaagttccttgggcagtggccatgtcaccattgagatgaagatatacaacagaaaatagtggctgtgtttggaagcttcagccctgcacatttgaactagtcactctcccagacttgcgtgggtcagttctttctgagtagaggacttgctggtaaaggggcagatgctttttattagtactgataaaacaaactgagggaaacatccctcttagctgggaaacttttactcttcaggagcttggcatcatggactgttaatgtatgtgattttccccctattttctctctccaaaatgataaaaacaataattttattatgagtcactgtgttgttattaattaggtgtgctatttcattagctgcttaatcctttgagtcctaagactctttggagacgctatgaagctccaatgtgggcccttttaagagcttttcttgcatacaaaccttttctccctctactttgacttctctccaggcatctcatctttaatagatctttgactaattatagctaaaaactctcagagaatacagcataataaatagccaaa

SEQ ID NO: 361435 - DNA, 1328 bp, Homo Sapiens
aaaaaattaatggtttttatccattttgggagagagaaaaatagggggagaaaatccccattccattaaccagtcccatgatgccaaagctcctgaaagaggtaaaaagtttcccccagctaaagaggggatgtttcccttcagtttgttttatcagtactaataaaaagccatctgcccctttacccagcaagtcctctactcagaaagaactgacccacgcaagtctgggagagtgactagttcaaatgtgcagggctgaagcttccaaacacagccactattttctgttgtatatcttcatctcaatggtgacatggccactgcccaaggaacttgtggcagggatcccaaggtgaggcagcaacagatgtctgtgaacattgtgcgttaacagtggctcagagcctctagattcacagctctgcatggtgggcttctgccttcaacaactcactgggcttcatgaagatgccttccatggctttccagtagttgttctgacttggctgggccatgccatgcacctctttttgcccactgataggtcgaccatattgttctcctgtgacagacagcagtacctcagtggaagagtgtttgaaccgcacctcaccatctctcacccagtagggtccattacagagcactgtccagtcatccagataatcaccttcaccttcctcaccaaaagcactcacttcctggtttccagaaagaggtgaagtgaagtggtgactatggaggtttcggccagtgttgacatgtgtcagccggatgggctggccacacttgatgggggttcccctctcacacactgtggcactcttcccccgtatcctccagtaactgttgctgtcatccacagaggttacacctgtcactgactgctgcccactacctgacccatagcgcacgtcgtgtgagtgcagtcggacgttgtggcgcgtattgagtagcttcaccacggagccgcaagtaacgacacccaggctggacgctcccacagcgctccacaaaccccccaacaacagcagaggtactacagccatcctaactgtatcgcggagccccaaatcttcgaagaaaactcggcccctccccggaaccggaagctaatggcgaaaccacggagagaaggaagtgaagaagcccgagtctgatctttatggtttatttgactagagcggcctgagaaaccggctgagcctggttacttacgatactctcgctctgttccaggggctcagtgacagctgccttcctgagccgcttcggttacctttcgcacccacgagacgaaagcttccgagagcgggagagagaac

SEQ ID NO: 361436 - DNA, 500 bp, Homo Sapiens
actgacgtactgctgtctgtcacaggagaacagtacggacgacccataagtggacaaaaagaggtacatggtatggcccagccaagtcagaacaactactggaaggccatggaaggcatcttcatgaagcccagtgagttgctgagggcagaggtcccatcatgcagagctgtgactctaaatactctgagcccactgtcgccacacagtgtttgtagacatctgctgctgctttactgcgggatccctgctccaggtcctctgagcgtgctgccttgggacctgcagcccttcacactttgaatttggttgctctcccaggctttagtcagttctcttcggggaaaaggactcacttcgtctgtgaaggtggagatagctttcttcatgctggtaaaagaagttgaggagcttgcctgtcttagctgggaagtgtaactccgcaggaactgggcatcatggattcttaatttgtgatttctcctgttttgtctttctcc

SEQ ID NO: 361437 - DNA, 1259 bp, Homo Sapiens
gtgcgaggcctgggtggcgaattcggcacgagggcggcctgggcggccgcaccatggactcgggaaccgaggagtacgagctcaacggcggcctgcctccgggcacacccggctccccggacgcctcgccggcccgctggggctggaggcacgggcccatcaacgtgaaccattacgccagcaagaagagcgcagccgagagcatgctggacatcgcgctgctgatggccaacgcgtcccagctgaaggccgtcgtggaacagggccccagcttcgccttctatgtgcccctggtggtcctcatctccatctcccttgtgctgcagatcggcgtgggggtgctgctcatcttccttgtcaagtacgaccttaacaacccggacaagcacgccaagctggacttcctcaacaacctggccacgggcctggtgttcatcatcgtggtagtcaacatcttcatcacggccttcggggtccagaagcccttgatggacatggcaccccagcagtaggacacccaggaccctggatgctgcctgccctgcaactcagctgcccgaccccaggagtcgccatacctgtgaggtgtccacctccctgcacatggcactacccagactgccagagcccaggctggcctcatctgcaccatgtccccggaccagcccttgctctgactgcggccaagcaccacgcaggaggccactcttgtctctcagcagctgttcccaggaggcagctccctcctggcacatggggggctggccacaatagcccagagggtcagaactggacagctgcagagacctgtgcccagagaagggtctcgacccactcaaggacacacagcaggtccgtggatgggctggatgagtgaccagggccagcctctgtctcaggacattccagaaggacaaggagatgtctctccctctcccaaagcaccagcgtccctgcctcccgtgggccctgtccgggttgccctggtgaccccagcctctgtccacttcctaacccagggaccctgcacagccagaactgcctttggccctacggatggccactggctctggtctaaagtgcctgggcttggtggccatcaagagggagccagtcaggcctgtgagggccgtagaccttgtatataccctgcaccagcagtgaccgggcagagcccaaccccctccacgggggtcccagcacccacttttctaatcatgaatgaacaataaagcccacgctctttgtcaggcaaaaaa

SEQ ID NO: 361438 - DNA, 3514 bp, Homo Sapiens
  misc_feature (3429)..(3440): n is a, c, g, or t
ccggggtgtcagtgtggaggagactgagtattctaccttgtaaatactgttatttgtatatactgtaaatgatgacatcggtgggcactaaccgagcccggggaaactgggaacaacctcaaaaccaaaaccagacacagcacaagcagcggccacaggccactgcagaacaaattagacttgcacagatgatttcggaccataatgatgctgactttgaggagaaggtgaaacaattgattgatattacaggcaagaaccaggatgaatgtgtgattgctttgcatgactgcaatggagatgtcaacagagctatcaatgttcttctggaaggaaacccagacacgcattcctgggagatggtcgggaagaagaagggagtctcaggccagaaggatggtggccagacggaatccaatgaggaaggcaaagaaaatcgagaccgggacagagactatagtcggcgacgtggtgggccaccaagacgggggagaggtgccagccgtggacgagagtttcgaggtcaggaaaatggattggatggcaccaagagtggagggccttctggaagaggaacagaaagaggcagaaggggccgtggccgaggcagaggtggctctggtaggcgaggaggaaggttttctgctcaaggaatgggaacctttaacccagctgattatgcagagccagccaatactgatgataactatggcaatagcagcggcaatacgtggaacaacactggccactttgaaccagatgatgggacgagtgcatggaggactgcaacagaggagtgggggactgaagattggaatgaagatctttctgagaccaagatcttcactgcctctaatgtgtcttcagtgcctctgcctgcggagaatgtgacaatcactgctggtcagagaattgaccttgctgttctgctggggaagacaccatctacaatggagaatgattcatctaatctggatccgtctcaggctccttctctggcccagcctctggtgttcagtaattcgaagcagactgccatatcacagcctgcttcagggaacacattttctcatcacagtatggtgagcatgttagggaaaggatttggtgatgtcggtgaagctaaaggcggcagtactacaggctcccagttcttggagcaattcaagactgcccaagccctggctcagttggcagctcagcattctcagtctggaagcaccaccacctcctcttgggacatgggctcgacgacacaatccccatcactggtgcagtatgatttgaagaacccaagtgattcagcagtgcacagcccctttacaaagcgccaggcttttaccccatcttcaaccatgatggaggtgttccttcaggagaagtcacctgcagtggctacctccacagctgcacctccacctccgtcttctcctctgccaagcaaatccacatcggctccacagatgtcgcctggatcttcagacaaccagtcctctagccctcagccggctcagcagaaactgaaacagcagaagaaaaaagcctccttgacttctaagattcctgctctggctgtggagatgcctggctcagcagatatctcagggctaaacctgcagtttggggcattgcagtttgggtcagagcctgtcctttctgattatgagtccacccccaccacgagcgcctctttcaagccaggctccaagtagcctgtataccagcacggccagtgaatcatcctctacaatttcatctaaccaggagtcaggaagtctggttatcagagcggcccaattcagtcgacaacctatacctcccaaaataatgctcagggccctctttatgaacagagatccacacagactcggcggtaccccagctccatctcttcatcaccccaaaaggacctgactcaggcaaagaatggcttcagttctgtgcaggccacgcagttacagaccacacaatctgttgaaggtgctacaggctctgcagtgaaatctgattcaccttccacttctagcatcccccctctcaatgaaacggtatctgcagcttccttactgacgacaaccaatcagcattcatcctccttgggtggcttgagccacagtgaggagattccaaatactaccaccacacaacacagcagcacgttatctacgcagcagaataccctttcatcatcaacatcttctgggcgcacttcgacatccactcttttgcacacaagtgtggagagtgaggcgaatctccattcttcctccagcactttttccaccacatccagcacagtctctgcacctcccccagtggtcagtgtctcctccagtctcaatagtggcagtagcctgggcctcagcctaggcagcaactccactgtcacagcctcgactcgaagctcagttgctacgacttcaggaaaagctcctcccaacctccctcctggggtcccgccgttgttgcctaatccgtatattatggctccagggctgttacatgcctacccgccacaagtatatggttatgatgacttgcagatgcttcagacaagatttccattggattactacagcatcccatttcccacacccactactccgctgactgggagggatggtagcctggccagcaacccttattctggtgacctcacaaagttcggccgtggggatgcctcctccccagccccggccacaaccttggcccaaccccaacagaaccagacgcagactcaccataccacgcagcagacattcctgaacccggcgctgcctcctggctacagttacaccagcctgccatactatacaggggtcccgggcctccccagcaccttccagtatgggcctgctgtgttccctgtggctcctacctcttccaagcagcatggtgtgaatgtcagtgtgaatgcatcggccacccctttccaacagccgagtggatatgggtctcatggatacaacactggtgtttcagtcacctccagtaacacgggcgtgccagatatctcgggttctgtgtactccaaaacccagcagtcctttgagaaacaaggttttcattccggtactcctgctgcttccttcaacttgccttcagccctaggaagtgggggccccatcaatccggccacagctgctgcctacccacctgccccctttatgcacattctgaccccccatcagcagccgcattctcagatccttcaccatcacctgcagcaggatggccagacgggcagcgggcaacgtagccagaccagctccatcccgcagaaaccccagaccaacaagtctgcctacaacagctacagctgggggggccaactgaggccctgaacctcttctcccgggtccatcttcctgagagggccttctccgcctggaaaactatgggaaacagcatcaaagagaaaggggaaannnnnnnnnnnnatccaccccatcccacccacaactcgcaccgcagcgcccagccacaccgatactaggattccggtagtgggttc

SEQ ID NO: 361439 - DNA, 1208 bp, Homo Sapiens
  misc_feature (1022)..(1035): n is a, c, g, or t
gcgtagaccttgtctgactgtgctcatggccaggcaggggggacagtgtatgcaagagtaatgtggagtttgtgctaactctagccagcttaattagtgactggataaattgcacaactctcacattcttctgttttttcctccgtggaaatagtactcatgctggggaatgagtgacattgaatctctgctcttttttcccctcttttctaggattactacagcatcccatttcccacacccactactccgctgactgggagggatggtagcctggccagcaacccttattctggtgacctcacaaagttcggccgtggggatgcctcctccccagccccggccacaaccttggcccaaccccaacagaaccagacgcagactcaccataccacgcagcagacattcctgaacccggcgctgcctcctggctacagttacaccagcctgccatactatacaggggtcccgggcctccccagcaccttccagtatgggcctgctgtgttccctgtggctcctacctcttccaagcagcatggtgtgaatgtcagtgtgaatgcatcggccacccctttccaacagccgagtggatatgggtctcatggatacaacactggaagaaaatatccacccccttacaagcatttctggacggctgagagctaatttggcccaaggctgggggctgtgttttgtgtgtgtgtataaatttgcactgaagtcttgtttcagaaaccagaccactgaggagagcctgctgagctgaggccatggcctgcgtggcttggggaaatgagttggtggataccttctgggcttttgaacttgcccctcccccatttccctctcccccatgtgtctgaccctgtcttacccatttcaagttcaagcggtgcagcaccttcgaagcatcaatgcacacacctgctgttgcttttgatttctggaaggcatgtagtttcaacttgtaacaaaaatatttgtagtcttcaataaactgtggtatttctttagctccnnnnnnnnnnnnnnaccgtaaaccaaaccatgttcggcccgcctcggccctccaagaagctttcctaaaccatttcgtttggcggcgcggggcccagatagggtaaatggaacatggcccatagctggtctccctaggggaatccttgggcctggacctaaagggccttggaatttctcccccaatt

SEQ ID NO: 361440 - DNA, 876 bp, Homo Sapiens
gcattcccggtgtcgacttactagctgcaagcctctgcctgccttcctgcgcgccgttccccgctagtcgctgctgctggcgcgcactcgccgggtttttcctcccacggcctcgagatggtggtgaatgtggcacggaggagccgggccttccaacccggtgggcccgagctccgaaaggccccctcggcagtgagaggggcgggagcccgcgggggccgcgcccttctctcgcttcggactgcgcaacgctgcgctctgggctgacaggcggataaaacggtcccatcaagactgagaaaaagcacaccagctattggcacagcgtgggcagtggggcctacaggatgactgacttagtctacagagatcccggcgtacttaagcagatgaagactcttaagatgacagaaggtgatttttctggtgatcgaggacttccggggtaatgacagtgatgaaatgcacgggacctggttgcccccaagtttcctggcagtgtgtgatactgaggaggtgagcttgtttctggagctgtgctttaaggtaaagttgatcagcttaatcctcctgatccctttccccatcggatctgaacactgggtcttggtggtcgtaaaaggaggaaaagtaatagtgaagctggcctaaatgttgtaatctggtatatggcatgtgggctagtttcagacaggtttcaaaagatggttggatctctgaaattgtaaaatgaagtataatcttacgctaaggggacgatgcctgtgaaagctctggaagttgggatagtaattagctggacctatttactggcttttggggagggatctggtcattaccttcctttgcctccttatttaagggggggtggttttt

SEQ ID NO: 361441 - DNA, 995 bp, Homo Sapiens
  misc_feature (34)..(34): n is a, c, g, or t
  misc_feature (49)..(85): n is a, c, g, or t
aggatgtatagatcatatagggcgactgggctcnacgcggtggcggcgnnnnnnnnnnnnnnnnnnnnnnnnnnnnnnnnnnnnnatcaggccaaatcggccgagctcgaattcgtcgagagcggctttctccccgccgcattcccggtgtcgacttactagctgcaagcctctgcctgccttcctgcgcgccgttccccgctagtcgctgctgctggcgcgcactcgccgggtttttcctcccacggcctcgagatggtggtgaatgtggcacggaggagccgggccttccaacccggtgggcccgagctccgaaaggccccctcggcagtgagaggggcgggagcccgcgggggccgcgcccttctctcgcttcggactgcgcaacgctgcgctctgggctgacaggcggataaaacggtcccatcaagactgagaaaaagcacaccagctattggcacagcgtgggcagtggggcctacaggatgactgacttagtctacagagatcccggcgtacttaagcaggtagtaatgatggacagatgaagactcttaagatgacagaaggtgatttttctggtgatcgaggacttccggggtaatgacagtgatgaaatgcaggggacctggttgcccccaagtttcctggcagtgtgtgatactgaggaggtgagcttgtttctggagctgtgctttaaggtaaagttgatcagcttaatcctcctgatccctttcccatcggatctgaacactggtcttggtggtcgtaaaaggaggaacaagtaatagtgaagctggcctaaatgttgtaatctggtatatggcatgtggcgctagtttcagacaggtttcaaagatggttggatctctgaaattgtccaaatgaagtataatcttaggctaaggaaggatgcgtgtgaagatctggaggtggatagtaatagtgaactattatggtttggagggactgcaaagttctggctctaataaggg

SEQ ID NO: 361442 - DNA, 957 bp, Homo Sapiens
  misc_feature (698)..(753): n is a, c, g, or t
  misc_feature (916)..(916): n is a, c, g, or t
aggctccaggcgccggcgccggggccgcggggaggaggcgacttcgctccctgcggcgggcgcggcccgggcgcccgagcctcctcggccttggagagcagcggcggcggcggcaccccgggcgcggcaatactgaacactgcgcagcttgcagaggtctcctggcagccctcattaggaattctgtctggccccgatcagaatactggagacgagaccacgagactgatgagttagccttgggagtcggtaagaaggtgaagccaggggcgaacatgggtcagaaggtcactggagcgatcaagactgtggacatgagggaccccacgtacaggcccctgaagcaggagctccagggtctggattactgcaagcccacccggctggatctgctactggacatgccccctgtgtcctatgatgtccagctgctgcattcatggaacaacaacgaccgatcgctcaatgtctttgtaaaggaggacgacaagctcatctttcaccggcatccggtggcccagagcacggacgctatcaggggcaaagtcgggtatacccgtgggctgcacgtgtggcagatcacgtgggccatgagacagcggggcacacacgccgtggtgggcgggacaatcaggccctacggggcaccgcataggtgcgggggacgcaacggggcgactacgggctcgacccgggcnnnnnnnnnnnnnnnnnnnnnnnnnnnnnnnnnnnnnnnnnnnnnnnnnnnnnnnnacgggagggctgccgtagggcggcgacgcctggcagggtcacaactgacgccaacgccgctccgctctctcgagcgcgcgggccctcgcagccgccacccatagtattacaaacacatcgacaacatgaattgctcacctcagaggcgctccgcgccccgtgntctcgcatggcgtggagacggcccaaacgagagcgcccgga

SEQ ID NO: 361443 - DNA, 1173 bp, Homo Sapiens
cgctgaatggtacgcgctcgccgactggacagcagtctggcttccgcggtcggacttctacacccgcctccagacaggagaggggcacgtaccggcgctacggcttcctgcaggctgcctccggatagtccccgagagcttgttccgaagcaagcaccctgcagccctagcgatccagccctcccctggaccctaggtcacggcaatcaaccccctgctgtggttcccgaaccccaaggcccgatgggtcccgcgggggtcgcggcgaggccagggcgctttttcggcgtctacctgctctactgcctgaacccccggtaccggggccgcgtctacgtggggttcactgtcaacactgctcgtcgggtccagcagcacaatgggggccgcaaaaaaggcggggcctggcggaccagcgggcgagggccctgggagatggtgctcgtcgtgcacggcttcccgtcctccgtggccgcccttcggtttgagtgggcttggcagcacccgcacgcctcgcgccgcctggcgcacgtggggcctcgcctgcgaggagagacagccttcgctttccacctgcgcgtgctggcgcacatgctgcgcgcaccgccctgggctcgcctcccgctcacgctgcgctgggtgcgcccagacctccgccaggacctctgcctcccgccgccgccgcacgtgcctctggccttcgggcctccaccgccccaggccccggccccaaggcgccgcgcaggtccctttgatgacgcggagcctgagccagaccagggggatccaggggcctgctgctccctgtgcgcccagaccatccaggatgaagaggggcccttgtgttgcccccaccctggctgcctgctaagggcccatgtgatctgcctggcagaggagtttcttcaggaagaaccagggcagcttctgcccctagagggccaatgcccttgctgtgagaagtcactgctttggggagacctgatctggctgtgccagatggacactgagaaagaagtagaagactcagaattagaagaggcacactggacagacctgctggagacctgatcctcagtgtccttaccccctcctacctcttttctgtgccacctgctgtgggtccagcaggtttttacttgagtacaataaaaagtctgagtcaagggtgaa

SEQ ID NO: 361444 - DNA, 941 bp, Homo Sapiens
  misc_feature (865)..(897): n is a, c, g, or t
gggtcgtcattccccgcgtgcagctcgtgagggcgtgcccttgtgctcttggcccacgtcgggccttgccttcagctcaggttcccctcctgtgctccgcgtcctctgtctcgtgcattccacccgacctcagcgtgccctccagagccgttatgctggatccctgcgtggattcatcactcctgccgcctgctagctctttccctgagttccgccgcggagatgccccgggcaccgcctccccgtcacgctcctcccctgcgacaggccccgtccccaccacagacgccccgcctctgtcacagtcctggccggtccttctcaacaggcctgtgccccgcggggtccgcctcctctgggacgccttcctcccggcacagaaggcctccccctctcaccagggccctcgcccgctggtccgccaggccccgccttttttgcggcccccattgtgctgctggacccgacgagcagtgttgacagtgaaccccacgtagacgcggccccggtaccgggggttcaggcagtagagcaggtagacgccgaaaaagcgcctggcctcgccgcgacccccgcgggacccatcgggccttggggttcgggaaccacagcagggggttgattgccgtgacctagggtccaggggagggctggatcgctagggctgcagggtgcttgcttcggaacaagctctcggggactatccggaggcagcctgcaggaagccgtagcgccggtacgtgcccctctcctgtctggaggcgggtgtagaagtccgaccgcggaagccagactgctgtccagtcggcgagcgcgtaccactcccgctctcgacgaattcgagctcggccgatttggcctgatnnnnnnnnnnnnnnnnnnnnnnnnnnnnnnnnnatgcgccgccccgcgtgactccagtcccctatatgattatacaa

SEQ ID NO: 361445 - DNA, 1147 bp, Homo Sapiens
gggactcctgagagcagagctggccgcagccatgaccccgcagcttctcctggcccttgtcctctgggccagctgcccgccctgcagtggaaggaaagggcccccagcagctctgacactgccccgggtgcaatgccgagcctctcggtacccgatcgccgtggattgctcctggaccctgccgcctgctccaaactccaccagccccgtgtccttcattgccacgtacaggctcggcatggctgcccggggccacagctggccctgcctgcagcagacgccaacgtccaccagctgcaccatcacggatgtccagctgttctccatggctccctacgtgctcaatgtcaccgccgtccacccctggggctccagcagcagcttcgtgcctttcataacagagcacatcatcaagcccgaccctccagaaggcgtgcgcctaagccccctcgctgagcgccagctacaggtgcagtgggagcctcccgggtcctggcccttcccagagatcttctcactgaagtactggatccgttacaagcgtcagggagctgcgcgcttccaccgggtggggcccattgaagccacgtccttcatcctcaaggctgtgcggccccgagccaggtactacgtccaagtggcggctcaggacctcacagactacggggaactgagtgactggagtctccccgccactgccacaatgagcctgggcaagtagcaagggcttcccgctgcctccagacagcacctgggtcctcgccaccctaagccccgggacacctgttggagggcggatgggatgtgcctagcctgggctggagtccttgctttgctgctgctgagctgccgggcaacctcagatgaccgacttttccctttgagcctcagtttctctagctgagaaatggagatgtactactctctcctttacctttacctttaccacagtgcagggctgactgaactgtcactgtgagatattttttattgtttaattagaaaagaattgttgttgggctgggcgcagtggatcgcacctgtaatcccagtcactgggaagccgacgtgggagggtagcttgaggccaggagctcgaaaccagtccgggccacacagcaagaccccccctctccccgggtaatat

SEQ ID NO: 361446 - DNA, 1362 bp, Homo Sapiens
  misc_feature (1096)..(1096): n is a, c, g, or t
agcgggcggacgcggggcgccagcaggtggcgctggacgcgcaacggacaaggaggcggggcctgcagctggcttggaggctccgcgctctggaggctcaggcgccgcgtggggcccgcacctctgggcagcagcggcagccgagactcacggtcaagctaaggcgaagagtgggtggctgaagccatactattttatagaattaatggaaagcagaaaagacatcacaaaccaagaagaactttggaaaatgaagcctaggagaaatttagaagaagacgattatttgcataaggacacgggagagaccagcatgctaaaaagacctgtgcttttgcatttgcaccaaacagcccatgctgatgaatttgactgcccttcagaacttcagcacacacaggaactctttccacagtggcacttgccaattaaaatagctgctattatagcatctctgacttttctttacactcttctgagggaagtaattcaccctttagcaacttcccatcaacaatatttttataaaattccaatcctggtcatcaacaaagtcttgccaatggtttccatcactctcttggcattggtttacctgccaggtgtgatagcagcaattgtccaacttcataatggaaccaagtataagaagtttccacattggttggataagtggatgttaacaagaaagcagtttgggcttctcagtttcttttttgctgtactgcatgcaatttatagtctgtcttacccaatgaggcgatcctacagatacaagttgctaaactggggcatatcaacaggtccaacaaaattaagaagatgcctggattgagcatgatgttggagaatggagatttatgtgtctctgggaattgtgggactggcaatactggctctgttggctgtgacatctattccatctgtgagtgactctttgacatggagagaatttcactatattcaggtacatggtaggatcaacttcctgaccttgtgacagatcctgccagtaacatgagaggaaatgagaacgaggctttggagcacagcattggattgctcatgcagaacaccacccagtgccctttccctntgccacaatgaacagccatgctgcaggtgacggctgctctgtcaacatggatccggcagggcagatgagtggatcccccagcggactcatgagagagcaaacaaaaagtccatatgtgttgtgctaatccactgagattgtgttggttgttacggagcctaacctagcctatcccgacacgaggatcagacatgataatcaaatgtgtttataaagtgttggatggaaatattctgacaacattaaaagactctacccaaggaaaa

SEQ ID NO: 361447 - DNA, 1114 bp, Homo Sapiens
aatcagctcggtacccggttgactgtcatcaagtggatcaagaaggaccccgcgacacgcgcacagtacgcggctgagctcctggccgtggtccgcctccccttcatccaccccagctacctgctcaatgtggttgacaatgaagagctgatcaagtcatcagaagcctgccgggacctggtgaacgaggccaaacgctaccatatgctgccccacgcccgccaggagatgcagacgccccgaacccggccgcgcctctctgcaggtgtggctgaggtcatcgtcttggttgggggccgtcagatggtggggatgacccagcgctcgctggtggccgtcacctgctggaacccgcagaacaacaagtggtaccccttggcctcgctgcccttctatgaccgcgagttcttcagtgtagtgagtgcaggggacaacatctacctctcaggtgggatggaatcaggggtgacgctggctgatgtctggtgctacatgtccctgcttgataactggaacctcgtctccagaatgacagtcccccgctgtcggcacaatagcctcgtctacgatgggaagatttacaccctcgggggacttggcgtggcaggcaacgtggaccatgtggagaggtaatgaggccacggtcaggacaggggcatgctctttgctcaccaagaactgaaatcacgtcactcactgtacctcccaacacccactcagtggcgatggagcagagcctggaccattcatatgggcagtcatcccaggctcttcagtcacagcaccgggggcagcagggtgtgggatacaagcagatgggatgacatctgtgtcacctttgcagtcgctgagatgggagatggggcgcttctgtcgcgacaacccatttaggtgtcagacaagctggaggcccaagatccagttgcagaaggcctgggatgagccagaccctcctggccaggcagtcagggaacaccctgcaccatgagcaccagcccagaaactgcctggggtttcgggcaaagctggaaacaatgtttaaaatgcaaggtcatgccagggggcggtgccttccttggtcctgcccaagcgggggggtccccacaccaagggc

SEQ ID NO: 361448 - DNA, 1045 bp, Homo Sapiens
tcaggggtatggagatgaccactccgttgccggtgcccacccagagccgtctgcccgcgacaagcagggccgtgatgcgtacgaaggagaaacccagcttgccagtgcctagcatcttgctgacgtagggctcaatgtccacgtcctgtagatgctggtgcgtgtgtgcatggtagagcctcagggtggagtccaggcggatggacacccatacgccatcgccgatccacgccagctgccgcacctggctctcccgccgcgtgtgggcgtcaaatgacttctctatctgcatggtcttgggctggatgacgtgcaccttgttcttgtagccacaccacacgcggtcgtacacaacagccatgcagcggatggagtggtgcgggtggcccaggtccattaggtgatagttgctcagatcccactggccatcttcaccacggtggaagatggccagggtcccgtccgccagagccaccagcacacggcctttgacatgcaccaggctcagcacagaatccttcagcttgatggagtgcaggcacttcttccagttggccacagccgagtgcacatagagccagccgttctgggctcccagccacatggtgggtgcagcactgctgcctgctcccgtggggtccccgctgggctctggctctggccgtgtgctgctgctgtcaggctctggcccgttctcgctgccaggctgggggccagaggacggggtcggggctgggtcagtaaagacgtgctctgtgagaggcccgggccgcaatgtggctgtctctggctcgctgggcccagggtctggcacctccgtggcctctgtggcctcctctgtggactgggacgggttgaccttcccgttggcgatggtggccacctccccctgccccttgtctagcactggggtgtcccctcgggaggagcagttgctccgcggcacgttgcagcgggtggcacagcccaccagggtgataccggccagcacgccatctgcgcccgggtcctctgggttcacgtcgatcccgggaattccggaccg

SEQ ID NO: 361449 - DNA, 2260 bp, Homo Sapiens
  misc_feature (2127)..(2138): n is a, c, g, or t
gaattcccgggatgcaaggccccagcgaacgggggtggtgtttcatagggtaaaaggaactgcccattctgagaccatcctaaactccatgcacaagtaccagccgcgcttccacatagtgcgagccaacgacatcctgaagctgccttacagcaccttccgcacctacgtgttcccggagaccgacttcatcgccgtcactgcctaccagaatcgacaagatcacacagctgaagatcgacaacaacccgtttgccaagggcttccgggacaccgggaacggccggcgggagaaaaggaagcagctgacgctgccgtctctacgcttgtacgaggagcactgcaaacccgagcgcgatggcgcggagtcagacgcctcgtcgtgcgaccctccccccgcgcgggaaccacccacctccccgggcgcagcgcccagtccgctgcgcctgcaccgggcccgagctgaggagaagccgtgcgccgcggacagcgaccccgagcctgagcggttgagccaggagcgtgcggcggcgccgctaggccgcagcccggctccagacagcgccagacccactcgcttgaccgaacccgaacgcgcccgggagcggcgtagtccccagaggggcaaggagccggccgagaccggcggggaaggcccgtttcggcctgaggagcctggacaacgagcgcgcccaagctcggaggaaggacgaggggcgcaaggaggcggccgagggcaaggagcagggcctggcgccgctggtggtgcagacagacagtgcgtcccccctgggcgccggacacctgcccggcctggccttttccagccacttgcacgggcagcagttctttgggccgctgggagccggcacgagccgctcttcctgcaccctggacagttcaccatgggccctggcgccttctccgccatgggcatgggtcacctactggcctcggtggcaggcggcggcaacggcggaggtggcgggcctgggaccgccgcggggctggacgcaggcgggctgggtcccgcggccagcgcagcaagcaccgccgcgcccttcccgttccacctctcccagcacatgctggcatctcagggaattccaatgcccactttcggaggcctcttcccctacccctacacctacatgagcagcagcagccgcagccgcctcggctttgcccgccactagtgctgcagctgccgccgccgcagccgccggctccctctcccggagtcccttcctgggcagtgcccggccccgactgcgtttcagcccctatcagatcccggtcaccatcccgcctagcactagcctcctcaccaccgggctggcctctgagggctccaaggccgctggtggaaacagccgggagcctagccccctgcccgagctggctctccgcaaagtaggggccccatcccgcggtgccctgtcgcccagtggctcggccaaggaggcggccaatgaactgcagagcatccagagactggtgagtgggctggagagccagcgagccctctccccaggccgggagtcgcccaagtgaggggctgcccagctgctcccctgccacgcaggccacccgggctgcctgcccctgctgcttgggacgtgtacagcacagaatgagtatttatttaaataaaggagaaaagtgggctgcagcagcccggaatagagcctcgtcctggcaagtcggggcctgggacacttccctgggcctcaacaaggatcaggctgctggaaacacagtcacttgggagctgctgggctaggtccagatccgctccagcgtcaaggtggcatccgaaggtgtctctggtcttccagcgaggtgggagaggcctcatccagggcccagcggtccctgcagaagccagaaggtgcaggggccaggggtgggagcatcggagggagtcccagagccctggaccttgggcctagaccgcgtgataaaactgggttgagggatgctggaaccagttacgactgaagtcagtgtagacctgagctgggagggaacctgttagtctccccacctcttccctgaagagacaggcacccctcccagccgtggtcaacggagggagtggcacttctgccttgagtccccaggggnnnnnnnnnnnngatatttatgaaataaatggtaatttgtgtaaataagctttaaggttcccagaatatgcaaattggtattaatttattcaaaggtgtacattgctgtgtacatatatttagagattaactca

SEQ ID NO: 361450 - DNA, 910 bp, Homo Sapiens
  misc_feature (197)..(197): n is a, c, g, or t
gtttcggtcaaagcgagtgggggctggcccttgtttggaagccgggttggggccctagggggggcccccggcaggttccttcgttcaaccgtccaggttccgggtcgctgttccgcgccgcagacttctcctcagctcgggcccggtgcaggcgcagcggactgggcgctgcgcccggggaggtgggtgttcccccngcggggggagggtcgcacgacgaggcgtctgactccgcgccatcgcgttcgggtttgcagtgctcctcgtacaagcgtagagacggcagcgtcagctgcttccttttctcccgccggccgttcccggtgtcccggaagcccttggcaaacgggttgttgtcgatcttcagctgtgtgatcttgtcattctggtaggcagtgacggcgatgaagtcggtctccgggaacacgtaggtgcggaaggtgctgtaaggcagcttcagggatgtcggttggctcgcactatgtggaagcggcggctggtacttgtgcatggagtctaggatggtgaagccgtgcttgtcagagatgttgttggtcagcttcagcttgtggaaggccacaggcttagccatccactgctcccccgtggctgggctgtctgggtggatgtacatgcgtttgggcatctcagggtcggccttgcccgccaccatccagcgcgagttgtggaacttatagcggcaatcgtcagcggctacaatgtccatcagcaggatatacttggccttcttgtccaggccgctgactcgcaccttgaagggggggaacatccgcctcccggacttggtgatgaccatctccgtgcctagcttgtggaactggtcccacagctccttggcctccagcgtcaccttggggtcgcctcgtgccgaattcgccacccaggcgtc

SEQ ID NO: 361451 - DNA, 981 bp, Homo Sapiens
ggaggtcctccatgcgcagtcatgagtcgcttcaagtttatcggaagctgaagagggaactacccttttcattccgatcaattaatacgagagaaaacctgtatctggtgacagaaactctggagacggtaaaggaggaaaccctgaaaagcgaccggcaatataaattttggagccagatctctcagggccatctcagctataaacacaagagaaggatggtgcttcatcctgtttaggaaagtctttgggttcggaggattccagaaacatgaaggagaagttggaggacatggagagtgtcctcaaggacctgacagaggagaagagaaaagatgtgctaaactccctcgctaagtgcctcggcaaggaggatattcggcaggatctagagcaaagagtatctgaggtcctgatttccggggagctacacatggaggacccagacaagcctctcctaagcagcctttttaatgctgctggggtcttggtagaagcgcgtgcaaaagccattctggacttcctggatgccctgctagagctgtctgaagagcagcagtttgtggctgaggccctggagaaggggacccttcctctgttgaaggaccaggtgaaatctgtcatggagcagaactgggatgagctggccagcagtcctcctgacatggactatgaccctgaggcacgaattctctgtgcgctgtatgttgttgtctctatcctgctggagctggctgaggggcctacctctgtctcttcctaactacaaaagccctttctccccacaagcctctgggttttccctttaccagtctgtcctcactgccatcgccactaccatcctgtcaccagtgggacctctttaaaacaagcagccaaccattctttgatgtatcccattcgctccatgttaacatccaaaaccagcctggatttcatacatggacttctgattaaaagtggcaggttgtgcatgttaaa

SEQ ID NO: 361452 - DNA, 1372 bp, Homo Sapiens
gacatgtgctatgatagacacgtgtcgccgtagttctgctgagagttgttcaatgtactttcgtagccattcgaaactggttggctgggtcagtcgttgttcagtgtcattatatttgggccgtagtacaagtttgtgtttagacttgatgatcctaaggtttggattagttgtaactttctgtgaataaaaaccacctttccttaaagtactaatagcttcttcatctagccatggtttccagaggtttgctactgcattgtacactttactggtgactacaggcagttgatcctgtggccaatagtcatgattacccagcgcagggaaaacctggagatttggaaagagactctggatggtggttgtcatattagtgatcacatttataacagtgtctgttgagagttcaggtacaggaacatgaggtgggctatcccctgtccatatcatgaaagatgcttcttgtccagaatttttaataaaatcaaatgctgacaaaataagttgatatggagaatcacacagaacatctccaaaagggccagggttggaggcatttgcacctttagatgaagcacacacttttgtgtggtcatctgtgatgtggtaagtagggtctaagtgtaagtcagtcacatgccaaaactgtcctatcgccggaggaggattcctgccgcctgcgggcgccacgggcagcccgaggccggagcggcagtgccaggcagtcagcaggcagcagacgagtgcgcgcaccagcgccatggagggccgcggggctgacctggaggttcgggctgtcccgcagctccactcggaccgtcaggcctgagggtgaggcggagacagaagacggctgcgggtgtagacgtccgactgatcacgtgcaaaggcagattccgcagcgagtcagttcgcctgaccttcagctgctgtttagcgatgatctgttctcgtatttcttagcgtcagtgtttggcctaggaaggaatgtacttgtagaagctcaaattccgactcgtgtatcagtggtgcagttgatgtcaaacactgacatactggtgcttggggatagagaaagacattcaatttagtaaaagccagaaggatgggagaacaagatctctcaaatccgtgtgtaaaaaggaaaaagcagggagtttttattctgctagagaataagagagggggattttcaaagaatccagggtgaaacagtctgtttcttcagctctcagataacacctttgagcaattagacgtccaggcatccgcagctggttgcaaagcccttggaggtattcatcccttctgcaaacattttgtgacccctgaagttaacctctttgttcttgacgaggaagcagtaccc

SEQ ID NO: 361453 - DNA, 1221 bp, Homo Sapiens
ctgcaagccacagtggctgccctgtgcgtgctgcgaggtgggggaccctgggcaggaagctggctgagccccaagaccccgggggccatgggcggggatctggtgcttggcctgggggccttgagacgccgaaagcgcttgctggagcaggagaagtctctggccggctgggcactggtgctggcaggaactggcattggactcatggtgctgcatgcagagatgctgtggttcggggggtgctcgtgggcgctctacctgttcctggttaaatgcacgatcagcatttccaccttcttactcctctgcctcatcgtggcctttcatgccaaagaggtccagctgttcatgaccgacaacgggctgcgggactggcgcgtggcgctgaccgggcggcaggcggcgcagatcgtgctggagctggtggtgtgtgggctgcacccggcgcccgtgcggggcccgccgtgcgtgcaggatttaggggcgccgctgacctccccgcagccctggccgggattcctgggccaaggggaagcgctgctgtccctggccatgctgctgcgtctctacctggtgccccgcgccgtgctcctgcgcagcggcgtcctgctcaacgcttcctaccgcagcatcggcgctctcaatcaagtccgcttccgccactggttcgtggccaagctttacatgaacacgcaccctggccgcctgctgctcggcctcacgcttggcctctggctgaccaccgcctgggtgctgtccgtggcccgagaggcaggctgttaatgcccactgggcacctttcagacacaatttgggctgatccccatcacatttcctgaccatcggctatggtgacgtggtgccgggcaccatgtggggcaagatcgtctgcctgtgcactggagtcatgggtgtctgctgcacagccctgctggtggccgtggtggcccggaagctggagtttaacaaggcagagaagcacgtgcacaacttcatgatggatatccagtatacccaagagatgaaggaatccgctgcccgagtgctacaagaaacccgggatgttctacaaacatactccccaggaaggagtctcctggctgcccccaaggcatcaacggcaagcctgctgggcccgccattaaaagcgtttccccccaaatgccgggttgaaacccccggcaaagtttccggggaaacaaatggaaacttccatggggg

SEQ ID NO: 361454 - DNA, 628 bp, Homo Sapiens; identical to SEQ ID NO: 262470

SEQ ID NO: 361455 - DNA, 1661 bp, Homo Sapiens
  misc_feature (1314)..(1354): n is a, c, g, or t
  misc_feature (1598)..(1598): n is a, c, g, or t
  misc_feature (1645)..(1645): n is a, c, g, or t
ctaaggtagcgaggcctgggtggcgaattcggcacgaggctgagagccgcgccggcaccatgtcagcttaccctaagagctacaatccgttcgacgacgacggggaggacgaaggcgcccggccggccccttggagggacgcccgagacctccccgacgggcccgacgcgcccgcggacaggcagcagtacttgcggcaggaggtcctccgcagggctgaggccacggccgccagcaccagcaggtccctggccctcatgtacgagtccgagaaggttggggtcgcctcttccgaggagctcgcccgtcagcgaggagtcctggagcgcacagagaagatggtggacaagatggaccaagatttgaagatcagccagaaacacatcaatagcattaagagcgtgtttggggggctggtcaattacttcaaatccaaaccagtagagaccccacctgaacagaatggcaccctcacctcccagcccaacaacagattgaaagaagctataagtacaagtaaagaacaggaagcaaagtaccaggccagccacccaaaccttagaaagctggatgatacagaccctgtccccagaggggctggttctgccatgagtactgatgcttacccaaagaacccacaccttcgagcctatcaccagaagatcgacagcaacctagatgagctgtccatgggactgggtcgtctgaaggacatagccctggggatgcagacagaaattgaggagcaagatgacattcttgaccggctgacaaccaaagtggacaagttagatgtcaacataaaaagcacagaaagaaaagttcgacaactctgaagacagacggatttccactctattgtgatgaaaagatttgaaagatctttttttgaacttccaagaaatttcatttactattttagtatgtaaattaatgtgtgtttgcaaatgttataatagagtaggtcttaagacatttttgctgttataaggaagtgtttgtcccacattttcctagggttaacacctcaccaagttcttccagcaaaatgcttattagagtttttgtctgagcacagtagcctggccctgcatatcttgggcgtttgattaccatgctggaataagaagagttgcatttctcattttaatgagcatatggaaagatgggaacagaatttcagtcttgcagccatgagcctctatttctcattcctaagccttaccatgagtcagagtgttaagggggcctgtgaaccagtccgtttgggtggaggagggtccttcccacacctttgtttaggagtcatcattnnnnnnnnnnnnnnnnnnnnnnnnnnnnnnnnnnnnnnnnntctctgagcacattatctgtgattctttcatcctcccagaaaggatcagtgttagaatgggaaatagagtgtgccatcttgctcttttgttggcagatgtccccgcttccctccagccccccatccttggcatgtatattagtaggagggcttcacaccagcactgctcactgcgactccgggaaatgtgtggggaattgggtgagcccctcttccccacgtggctcccatctgttaacttttncatctgtgatttggcaacaggtctttccactgggctcgaggctgcgnagggtggaccgacagg

SEQ ID NO: 361456 - DNA, 872 bp, Homo Sapiens
  misc_feature (774)..(774): n is a, c, g, or t
  misc_feature (776)..(776): n is a, c, g, or t
  misc_feature (778)..(778): n is a, c, g, or t
  misc_feature (783)..(783): n is a, c, g, or t
ccatggtctggctgggctcttccccagggctctgtcccgcccctagctccactctccctgagccccagcgagcctgcgaggtgactcgaccctggccctgctctctcctcccgggtctgcagggagacgctcctgcggcttcagctggagaacaagcggctgtgcaggcaggaggcggccgaccgggagcggcaggaggagctgcagcgccacctggaggatgccaaccgcgcgcgccacgggttggagacgcagcaccggctgaaccagcagcagctatccgagctgcgggcccaggtggaggacctgcagaaagccctgcaggagcaggggggcaagactgaagattccattttgctgaaaaggaagctggaggaacatttgcagaagcttcatgaggcagatctggagttgcagaggaagcgggagtacattgaggagctggagccacccactgacagcagcacagcccggcggatcgaggagctgcagcataacttgcagaagaaggacgcggacttgcgggccatggaggagcgataccgccgctacgtggacaaggcccgcatggtcatgcaagaccatggaacccaagcaagcgggccagctgcgggggcacctccagaaatccattccctgaggacacagctccgagaacgggatgtccgcatccgacacctggagatggactttgagaaaaagcgaagtcagcgggagcaggaagaaaagctgctcatcagtgcctggtataatatgggcatggccttgcagcancnanctggnggaggagcggggcgcctgccccatgccccagtcattccctggcacagcagcgggctggcaaccaaattctccgccggtgggaccccttg

SEQ ID NO: 361457 - DNA, 1488 bp, Homo Sapiens
tatggccatgcccggcgggtctcacgcggctgcccctcgcccggcgcccttcggtagggggcgcccggggcccagctggcccggccatgctgctggagacacaggacgcgctgtacgtggcgctggagctggtcatcgccgcgctttcggtggcgggcaacgtgctggtgtgcgccgcggtgggcacggcgaacactctgcagacgcccaccaactacttcctggtgtccctggctgcggccgacgtggccgtggggctcttcgccatcccctttgccatcaccatcagcctgggcttctgcactgacttctacggctgcctcttcctcgcctgcttcgtgctggtgctcacgcagagctccatcttcagccttctggccgtggcagtcgacagatacctggccatctgtgtcccgctcaggtataaaagtttggtcacggggacccgagcaagaggggtcattgctgtcctctgggtccttgcctttggcatcggattgactccattcctggggtggaacagtaaagacagtgccaccaacaactgcacagaaccctgggatggaaccacgaatgaaagctgctgccttgtgaagtgtctctttgagaatgtggtccccatgagctacatggtatatttcaatttctttgggtgtgttctgcccccactgcttataatgctggtgatctacattaagatcttcctggtggcctgcaggcagcttcagcgcactgagctgatggaccactcgaggaccaacctccagcgggagatccatgcagccaagtcactggccatgattgtggggaattttgccctgtgctggttacctgtgcatgctgttaactgtgtcactcttttccagccagctcagggtaaaaataagcccaagtgggcaatgaatatggccattcttctgtcacatgccaattcagttgtcaatcccattgtctatgcttaccggaaccgagacttccgctacacttttcacaaaattatctccaggtatcttctctgccaagcagatgtcaagagtgggaatggtcaggctggggtacagcctgctctcggtgtgggcctatgatctaggctctcgcctcttccaggagaagatacaaatccacaagaaacaaagaggacacggctggttttcattgtgaaagatagctacacctcacaaggaaatggactgcctctcttgagcacttccctggagctaccacgtatctagctaatatgtatgtgtcagtagtaggctccaaggattgacaaatatatttatgatctattcagctgcttttactgtgtggattatgccaacagcttgaatggattctaacagactcttttgtttttaaaagtctgccttgtttatggtggaaaattactgaaactattttactgtgaaacagtgtgaactattataatgcaaatactttttaacttagaggcaatggaaaaataaaagttgactgtactaaaaatgt

SEQ ID NO: 361458 - DNA, 1506 bp, Homo Sapiens
  misc_feature (49)..(109): n is a, c, g, or t
  misc_feature (226)..(274): n is a, c, g, or t
  misc_feature (395)..(505): n is a, c, g, or t
  misc_feature (574)..(630): n is a, c, g, or t
  misc_feature (651)..(666): n is a, c, g, or t
  misc_feature (763)..(771): n is a, c, g, or t
ggggccaggttgtatttaatttttaagggggtttcaaaaattgcccttnnnnnnnnnnnnnnnnnnnnnnnnnnnnnnnnnnnnnnnnnnnnnnnnnnnnnnnnnnnnnacatccaaattccttaattgaacattaggcatctaataaaaagttataaatattctatcacatgggatactatgcccttcatgatttgaaacagctacaaactcattctcatagaannnnnnnnnnnnnnnnnnnnnnnnnnnnnnnnnnnnnnnnnnnnnnnnnatgtgactatttactagtgaaaaggctaaagttaaatttcatttctcaaaaactacaccttcttattagcctaatttcttttacaagtgaagcggtctggccaggtgcggtggctcacacnnnnnnnnnnnnnnnnnnnnnnnnnnnnnnnnnnnnnnnnnnnnnnnnnnnnnnnnnnnnnnnnnnnnnnnnnnnnnnnnnnnnnnnnnnnnnnnnnnnnnnnnnnnnnnntacaggtggcgcgtgcctgcagtcccagctactcaggaggttgagggcacgagaatcccttgaacccannnnnnnnnnnnnnnnnnnnnnnnnnnnnnnnnnnnnnnnnnnnnnnnnnnnnnnnnggggaagactccacctcaggnnnnnnnnnnnnnnnncacaagtgaagaggtctgtttcaagtgggggtggggaagtgtgtgattgaggtatatctcagagagaaaaaagggaattactttctacattgataannnnnnnnnaatgattagggttttacctgaatatgtctgcctaatcaatggaagttactgacagaggactgcaaaatccttcggcaagacaatattttctacactttaacttttcctcaggttcaaacactgcattttcttactcaaagatcttctcaaagtaagatatgaattataatcctgatgacaaaccagagctctttaatccagtgggttttattgctctaccttcatttaatttgatacatatttcccccctctgagcattaggtaagttaataaagcattataaaaataaatttaaaacataaaactaaatgagatctctcaggttcttctttgaacaaagatgtttctgtaaacacttttacaccagtatcttaaaattccaattattcaagtatctctttaaacatatggcttcatatattaataaaaattgaagcaaatatgtgaaatctttaaatcctcatctgtatttccacagaaatcatttacaaagctacttgcctttttaaaagtcttctcaatactctttcttgagaactagaattccaacttgcattactattacttgcactgcaaatctttgagatttctacttgtgtttttaactcctattatttccttaattctcctttccctttacccttttttcctctcccatctttgcatctttgtcacattctgttacaagctcacagttaaaataaacactagggctacccacagactcatttttat

SEQ ID NO: 361459 - DNA, 980 bp, Homo Sapiens
atctggtgcacagatgaacagttcaccactgcctcaagatgcagtgagcagtaatctaaggaaaagtggcctgaaaaagcctgtggttgcttcctcgttaaaaaggcaggcctgtggtcagctgttagatgaggcacaagtgactttatccttccaagactggctggccagtgtcacagaacgcatccatcaaaccatgcactatcagtttgatggcaaaccagaaccattggtgttccacattcctcagtcattttttgatgccctgcaacaaagaatatctataggaagtgcaaaaaaacggctccccaactccaccacagcttttgttcggaaagatgccttgccactgggaaccttttccaagtatacttggcatatcactaatatcctgcaagttaaacaaatcttagataccccagagatgcccttggaaatcacccgtagctttatccagaaccgagatgggacttatgagctatttaaatgccctaaagtggaagtagaaagcatagcagaaacctacggtcgtatagaaaaacaaccagtgctgcgacccttggaactaaaaacttttctcaaagttggcaacacttccccagatcaaaaggagccaacacctttcatcatcgagtggatcccagatatccttccccaatctagattggcgagctgcggatcaagtttgaatatggccccccccggaaatgggcatgtggcgggagtaccaagaaccagcggcccccctttggaaccaaccccttgggaaactgggccccctctgaaccccttattaacttttccccttaaaggccaaaaccaaggataaataaatccctttttggctggccttaaaattttggcacaattcccccaacccccctttgaaacaacctttttaaatgggctcaacttaaagggcacttttagaaatgggcccccctgagtccccctttggggaaaaaaacctggccttcccc

SEQ ID NO: 361460 - DNA, 832 bp, Homo Sapiens
  misc_feature (49)..(49): n is a, c, g, or t
  misc_feature (389)..(440): n is a, c, g, or t
  misc_feature (526)..(612): n is a, c, g, or t
ttattgaattacagttacaagtggaaaaaatgactgacttactgcatgngagaagtattatgtcaacctgttaaaagctatggaaattaaaatgttcatgtatatacaaaatataaatgacatgtaaggtaaaattacagtgatcaatttacaacaaagaaattaacagtagttttccagcttgtttgattaatcaagcaggtttactcttgaatccatagcatttctacaatttaatttggacaaagttctattccagatcagccaggttttaaaactgaaatgtgttaagggtggattgttagcttccccaggattggtgtggatgataaatactttttttaaaaattaattattattgtttataagacatggattccagctgtctnnnnnnnnnnnnnnnnnnnnnnnnnnnnnnnnnnnnnnnnnnnnnnnnnnnntggacttaaacgatcctcctgcatcagcctctgaaatggctgggactacaggtgtgtgccagcatgcctagctaatttttaaacannnnnnnnnnnnnnnnnnnnnnnnnnnnnnnnnnnnnnnnnnnnnnnnnnnnnnnnnnnnnnnnnnnnnnnnnnnnnnnnnnnnnnntagcgggattacaggtgtgagccactgtgtctgacaagaatttatacttaagcataggagatggttctggaaattctaagaaattctgctctcagtaagagtagaggtttggagctttacctcttggcagtatccccttggaagggagctctgagaattaaatgtaatcaacacttattgagagctttctatgaccggcgctacactaacgcctcttgcc

SEQ ID NO: 361461 - DNA, 1080 bp, Homo Sapiens
ggctggtaccgggtccgggaattcccggggatgtaccacgtaaaacctggtgggccagtaaatctcctgacaataaacctgtttggtatggtcttgatatgaacagagggtctcagttcgcttatggagaccaccaatcacctaatacagccattactcagatgacttttttgcgccttttatcaaaagaagcctcccagaacatcacttacatctgtaaaaacagtgtaggatacatggacgatcaagctaagaacctcaaaaaagctgtggttctcaaaggggcaaatgacttagatatcaaagcagagggaaatattagattccggtatatcgttcttcaagacacttgctctaagcggaatggaaatgtgggcaagactgtctttgaatatagaacacagaatgtggcacgcttgcccatcatagatcttgctcctgtggatgttggcggcacagaccaggaattcggcgttgaaattgggccagtttgttttgtgtaaagtaagccaagacacatcgacaatgagcaccaccatcaatgaccaccgccattcacaagaactttgactgtttgaagttgatcctgagactcttgaagtaatggctgatcctgcatcagcattgtatatatggtcttaagtgcctggcctccttatccttcagaatatttattttacttacaatcctcaagttttaattgattttaaatatttttcaatacaacagtttaggtttaagatgaccaatgacaatgaccacctttgcagaaagtaaactgattgaataaataaatctccgttttcttcaatttatttcagtgtaatgaaaaagttgcttagtatttatgaggaaattcttcttcctggcaggtagcttaaagagtggggtatatagagccacaacacatgtttattttgcttggctgcagttgaaaaatagaaattagtgcccttttgtgacctctcattccaagattgtcaattaaaaatgagtttaaaatgtttaacttgtgatcgagacctacatgcatgtcttgatattgtgtaactataatagagactctttaaggagaatctt

SEQ ID NO: 361462 - DNA, 1109 bp, Homo Sapiens
  misc_feature (53)..(53): n is a, c, g, or t
  misc_feature (795)..(795): n is a, c, g, or t
aaccaccccccggaggcccgcgtacactgctggacctcccgctcccagcactntcagggcgctgttcgtactcgcggatgtgtcccagctgtttcagtgccaagtccaccttctgggacgtgcgcttcagacgctcggagtcgctctcccgcttgtccctagcgcgtgccagcagaaagttctccttatgcaccgattcccacgttagcagcttccgctcggcttccttagaaaggtaaacccggaaatgctcgagggccggggaggacggctgggggctccggggtcgcctgcacaattgcctgagcaggaggcgcaagtgggagatgacgataaagggcggggccagcgcgggccgagagtggaattcccggatgaggcggtaacgctgcgccttccagtagagatcgctgttgccctgtactttgccgaatgtgtaactgaacatggcaatgagcaagttgaccagcaggatgttggccacgagcaggaagatgacgaggagcagcaccaccagccagttggcatactgggagacgcaggtgcccgcctgggccccaggagggtgtgcccagaagccgggctccgacgagcagttgctgtgctccatgagggccacgtccatgtcctcctggggaatctgcccgaagatctgcaggtagggacggtagaagacgcggcgcaggatacttgggaagtcactgtcccgtggcctcaggtagtcaccctacgccgtcgcttcatctgactcaataagtgtcttcactagacactcatcagctcgagggaagcaangaaggtatgaaagacacgatccattaatcatctagctttaagacgacaaatcatcgggccacagctatattgtatcgactagtagaagatgagtatcagtagctacctgtgtacaacacatagatatctaccatcacaagaaggcaatgctgcgcccaagctgggataaacaacggaggctcatcgccagctcacgaccaggaggaagcacggtgcgagtccattaggtagtcataggattcagtattcggcgcgctagaggacacaggagctggctaagtgaaacatgggcaggctcggggcatactctagag

SEQ ID NO: 361463 - DNA, 1145 bp, Homo Sapiens
gaaaattattgaaagggccccaggggaaattttatttattttattgaaggttcataaaacccaggatcttaaaccaaaaaggtgtgtggtagggaaaccaagcaggtttccactttcagagactttcattgcaggaacccaagtttcccttatggggaaaaaaagtgattataaataacagttatctgaaaggtggttgagaggattaaatgagatcacctatgcaaacaaatacatgtaggtatgaagacatcgtctggggtgtgaaagtttagttcacaccagaaccttcctttaaggcttaaaaacctcaaacagtatttcattcttaatacaagaaccaatgttaaaagcataaaatccttaattggagtgttcagcccagtttgattatcaaaagcgatttataaaaggcttcaatactgatgatgttaaagcaaccaaaactttgtgatgctcacagaggtttggcttccggggttatggtccaaagtcatttgccttctgagaagattgcagagatgtcagatacttaatttctcaaacaacttggcatcagccttctatgttttctgtctatcatagtctccaaccatcttcttgatgtgtgacaatttgctctttaactgcttgcaatgattcttcttacttttgtaatctgcagatcccttcacttgcttcagtctattgtattcatcagcagcagccatgtactcttcactttcttctctatagtcatccaattctttatccaaacgggagagttctttattgatctcatcaagttctgattgtaagctcttgtattcctgtaggccagtgtcaaaattcctcttgtacagttgtctttgttgatctgaagtgataggtggatattccctgatccagtcctcctccagctcatcacaggactcgccgccagttgtgtagtctgtctcatagtgatcttgctctgttctctttgaccttcctgctcttccctttgcaggtgctctttttgaaggtgtcgcaaagttaccaccgctgctgtaacgaggctgcctgaagtcatccacaggcgaagttaatggaagctcctgaaccacttcaggaccggcgtggatttactaggaagactctggataaaaccgcttgtcattcacttt

SEQ ID NO: 361464 - DNA, 1500 bp, Homo Sapiens
caggagccaagccaggatgcaggcaggccaggttgagggtcacaattcgtgggtgaaggagaggcctcagcctggacggcaagaggtgaggcctggattcagacccccaacccacaccccaggccctgcagggaggggtcaacccaccgtggacagcttctcaatttcctcatccgaggcccccagggacgccagaccaatgtcctgtggagcagggaggatgaaggatgggggagaggcaagccctgggtcaatgctcgaggtgggggcaccgggggtgtcagcagcccctccaggggtctctgggacacttcccgggcggcagagaccttccctggccgcccaggatccgcacctacaccgggcctcctccgccaggcagccctccttgaccatattcgtaagcccgtgggcgccgttcccaggtagccggcaggtggcagcacaggccgtgggaggctccgctccagccccgccctatgccgcgcgaccctcggggcgccgagcctccttggcggggcccgggagcaggcagcacacttcacccacccgcacatcgatccccgcccgcccccggcgccaagccagccctgggtgaccccaggctccctccgaggccgcaggcgtacctgcgagaactgcgcgaaggtgcggtcggccagcatgggcacagtgccccagcagctcagtggcagcagtccggctcaggggagtgcatgggcgaggacgcgtggcggatatactgggtgcactggaacacgcggaaggccaggctggccaggaagtcccgggcggacagcaggccggccacaggccgcagctggaagcccgtgcgctccttcaggaagcaggagacgtcctccaagctggggaatattgtcttcccggtacacactgaagcgctccaagcaaagcaaaggcctccaggtgctcaccgcaggcgtgcgtggcgtagaggcccttcagcgtggtgtagacctccttccaggtggcaatctcctcggcggtgtactccaacacggggaatcgggtccacgtgccttgtactggaaggcgatctcagcaatcagcttcctgcgctggcggtacacctgctccgagaagcccgggtggtcccagtccaggtcagggtcgaacttggtgaccaggtgatgaccacttgtccagctctgacacttttcttgggaaccaggggaccttgggccccgcggggctgcgcacgtcctctgacacctggcgcacaccactgagcagggcggccaggtccccctcggcgcacctcgaggcgcacgaagtactccaggtgggggcccccagctcgcggcctctgggcgggccgggtctctagatggtggattttggcttcaaacgtctcaaacaccttcacagctcgggacagcgccgagggcttggtggcccatgatggcctctgcctgcttggcgtccagctcagacacggccctgcggaagcccttggcctgtggcgtggtggcgtcgggc

SEQ ID NO: 361465 - DNA, 1048 bp, Homo Sapiens
agcggactttctgaagcgcgaggcaggaagttatatgctttttctggagtcctgtagagaaagtgctctctgccgcattgatagcagcgagagctggaggtgttgggtcgggagaccagccgttcgatcccgccgcaggtaggagctggtttccatcctggcaccacggcacacacctccagcctcgagcccggcgctgctgcccgggggtctccttcaggctctttgacgccgttccagggggcacctatccaggcatcctctgggcctctagccagaggactggctcccggcttcagcactccgggctgcagtaagaagtgcccttatcgctctgagccctgccaccatcccgtgaaccaccgaaaccctggtccagcgcgacagccttggacctgggactggacggatccaaaacgctcagcctcggccccccacagacggggctctgcatcgtctctgatatgtcacccaccatctcccacaaggacagcagccggcaacggcggccagggaatttcagtcactctctggatatgaagagcggtcccctgccgccaggcggttgggatgacagtcatttggactcagcgggccgggaaggggacagagaagctcttctgggggataccggcactggcgacttcttaaaagccccacagagcttccgggccgaactaagcagcattttgctactactctttctttacgtgcttcagggtattcccctgggcttggcgggaagcatcccactcattttgcaaagcaaaaatgttagctatacagaccaagctttcttcagttttgtcttttggcccttcagtctcaaattactctgggccccgttggttgatgcggtctacgttaagaacttcggtcgtcgcaaatcttggcttgtcccgacacagtatatactaggactcttcatgatctatttatccactcaggtggaccgttttgcttggaaaataccggatgacaagaacacccgacgtgattgctctcactgtggcgtctttttgtttgaattcttggcgccactcaggac

SEQ ID NO: 361466 - DNA, 1228 bp, Homo Sapiens
gggggggctcataaattcgtaaggggtccaaaggcctttgggagtggaatcccaaggagaggggccaggaaaattctggatgcagtcggcaatttttctggcaagcaggtaaaggcccagaagaggaatttctttttcttcatgcccactgccacttgggtggttagaataatccccacatggccacatctaggagggctggaatccaagtcttagaggcctccttgagaaatttttgttgggtagatccccactacaaggtcctctaacagtgagaagttgtagatcttgcctgatttctgatgcctttgccatatgcttcaaacaccagttgactctggttctatcatcagacttgcagtagataggtggccagttccctgggttgggatgaataaatctataaaggttttgtaacacagttgcttggttatgcccacgttcaaaatttgaaataggaatcttgtgactagaatcacttgcagcctgacaatgaaatcgaaatcctcgtggaatttcaccaggatttataaaactgtggaaatctgccataataccttcttggagagaatacttaacacagccaatttcacaagggaggaagcgctgttcacaatgaggaggtagctcgccatggctaaaaatgttcaaaaaataaaaaatgcctccaaggagagcttgatcaccttttaaagacaaagctgacatatctggaggtgaaacattctgctttggtacaagcatgcctggcctcctcagtggtgtgaaaacaggtttctgcttctctgagggcccagggtcctttccctgagcggccctccattctcgagccatttctgcgtatttctccttttcttcctccctcagaagcgcccagtctgaggagcagtaagggatggcatcagcaacgcgagccacaggcaggcctcgtcgccgtagttcggggatcttctcctgcacgaagaaatagtaagcattccggctggccttacggttcggcatggcagcgcggtcaaacttcctggcctcagacagaacaaagcaccggcgccctcgccgggctcccgccctaagtaacagaggtaggcgcctgcgcacgcagcccgcaactctcggccaatcaggaagcgacgcgcagtcgcattgccccgcgggggaacaaacagcctgagactggaagattccggctcgtgccgccttgcgggtgagatcccgggaatgccgggcc

SEQ ID NO: 361467 - DNA, 1078 bp, Homo Sapiens
  misc_feature (987)..(987): n is a, c, g, or t
tgtgcagtaatgacactgggagtggaaaattcaagtgtgtttgcatcactatgagagtgcctcggaacccaactatcggagataaatttgccagtcgccatgggcagaagggcattttaagcagattgtggccggctgaggacatgccttttactgagagtgggatggtcccagacattctgttcaatccccatggttttccatcccgcatgaccattgggatgttaattgagagtatggccgggaagtctgcagctttgcatggtctctgccatgatgctacacccttcatcttctcagaggagaactcggccttagaatactttggtgagatgttaaaggctgctggctacaatttctatggcaccgagaggttatatagtggcatcagtgggctagaactggaagcagacatcttcataggagtggtttattatcagcgcttacgccatatggtctcagacaaatttcaagtaaggacaactggagcccgagacagagtcaccaaccagcctattgggggaagaaatgtccagggtggaatccgttttggggagatggaacgggatgcgcttttagctcatggtacatcttttctccttcatgaccgcctcttcaactgctcagatcggtcggtagcccatgtgtgtgtgaagtgtggcagtttactctctccactgttggagaagcccaccccccttcttggtctgccatgcgcaacagaaaatacaactgtactctgtgtagtcgcagtgacactatcgatactgttcctgtgccctatggttttccggaattttgtacctgaactggcagctatgaacatcaaaatgaaactggagggtgtttaacttgatggtggacctttttggattaagaggacttatcgaatttaagccaaatgtgaattttaatttcatggaaagaattccttatacccgggttactccttggaaatattttccaacgggggttaaaaacttctcnacccaaaaccctgaaaaccccaattattgcccaggggttcctgagaactcccttggggaaaaatattaacctttttggcaaaagtgtattc

SEQ ID NO: 361468 - DNA, 1138 bp, Homo Sapiens
  misc_feature (164)..(164): n is a, c, g, or t
taacttcgggagttgagccacgagctgttgtgcatccagaggtggaattggggcccggcattccctcctcgtcccgggctggcccttgcccccaccctgcaactcctggttgagatgggctcagcaagagcgtcccagtcacaccagcgcggcctccgccgacnaacaagcatctggctcgagtggcggacccccgttcacctagtgctggcatcctgcgcactcccatccaggtggagagctctccacagccaggcctaccagcaggggagcaactggagggtcttaaacatgcccaggactcagatccccgctctcctactcttggtattgcacggacacctatgaagaccagcagtggagaccccccaagcccactggtgaaacagctgagtgaagtatttgaaactgaagactctaaatcaaatcttcccccagagcctgttctgcccccagaggcacctttatcttctgaattggacttgcctctgggtacccagttatctgttgaggaacagatgccaccttggaaccagactgagttcccctccaaacaggtgtttccaaggaggaagcaagacagcccacagaaacccctgtggccagccagagctccgacaagccctcaagggaccctgagactcccagatcttcaggttctatgcgcaatagatggaaaccaaacagcagcaaggtactagggagatcccccctcaccatcctgcaggatgacaactcccctggcaccctgacactacgacagggtaagcggccttcacccctaagtgaaaatgttagtgaactaaaggaaggagccattcttggaactggacgacttctgaaaactggaggacgagcatgggagcaaggccaggaccatgacaaggaaaatcagcactttcccttggtggagagctaggccctgcatggccccagcaatgcagtcacccagggcctggtgatatctgtgtcctctcaccccttctttcccagggatactgaggaatggcttgttttcttagactcctcctcagctaccaaactgggactcacagctttattgggctttctttgtgtcttgtgtgtttcttttatattaaaggaagtaattttaaatgttactttaaaaaggtaaaaa

SEQ ID NO: 361469 - DNA, 1137 bp, Homo Sapiens
  misc_feature (965)..(965): n is a, c, g, or t
  misc_feature (981)..(981): n is a, c, g, or t
  misc_feature (1118)..(1118): n is a, c, g, or t
cctggccttgccgacccacagtggggcctccagctggggccacgtggccatgagaatgaccagctaggcttccctggaggccaggcctccctggactgggccaggtgcttcctgccagcaaagatgagtaatgtctcagggatcctggagacagccggcgtccccctggtgtcagtgaactggccgcagcccagccccccaccggctgtgccagctgggccgcagatggaccacatggggaacagctcccagggggccccctggctcttcctcacctccgcactggcccgaggcgtctcggggatcttcgtgtggactgccctggtgctcacctgccaccagatctatctgcacctgcgctcctacaccgtgccacaggagcaacgttacatcatccgcctgctcctcatcgtgcccatctacgccttcgactcctggctcagcctcctcctcctcggagaccaccagtactacgtctacttcgactctgtgcgggactgctacgaagcctttgtcatttacagcttcctgagcctgtgtttccagtacctgggaggcgagggcgccatcatggctgagattcgtggaaagcccatcaagtccagctgcttgtacggcacctgctgcctccggggcatgacctactccatcgggttcctgcgcttctgtaagcaggccactctgcagttctgcctggtgaagcccgtcatggccgtcaccaccatcatcctccaggcatttggcaaataccacgacgggggacttcaatgtccgcagcggctacctctatgtgaccctcatctacaacgcctccgtcagcctcgccctctacgccctgttcctcttctacttcaccaccagggaagctcctgcggcccttccagcccgtcctcaagttcctcaccatcaaagccgtcatcttcctgtcgttctggcaagggctgctgctggccatcctgaagcgnggcggggtcatcccgngagggggagacccagcggcgggaacaacctggggggctggcaccctggccgccgggctacagaccttcatcatctgcgtggaaatgctgttccccctccgtgggccctgcgtatgccttccccctgccagggtaccncaagaagaaaggagaatcc

SEQ ID NO: 361470 - DNA, 892 bp, Homo Sapiens
  misc_feature (46)..(47): n is a, c, g, or t
  misc_feature (219)..(219): n is a, c, g, or t
tgtctgggctcaactccatttccctgcccatgcccaccttccctgnnttgggcctgccattgcttcaaggagggctgttcctcctgggtgagacttttcaccctttgaactagagtgcctttgtatgtgtccagggggaggggggaggaccctgggatctcccaggccttacaaaagtggcggcacataaatacaaacctaaaaaacagccatttcctngccagcaggtatcaactggccccacagcttcagctatggccaaagaggccagcgtggcaaggtcctgtctcagatctggctgatggcagggagccaagaggtgctagcaccctcctcagcccttcactttgatgaccgtccttcctcgtgatcatcaaagaggttagggttctctgccagcgtggctctcactttcttcttctccttgaagcgtcctgagttggagaccttgacgtgcttgccctttgtgctcttgtccacaatcttctccaggcgggtgttaaagtcgctgttggggcctccagcgtcaggcctcgggggttctgcatctccctctgtttgggcataggtgtcagggatctcatacagcactttgggagtggatttctttttccggaggaaagtcagcttccaccaaccaatttcagtcgtcatggcgctccctaagccaaggatggggctttctgtaatcccgactgctccaggctggaggtgagacctttcctagagaagcagttgagtgtaggagctgcctgggagggtgagactcgggaagcaagtggtgcctccgggctgctgtatcaggcaaggctcagccaggagaggtgggtaggagcagctacacgtcaggtgcaagagaaacaggtgcaagagctgttacctgcttctgctg

SEQ ID NO: 361471 - DNA, 1145 bp, Homo Sapiens
  misc_feature (910)..(998): n is a, c, g, or t
gggctcgctcgacacagccagagctggaggtgggtgcccggcacggaggggcctgcggaccaatggctctgccctgcaccttagggctcgggatgctgctggccctgccaggggccttgggctcgggtggcagcgcggaggacagcgtgggctccagctctgtcaccgttgtcctgctgctgctgctgctcctactgctggccactggcctagcactggcctggcgccgcctcagccgtgactcagggggctactaccacccggcccgcctaggtgccgcgctgtggggccgcacgcggcgcctgctctgggccagccccccaggtcgctggctgcaggcccgagctgagctggggtccacagacaatgaccttgagcgacaggaggatgagcaggacacagactatgaccacgtcgcggatggtggcctgcaggctgaccctggggaaggcgagcagcaatgtggagaggcgtccagcccagagcaggtccccgtgcgggctgaggaagccagagacagtgacacggagggcgacctggtcctcggcctccccaggaccagcgagcgcagggggcagtgctgaggccctgctgagtgacctgcacgcctttgctggcagcgcagcctgggatgacagcgccagggcagctgggggccagggcctccatgtcaccgcactgtagaggccggtcttggtgtcccatccctgtcacagccgctcactccccgtgcctctgcttcccaagatgccatggctggactggacccccaggcccacatgaccatgcctcagactgtcaccccctaccagttcccaattccatgttgtaccccgatcaccacgggaatggctccccccaaccacaggcatcaggcaaccatttgaaataaaactccttcagcctgtgnnnnnnnnnnnnnnnnnnnnnnnnnnnnnnnnnnnnnnnnnnnnnnnnnnnnnnnnnnnnnnnnnnnnnnnnnnnnnnnnnnnnnnnnngaccacggggtcccattgaacccccaaaaaacccaaccctcattggtggggccccctgggccccccaaaaaattttttcaaaacctttcgtttgggggcggcggcccccctaaggtaaagggaaactgggcccaaaccttgtttccc

SEQ ID NO: 361472 - DNA, 1221 bp, Homo Sapiens
gcctgggtggcgaattcggcacgagggttaaaccaagttctcagcaggatgtgcacagagggcccaggaggagcctcaggagccggactgccgttggccaaccgagtccccagggagacacttaagggaaattaaactgcagagtgcaagagatgcctcagtcaagtcagccaaaaacacgcgggtcatccccaagccccagagagtgacagagccccgatgacacggacacctcggctgctgtcacttccctggttcgggcctcccacaggctttgaattgaaggcgagtgcctcagaatttgcatccattgttctgtctttcctgggaagttattcatcctggtggccagcccaccgacaaaatggatttggatctactggacctgaatcccagaattattgctgcaattaagaaagccaaactgaaatcggtaaaggaggttttacacttttctggaccagacttgaagagactgaccaacctctccagccccgaggtctggcacttgctgagaacggcctccttacacttgcggggaagcagcatccttacagcactgcagctgcaccagcagaaggagcggttccccacgcagcaccagcgcctgagcctgggctgcccggtgctggacgcgctgctccgcggtggcctgcccctggacggcatcactgagctggccggacgcagctcggcagggaagacccagctggcgctgcagctctgcctggctgtgcagttcccgcggcagcacggaggcctggaggctggagccgtctacatctgcacggaagacgccttcccgcacaagcgcctgcagcagctcatggcccagcagccgcggctgcgcactgacgttccaggagagctgcttcagaagctccgatttggcagccagatcttcatcgagcacgtggccgatgtggtgagtgtgggagaagccccatgacaccacaggagcaggtggggtcagaggatggagagtgactgagaggaactggcaggggagggaattctggctaaagcatcctgccaggacccttgctgaaggtgtgccttggggatcagacggcctctggggactgtggaggatggaccagtcagctactgagggcgactggatacggagagcaggggtcctgctacaatctcagcagggagtgcctccacatgctgcctggcacagaccaggcctttgacaaataaatgttcaatggatgc

SEQ ID NO: 361473 - DNA, 876 bp, Homo Sapiens
  misc_feature (723)..(723): n is a, c, g, or t
  misc_feature (733)..(733): n is a, c, g, or t
  misc_feature (817)..(817): n is a, c, g, or t
cgggagagtagcagtgccttggaccccagctctcctccccctttctctctaaggatggcccataaggagaactcctacccctggccctacggccgacagacggctccatctggccgtgagcaccctgccccagtgaggtcctccgtgaaggagcctgtccaccccatactgacacttgtcctcatgagccgctccaatgtccagcccaacagctgcccctggccagaaggtgatggagaatagcagtgggacatcccgacatcttaagcgcggaactgtcacaagtgtgatgactttgagcattgggcgtcctctgggacaaagctctatttatgcctatggcctgaggcctcctctgtctcttcccccagtcatcccaacatcctgcgtctctacaactatttttatgaccggaggaggatctacttgattctagagtatgccccccgcggggagctctacaaggagctgcagaagagctgcacatttgacgagcagcgaacagccacgatcatggaggagttggcagatgctctaatgtactgccatgggaagaaggtgattcacagagacataaagccagaaaatctgctcttagggctcaagggagagctgaagattgctgacttcggctggtctgtgcatgcgccctccctgaggaggaagacaatgtgtggcaccctggactacctgcccccagagatgattgaggggcgcatgcancaatgagaanggtggatctgtgggtgcattggagtgctttgctatgagcctggctgggtggggaacccaccccttttgagagtgcatcacacanacgagaacctatcgccgcaatcggtcaagggtgggaacctaaagttcccccgccttccg

SEQ ID NO: 361474 - DNA, 1479 bp, Homo Sapiens
  misc_feature (1291)..(1299): n is a, c, g, or t
gggagattcagttgtttgcgggcggccgggagagtagcagtgccttggaccccagctctcctccccctttctctctaaggatggcccagaaggagaactcctacccctggccctacggccgacagacggctccatctggcctgagcaccctgccccagcgagtcctccggaaagagcctgtcaccccatctgcacttgtcctcatgagccgctccaatgtccagcccacagctgcccctggccagaaggtgatggagaatagcagtgggacacccgacatcttaacgcggcacttcacaattgatgactttgagattgggcgtcctctgggcaaaggcaagtttggaaacgtgtacttggctcgggagaagaaaagccatttcatcgtggcgctcaaggtcctcttcaagtcccagatagagaaggagggcgtggagcatcagctgcgcagagagatcgaaatccaggcccacctgcaccatcccaacatcctgcgtctctacaactatttttatgaccggaggaggatctacttgattctagagtatgccccccgcggggagctctacaaggagctgcagaagagctgcacatttgacgagcagcgaacagccacgatcatggaggagttggcagatgctctaatgtactgccatgggaagaaggtgattcacagagacataaagccagaaaatctgctcttagggctcaagggagagctgaagattgctgacttcggctggtctgtgcatgcgccctccctgaggaggaagacaatgtgtggcaccctggactacctgcccccagagatgattgaggggcgcatgcacaatgagaaggtggatctgtggtgcattggagtgctttgctatgagctgctggtggggaacccaccctttgagagtgcatcacacaacgagacctatcgccgcatcgtcaaggtggacctaaagttccccgcttctgtgcccacgggagcccaggacctcatctccaaactgctcaggcataacccctcggaacggctgcccctggcccaggtctcagcccacccttgggtccgggccaactctcggagggtgctgcctccctctgcccttcaatctgtcgcctgatggtccctgtcattcactcgggtgcgtgtgtttgtatgtctgtgtatgtataggggaaagaagggatccctaactgttcccttatctgttttctacctcctcctttgtttaataaaggctgaagctttttgtactcatgaaaaaaagctgaaatctatcaaaaataataaaaaatnnnnnnnnnccatcacttaaattatacccgagagggggaacagagagttacgtctaccagcgtttttgttagaaagacggtgcccctaggatgaccgcgatataaaacgatcgaccaggtgccgatgtatacacagtgacaatgtggaaaaagttgtgactatggaacacttgtgtaagcagaccacat

SEQ ID NO: 361475 - DNA, 757 bp, Homo Sapiens
gggaagctgggggagcgggtgggtgttgggtggcgttgggggagctgcgcctcgcccagagcctcgcccggagcctcgcccggagccttccggggtgggggatagttgaggacctcatcgagggaggggttgggcggcggggaagggagcgagcgtggcgggggacccgaggcacgctctcgagccaacgagcgtgatgcgctcgagtgtgggcggggactgagggaagaagtgaaaatcggactgccaggcgacagttcctccgtttgaaatctcgccggctcctgagcgggccaccgggcccgggctgggggtctggcgggagaaataactttatttggactgagagctggagaatgagaataggacctgagagtatattgggctaaggaggagaggtgtttgagcccagatgagtcatggctggacgacccctccgcataggagatcagctggttctggaagaagattatgatgagacctacattcctagtgagcaagaaattcttgaatttgcccgggagattggtattgatcccatcaaggaaccagaactgatgtggctggcgcgagagggcatcgtggccccactgcctggagagtggaaaccatgccaggacatcacaggtgacatttactatttcaacttccgccaacgggcagtctatgtggggaccatccatgtgacgaacactatcggagcttggtgatccaagagcgggcaaagctgtcaacttctggggccattaagaagaag

SEQ ID NO: 361476 - DNA, 1950 bp, Homo Sapiens
gggtccggaattcccgggataccggagatacatcaccgagaataaccgcgcggagatcaagaatggcagcatcctgtgcctcagcacggccccagaccttgaggctgagcagctcttgggtgggctgcagagtaacagtcctgaagggcgccgggaagccctgaggcgccttgttccgctggcctcggacatgatctttgccaggtggtgtgctacgtgaacatgaacctcatggatgcctccgtgcctcccctggcccttgggctgctggagagtgtgaccttgagcagcccagccctgggccagctggtcaagagcgaggtgcccctggataggctgctggtgcacctacaggtgatgaaccagcagctgcaaaccaaggccatggccctgctgacagccttgctgcagggggccagccctgtggaacgcaagcacatgcttgactatctttggcagaggaaccttcgccagttcatctataagaacatcatccacagtgcagcaccaatgggcgacgagatggctcatcacctgtacgtactgcaggctctcatgctggggctgctggagccgcgcatgcggacgcccctggacccctacagccaggagcagcgggagcagctgcaggtcctacgccaggctgccttcgaggtggagggggagtcctcgggtgccgggctaagtgctgaccgtcgccgttccctctgtgcccgagagttccgcaaactgggcttttctaaacagcacccagcacaggacctggagcgcgtgcccccccggtctgctgggcctgggacacatgttgtacttctccagaaacgcgcccagcgcgtacagccgggttgtggtggagaacagcagccgccgaggacaagcaccgaaggcccctttgcccggggcagcatccaactgacggtgctgctgtgtgagctgctccgtgttggggagccctgctctgagacagcccaggacttctcacccatgttcttcggccaagaccagagcttccacgagctcttctgtgtgggcatccagctgttgaataagacctggaaggagatgcgggctacacaggaggacttcgacaaggtcatgcaggtggtgcgggagcagctggcccgcactctggccctgaagcccacttccctggagctcttccgaaccaaggtgaatgcgctcacttatggggaagtgctgcggctgcggcagactgaacggctgcaccaggagggcacactggctccccccatactggagctgcgggagaagctgaagccagagctcatgggcctgatccgccagcagcgcttgctccgcctctgtgaggggacgctcttccgcaagatcagcagccggcggcgccaggataagctgtggttctgctgcctgtcccccaaccacaagctgctgcagtacggagacatggaggagggcgccagcccgcctaccctggagagtctgcccgagcaactccctgtggccgacatgagggcactcctgacaggcaaggactgcccccatgtccgggagaagggctccgggaagcagaacaaggacctctatgagttggccttctcaatcagctatgaccgtggggaggagggaagcgtacctcaacttcattgccccctccaagcgggagttctacctgtggacagatgggctcagtgccttgctgggcagtcccatgggcagcgagcagacacggctggaacctggagcagctgctgaccatggagaccaagctgcgtctgctggagctggagaacgtgcccatcccggagggtatgaacctgtgccctcgagagggaacgtgcattagcgttcatgcatgagtgagaatggataagcttgagcggggtgggtggcaagagcgagagtggggcgattggagggagcatgaaggggcgtgacagaggggtggcgtagaaagagaatggtgcagag

SEQ ID NO: 361477 - DNA, 1384 bp, Homo Sapiens
gcaacccggaactaacctcggctcccttgggaaggccgcgttgcatggccaggagcagcagtctgggccgcgagtgctgggacaccgaggtcaggtctcggaaagggaggacctcctcgtccccaggggccccaggccaggtgcacccttggccgcaggtgcacggtctccggaaagtgcaggcgcccacgtcccagctggaccatggcgcctccgcggaacgtggtgaagattgccatcaagatgcgtgacgccatcccgcagctcatccagctggaccaggcgaagcccctggccgctgtgctgaaggaggtgtgcgacgcgtggagcctgacgcactctgagcgttacgccctgcagtttgcggatgggcaccggagatacatcaccgagaataaccgcgcggagatcaagaatggcagcatcctgtgcctcagcacggccccagaccttgaggctgagcagctcttgtggtgggctgcagagtaacagtcctgaagggcgccgggaagccctgaggcgccttgttccgctggcctcggacatgatctttgccagggaggtcatcagccgtaatgggctccagatactaggcaccatcattgaagatggggacgacctaggagaggtgctggccctcagcctgagggccttctcagagctcatggagcacggcgtggtgtcctgggagactctgagcatcccctttgtgaggaaggtggtgtgctacgtgaacatgaacctcatggatgcctccgtgcctcccctggcccttgggctgctggagagtgtgaccttgagcagcccagccctgggccagctggtcaagagcgaggtgcccctggataggctgctggtgcacctacaggtgatgaaccagcagctgcaaaccaaggccatggccctgctgacagccttgctgcagggggccagccctgtggaacgcaagcacatgcttgactatctttggcagaggaaccttcgccagttcatctataagaacatcatccacagtgcagcaccaatgggcgacgagatggctcatcacctgtacgtactgcaggctctcatgctggggctgctggagccgcgcatgcggacgcccctggacccctacagccaggagcagcgggagcagctgcaggtcctaacgccagggctgccttcgaggtggagggggagtcctcggggtgccgcgctaagttgctgaccgtcgccgttccctctgtgcccgaaagttccgcaaactgggctttctaacagcaacccagcacaggacctggagcgcgtgcccccggtctgctggcctggacacatgtgtacttctccagagacgcgcccagcgcgtacagccggagggtggagaacagcaagcgcgaggaca

SEQ ID NO: 361478 - DNA, 1127 bp, Homo Sapiens
  misc_feature (328)..(333): n is a, c, g, or t
  misc_feature (749)..(777): n is a, c, g, or t
agcggagctgtcagagatcagaggaagaggaaggggcggagctgctttgcggacggccgcggagcagtcagccgactacagagaagggtaatcgggtgtccccggcgccgcccggggccctgagggctggctagggtccaggccgggggggacgggacagacgaaccagccccgtgtaggaagcgcgacaatgccccgctacggagcgtcactccgccagagctgccccaggtccggccgggagcagggacaagacgggaccgccggagcccccggactcctttggatgggcctggcgctggcgctggcgctggcgctggctctggcnnnnnntctgtctgactctcgggttctctgggctccggcagaggctcaccctctttctccccaaggccatcctgccaggttacatcgcatagtgccccggctccgagatgtctttgggtgggggaacctcacctgcccaatctgcaaaggtctattcaccgccatcaacctcgggctgaagaaggaacccaatgtggctcgcgtgggctccgtggccatcaagctgtgcaatctgctgaagatagcaccacctgccgtgtgccaatccattgtccacctctttgaggatgacatggtggaggtgtggagacgctcagtgctgagcccatctgaggcctgtggcctgctcctgggctccacctgtgggcactgggacattttctcatcttggaacatctctttgcctactgtgccgaagccgnnnnnnnnnnnnnnnnnnnnnnnnnnnnnagggcgcctcatgttaggcgaaatcctcttccgtactggacgtggaatggggatttttgactacttgggggggcaatggaccttgactgcggaaaaccccggggagctcccgcctggattgactgggcctagcgaccccggaaccggggcccccgggccgggattactggcgttggacatctcaccttgtgtggaaccgtccttttttgggagcgcttaacttacccttgtgcctcggggcccaaactctaataaataacgggctcggcagggggcgactaaggcgttatgggggactcgtatttcgcgccccgcccgggtcctcatccggggggggctggcgacataag

SEQ ID NO: 361479 - DNA, 1240 bp, Homo Sapiens
ggcctgggtggcgaattcggcacgagggagcagttcagaagttcaggcagagggccccaccgctcttgggacagggggcccagccaggccagaggtgctgtgcaggaaggagccggccccaccgcctggcgtgtgcacacgcagccagagggccaggggggtcccacatctggccgaagggcttcgaggcacagagagcgcaggagcacagggcacagctggtctgttcagccagggcgggaaggggctccctgctgctcctgcccgaggggatccggtgccgcccaggagcaccagcggcggtgtctccgccaaggggctctcagtgagcaggagaaatgtttacgttcacaaagaccagagcccacgaggggctgagcctgctgccaaaagtgcttttggtcagctgcccagctgtgccacagcgggcaccgaggcaggaggcgccagaggaaacctttcacatgggctgcgggagcccgagcttcctgacccccagcccgggagcggagagggacgctggagcccaggccgaccgcacaccgccctggagcgacttcgcccaccagagtcggctgcccagcccgtgggtgctgcgctccgaaggcagagatgcagtgtggagggggggcgtcgggagcgagagagacaaggggtccgagggccccgcccggggcctgcccagcctgccccttgcgggcttctcgccgctgctgtccacccagctcttccactttggaaagggtgtctcctgggggggcaggcaggctggcctcttcagcccccacctggggctgcctctgcagggcccctccttctcggccttcagggaggcccaggccggacccagccctgtctttggaagcccacacttgctggcaaagaaggacggcggcccctggccaaccaggaaggcacaggcagggctgagtttgcatgacaggaggagctcgggctcggaggaaagcattttagacctgaggtatcgacgaagggtcaacagggatgaccaggagcaggacgccttgggcagtgacgccagtgacttcagcgacacctccacggaggacagtggcggcagctcagtagtgaaagtctaagccctcgagctgtgggttcgcgtcctgggttgcgtgcatccggggaaagcggcgtaaccgtgcgtgtgtgtgatggttccgtgggctgcaaagaaagggaaacggtctattatacatagcccctggtatatatggtacac

SEQ ID NO: 361480 - DNA, 1148 bp, Homo Sapiens
aagcgaggcctgggtggcgaattcggcacgaggctgcgtaaagaggcctgcagtcccgcggcgcggggcaggttccgggctgcttaggttggcaccggtccgtggtccccgggggcgcagtcgcagcgctcccgccctccaggcgtcagcgagtgcgcggtccagtgcggccggaacctggcgcaactcctagagcggtccttggggagacgcgggtcccagtcctgcggctcctactggggagtgcgctggtcggaagattgctggactcgctgaagagagactacgcaggaaagccccagccacccatcaaatcagagagaaggaatccaccttcttacgctatggcaggtaagaaagtactcattgtctatgcacaccaggaacccaagtctttcaacggatccttgaagaatgtggctgtagatgaactgagcaggcagggctgcaccgtcacagtgtctgatttgtatgccatgaactttgagccgagggccacagacaaagatatcactggtactctttctaatcctgaggttttcaattatggagtggaaacccacgaagcctacaagcaaaggtctctggctagcgacatcactgatgagcagaaaaaggttcgggaggctgacctagtgatatttcagttcccgctgtactggttcagcgtgccggccatcctgaagggctggatggatagggtgctgtgccagggctttgcctttgacatcccaggattctacgattccggtttgctccagggtaaactagcgctcctttccgtaaccacgggaggcacggccgagatgtacacgaagacaggagtcaatggagattctcgatacttcctgtggccactccagcatggcacattacacttctgtggatttaaagtccttgcccctcagatcagctttgctcctgaaattgcatccgaagaagaaagaaaggggatggtggctgcgtggtcccagaggctgcagaccatctggaaggaagagcccatcccctgcacagcccactggcacttcgggcaataactctgtggcacgtgggcatcacgtaagcagcacactaggaggcccaggcgcaggcaaagagaagatggtgctgtcatgaaataaaattacaacatagctacctggggt

SEQ ID NO: 361481 - DNA, 165 bp, Homo Sapiens
caatcagtgagaaggaatcaccgtctgacgctatggcatggaacccaagtctttcaacggatccttgaagaatgtggctgtagatgaactgagcaggcagggctgcaccgtcacagtgtctgatttgtatgccactgaaccttgagccagttaggccgatctgat

SEQ ID NO: 361482 - DNA, 453 bp, Homo Sapiens
  misc_feature (388)..(388): n is a, c, g, or t
  misc_feature (400)..(400): n is a, c, g, or t
  misc_feature (410)..(410): n is a, c, g, or t
  misc_feature (436)..(436): n is a, c, g, or t
agctaatggctccggggccaaactacaattcacctataattctgcaggcccttccccctcctctgcagcccctcgccctcctgtcgtttcagttcctcaaccggtcactttgccatccactcaggctgcttctctgtacccttcttcacacatggataccagtaatcaccagtgcacttctgcctctcctgctcccccaatgcccctttctcacactctcataccggtccgacctcctcaaccttagtttcccttatctacacatgctttttcctgtcacttctatgctgactccgtcttcaggtgcctactcttgaaacttcaatggcaactcttattacggcaacacaagggaaacaagtgggattaggagggcatggggtttgtncgggttcaaggntagaaacctnataaatggttcaagggtgtaacaaantgcggttggttatgggg

SEQ ID NO: 361483 - DNA, 1109 bp, Homo Sapiens
  misc_feature (150)..(168): n is a, c, g, or t
  misc_feature (1074)..(1074): n is a, c, g, or t
ttcaagcacctcagccctctgaactacaaaacagaagagcctgcaagtgacaaaggaagtgaggcagaggcccacatgcccccaccgttcacaccctacgtgcctcggattctgaacggcttggcctcggagaggacagcactgtctccnnnnnnnnnnnnnnnnnnnacctatggtgccatccacaacatcagcgggactatccctggacagtgcttggcgcagagcgccacgggcagtgtggctgctgccccccaggaggcctgaggctgggtctcactgctctgaaaagacacaaccagaatggcctggggctcaggcccttggctgagtgggaatgcgttgggactgcccagctgagctatcaggtgcccatcttttctggtcccagcagtggtgaggagagcacaggcaggcctcgcccctcccttgctcacccagtttcccctccggcacaagcttccagctctgcagctggggtgacatccccagtggtttgtcgccaagaccatgtggtggacttttcgccccccaaactgatgagtccgggagaatatatggagagagagatgtaacaaggggaaggcctcctcccttctgagcacacacacaaccgataaccaaagagatgctgcagtccaggtctgaggtcccgctggcatccagctccctgctccatggccagtccctccccagcccagcagtccctccaggctacatccaggagtaagctatggggaacaggttgggaggtggccagtgctcctgccagctgtgcacacatctctgtatcccgctagagttctgtgtttttgtatcatgttgtcagggacgctagctgggtcagggttaccccatagcaggcagggacaaggaccactcataatatgcccattggaccacagttaagatccagcctctctcacctctttcagggctgagtgcatgagtctgcacctccagggcaggctctgtggcagtacttcaccccctccgtcttgttccctccaaggtgttggggggtggggcagtggttcaggggcctccttgggagcccaaagggacagcatggtncggcacagagggaaggggttaccgggggttgggtt

SEQ ID NO: 361484 - DNA, 899 bp, Homo Sapiens
gtctggaaacgccgggagctgcgagtgctcagctgcggagacccgtgataattcgttaactaattcaacaaacgggacccttctgtgtgccagaaaccgcaagcagttgctaacccagtgggacaggcggattggaagagcgggaaggtcctggcccagagcagtgtgacacttccctctgtgaccatgaaactctgggtgtctgcattgctgatggcctggtttggtgtcctgagctgtgtgcaggccgaattcttcacctctattgggcacatgactgacctgatttatgcagagaaagagctggtgcagtctctgaaagagtacatccttgtggaggaagccaagctttccaagattaagagctgggccaacaaaatggaagccttgactagcaagtcagctgctgatgctgagggctacctggctcaccctgtgaatgcctacaaactggtgaagcggctaaacacagactggcctgcgctggaggaccttgtcctgcaggactcagctgcaggttttatcgccaacctctctgtgcagcggcagttcttccccactgatgaggacgagataggagctgccaaagccctgatgagacttcaggacacatacaggctggacccaggcacaatttccagaggggaacttccaggaaccaagtaccaggcaatgctgagtgtggatgactgctttgggatgggccgctcggcctacaatgaaggggactatctatcatacggtgttgtggatgggagcaggtgctaaagcagcttgatgcccgggggaggaggccaccacaaccaaagtcacagggtgctggactacctcagctatgctgtcttccagttggggtgatctgcaccgtgcctggagctcacccgccgctggtctccctg

SEQ ID NO: 361485 - DNA, 2114 bp, Homo Sapiens
gggagctgaccgggcgacgccgcgggaggttctggaaacgcccggagctgcgagtgtccagacacttccctctgtgaccatgaaactctgggtgtctgcattgctgatggcctggtttggtgtcctgagctgtgtgcaggccgaattcttcacctctattgggcacatgactgacctgatttatgcagagaaagagctggtgcagtctctgaaagagtacatccttgtggaggaagccaagctttccaagattaagagctgggccaacaaaatggaagccttgactagcaagtcagctgctgatgctgagggctacctggctcaccctgtgaatgcctacaaactggtgaagcggctaaacacagactggcctgcgctggaggaccttgtcctgcaggactcagctgcaggttttatcgccaacctctctgtgcagcggcagttcttccccactgatgaggacgagataggagctgccaaagccctgatgagacttcaggacacatacaggctggacccaggcacaatttccagaggggaacttccaggaaccaagtaccaggcaatgctgagtgtggatgactgctttgggatgggccgctcggcctacaatgaaggggactattatcatacggtgttgtggatggagcaggtgctaaagcagcttgatgccggggaggaggccaccacaaccaagtcacaggtgctggactacctcagctatgctgtcttccagttgggtgatctgcaccgtgccctggagctcacccgccgcctgctctcccttgacccaagccacgaacgagctggagggaatctgcggtactttgagcagttattggaggaagagagagaaaaaacgttaacaaatcagacagaagctgagctagcaaccccagaaggcatctatgagaggcctgtggactacctgcctgagagggatgtttacgagagcctctgtcgtggggagggtgtcaaactgacaacccgttagacagaagaggcttttctgtaggtaccaccatgggcaacagggccccacagctgctcattgcccccttcaaagaggaggacgagtgggacagcccgcacatcgtcaggtactacgatgtcatgtctgatgaggaaatcgagaggatcaaggagatcgcaaaaccttaaacttgcacgagccaccgttcgtgatcccaagacaggagtcctcactgtcgccagctaccgggtttccaaaagctcctggctagaggaagatgatgaccctgttgtggcccgagtaaatcgtcggatgcagcatatcacagggttaacagtaaagactgcagaattgttacaggttgcaaattatggagtgggaggacagtatgaaccgcacttcgacttctctaggcgaccttttgacagcggcctcaaaacagaggggaataggttagcgacgtttcttaactacatgagtgatgtagaagctggtggtgccaccgtcttccctgatctgggggctgcaatttggcctaagaagggtacagctgtgttctggtacaacctcttgcggagcggggaaggtgactaccgaacaagacatgctgcctgccctgtgcttgtgggctgcaagtgggtctccaataagtggttccatgaacgaggacaggagttcttgagaccttgtggatcaacagaagttgactgacatccttttctgtccttccccttcctggtccttcagcccatgtcaacgtgacagacacctttgtatgttcctttgtatgttcctatcaggctgatttttggagaaatgaatgtttgtctggagcagagggagaccatactagggcgactcctgtgtgactgaagtcccagcccttccattcagcctgtgccatccctggccccaaggctaggatcaaagtggctgcagcagagttagctgtctagcgcctagcaaggtgcctttgtacctcaggtgttttaggtgtgagatgtttcagtgaaccaaagttctgataccttgtttacatgtttgtttttatggcatttctatctattgtggctttaccaaaaaataaaatgtccctaccagaagccgaaaatctaaataggctacccaacaatatatcttg

SEQ ID NO: 361486 - DNA, 1019 bp, Homo Sapiens
tgggagcaggtgcctgagctgaggcaggtggggagaggggagaggttggtccagtctagggtacttggttatcagccctttcatttgttctctaaaaccagggtgaaaaagagaacagacttaacgggagcctttagactggaccccacttacctgaagcacagccatcaggattcagggcttatcactgactaccggcattggcagataccactgggcagaagatttcgctctttgaaaatgtggtttgtatttaggatgtatggagtcaaaggactgcaggcttatatccgcaagcatgtccagctgtcccatgagtttgagtcactggtgcgccaggatccccgctttgaaatctgtgtggaagtcattctggggcttgtctgctttcggctaaagggttccaacaaagtgaatgaagctcttctgcaaagaataaacagtgccaaaaaaatccacttggttccatgtcacctcagggacaagtttgtcctgcgctttgccatctgttctcgcacggtggaatctccccatgtgcagcgggcctgggaacacatcaaagagctggcggccgacgtgctgcgagcagagagggagtaggagtgaagccagctgcaggaatcaaaaattgaagagagatatatctgaaaactggaataagaagcaaataaatatcatcctgccttcatggaactcagctgtctgtggcttcccatgtctttctccaaagttatccagagggttgtgattttgtctgcttagtatctcatcaacaaagaaatattatttgctaattaaaaagttaatcttcatggccatagcttttattcattagctgtgatttttgttgattaaaacattatagattttcatgttcttgcagtcatcagaagtggtaggaaagcctcactgatatattttccagggcaatcaatgttcacgcaacttgaaattatatctgtggtcttcaaattgtcttttgtcatgtggctaaatgcctaataaacaattcaagtgaa

SEQ ID NO: 361487 - DNA, 774 bp, Homo Sapiens
ggctggtacggtccggaagttccgggatatcgtcgacccacgcgtccgcgacatggcttgagccccttgaatgtcattgcggaggatgggaccatgacctccctctgcggggactggctgcagggtcttcaccggtttgtggcccgggaaaagataatgtctgtgctgagtgaatggggcctgttccggggcctccagaaccaccccatggtactgcccatctgcagccgttctggggatgtgatagaatacctgctgaagaaccagtggtttgtccgctgccaggaaatgggggcccgagctgccaaggctgtggagtcgggggccctggagctcagtccctccttccaccagaagaactggcagcactggttttcccatattggggactggtgtgtctcccggcagctgtggtggggccatcagattccagcctacctggttgtagaggaccatgcgcagggagaagaggactgttgggtggttgggcggtcagaggctgaggccagagaggtagcagcggaactgacagggaggccaggggcagagctgaccctggagagggatcctgatgtcctagacacatggttttcttctgccctgttccccttttctgccctgggctggccccaagagaccccagaccttgctcgtttctaccccctgtcacttttggaaacgggcagcgaccttctgctgttctgggtgggccgcatggtcatgttggggacccagctcacaggacagtgcccttcagcaggtgcttcttcatcc

SEQ ID NO: 361488 - DNA, 2108 bp, Homo Sapiens
taacttaggctaggtagcgaggcctgggttgtcgaatcggcacgaggctcagtccctgccgccgcggggcgccctgggatagcggcggggcctcctgaacagatctcggcccctttccaaacactcctgatgcctcatttgcctctcgcttcttttcgaccaccattttgggggctgaggcactcacggggcctccccaggtttcactccgtttctacacagtcggagccccatggatctcccatctcccggaggaaccgtgaagccaaacagaagcgcctgcgagagaagcaggctactctggaggctgagatagcaggggagagcaagtcacctgcagaatccattaaggcctggaggcctaaggagttagtattgtatgaaatccctacgaaacccggtgaaaagaaagatgtctctgggcccctgcctcctgcatacagcccccgatatgttgaggctgcctggtacccgtggtgggtacgagagggcttcttcaaaccagaatatcaggcccggctgccccaagctacaggggagaccttttccatgtgtatcccacctcccaatgtcactggctccctgcacattggccacgcactcacggtggccatacaggatgccctcgtgcgctggcaccggatgcgtggggatcaagtgctgtgggtccctggttcagatcatgcaggaattgctacacaagctgtggtggagaaacaactgtggaaggaacggggagtgagtgagacatgagctgagccgggaggccttccttagggaggtgtggcagtggaaggaggcgaaaggtggagagatctgtgagcagctgcgagctctgggtgcctccctggactgggatcgagagtgttttaccatggatgttggctcctcagtggctgtgactgaagcttttgtgcggctctacaaggcggggttgctgtaccggaaccatcagcttgtcaactggtcatgtgctttaagatcagccatctcggacattgaggtggagaaccggcccctgcctggccacacacagcttcgactgcctggctgccccacccccgtgtcttttggcctcctattttctgttgccttccccgtggatggagagcctgatgcagaggttgtggtaggaaccacaaggccagagacgctgcctggagatgtggctgtggccgttcatccagacgactcgcgatacacacatctacacgggcgacagcttcgtcaccccttgatggggcagcctcttcccctcatcacagactatgctgttcagccacatgtgggcacgggggcagtgaaggtgactccagctcacagtcctgccgatgctgagatgggggcccgacatggcttgagccccttgaatgtcattgcggaggatgggaccatgacctctctctgcggggactggctgcagggtcttcaccggtttgtggcccgggaaaagataatgtctgtgctgagtgaacggggcctattccggggcctccagaaccaccccatggtactgcccatctgcagccgttctggggatgtgatagaatacctgctgaagaaccagtggtttgtccgctgccaggaaatgggggcccgagctgccaaggctgtggagtcgggggccctggagctcagtccctccttccaccagaagaactggcagcactggttttcccatattgggggactggtgtgtctcccggcagctgtggtggggccatcagattccagcctacctggttgtagaggaccatgcgcagggagaagaggactgtagggtggtcgggcggtcagaggctgaggccagagaggtagcagcggaactgacagggaggccaggggcagagctgaccctggagagggaccccagaccttgctccgtactaaccccctgtcacttcggaaacgggcagcgaccttctgctgtcctgggtgggacgccatggtcatgtaggggacccagatcacagggcagcgtggccttcaggcaaggatgcttcttcatcccatggttcgggacaggcagggccggaagatgagcaagtccctgcggaatgtgcctggacccaagagacatcatcagtgaggtgcagatcgcggtgctg

SEQ ID NO: 361489 - DNA, 1106 bp, Homo Sapiens; identical to SEQ ID NO: 102255
  misc_feature (915)..(923): n is a, c, g, or t
  misc_feature (955)..(963): n is a, c, g, or t
  misc_feature (972)..(1062): n is a, c, g, or t

SEQ ID NO: 361490 - DNA, 842 bp, Homo Sapiens
  misc_feature (114)..(114): n is a, c, g, or t
  misc_feature (426)..(595): n is a, c, g, or t
ggtccggaattcctgggatgtgaggtcgggcaggttcgctgtggcgggcgcctgggccgccggctgtttaacttcgcttccgctggcccatagtgatctttgcagtgacccagncatcactgtttcttggcgtgtgaagataacccaaggaattgaggaagttgctgagaagagtgtgctggagatgctctaagaaaaaattgaatagtgagacgaggttccagcgcaaaggtttctggtttgcccaagaaaaaagggaacatcatggatcaaaacaacagccctgccacctaacgctcagggcttggcctcccctcagggtgccatgactcccggaatccctatctttagtccaatgatgccttatggcactggactgaccccacagcctattcagaacaccaatagtctgtctattttggaagnnnnnnnnnnnnnnnnnnnnnnnnnnnnnnnnnnnnnnnnnnnnnnnnnnnnnnnnnnnnnnnnnnnnnnnnnnnnnnnnnnnnnnnnnnnnnnnnnnnnnnnnnnnnnnnnnnnnnnnnnnnnnnnnnnnnnnnnnnnnnnnnnnnnnnnnnnnnnnnnnnnnnnnnnngcaacacagggaacctcaggccaggcaccacagctcttccactcacagactctcacaactgcacccttgccgggcaccactccactgtatcccctccccatgactcccatgacccccatcactcctgccacgcccagcttccgaggagttctggggattgtaccgccagctgccaaataattgtatccacagtgaaatcttgggttggaaaccttgacctaaagaccattggcacttcgtgcccgaa

SEQ ID NO: 361491 - DNA, 1038 bp, Homo Sapiens
  misc_feature (417)..(576): n is a, c, g, or t
  misc_feature (863)..(863): n is a, c, g, or t
  misc_feature (935)..(935): n is a, c, g, or t
tggaccggtccggaattcccgggatgttcgctgtggcgggcgcctgggccgccggctgtttaacttcgcttccgctggcccatagtgatctttgcagtgacccagcagcatcactgtttcttggcgtgtgaagataacccaaggaattgaggaagttgctgagaagagtgtgctggagatgctctaggaaaaaattgaatagtgagacgagttccagcgcaagggtttctggtttgccaagaagaaagtgaacatcatggatcagaacaacagcctgccaccttacgctcagggcttggcctcccctcagggtgccatgactcccggaatccctatctttagtccaatgatgccttatggcactggactgaccccacagcctattcagaacaccaatagtctgtctattttggaagnnnnnnnnnnnnnnnnnnnnnnnnnnnnnnnnnnnnnnnnnnnnnnnnnnnnnnnnnnnnnnnnnnnnnnnnnnnnnnnnnnnnnnnnnnnnnnnnnnnnnnnnnnnnnnnnnnnnnnnnnnnnnnnnnnnnnnnnnnnnnnnnnnnnnnnnnnnnnnnncgttcagcagtcaacgtcccagcaggcaacacagggaacctcaggccaggcaccacagctcttccactcacagactctcacaactgcacccttgccgggcaccactccactgtatccctcccccatgactcccatgacccccatcactcctgccacgccagcttcggagagttctgggattgtaccgcagctgcaaaatattgtatccacagtgaatcttggttgtaaacttgacctaaagaccattgcacttcgtgcccgaaacgccgaatataatcccaagcggnttgctgcggtaatcatgaagataagagagccacggaaccacggcactgattttcagttctggggaaaatggntgtgcaccaggagccccagaagtgaagaaacagtcccagactgggcagcaaagaaaattatgctagaaaattggtaaaccaaaaatttggggttttttccccc

SEQ ID NO: 361492 - DNA, 1657 bp, Homo Sapiens
  misc_feature (209)..(343): n is a, c, g, or t
  misc_feature (1099)..(1110): n is a, c, g, or t
ggaccggtccggaattcccgggatagaaagtgaacatcatggatcagaacaacagcctgccaccttacgctcagggcttggcctcccctcagggtgccatgactcccggaatccctatctttagtccaatgatgccttatggcactggactgaccccacagcctattcagaacaccaatagtctgtctattttggaagagcaacaaagnnnnnnnnnnnnnnnnnnnnnnnnnnnnnnnnnnnnnnnnnnnnnnnnnnnnnnnnnnnnnnnnnnnnnnnnnnnnnnnnnnnnnnnnnnnnnnnnnnnnnnnnnnnnnnnnnnnnnnnnnnnnnnnnnnnnnnncgttcagcagtcaacgtcccagcaggcaacacagggaacctcaggccaggcaccacagctcttccactcacagactctcacaactgcacccttgccgggcaccactccactgtatccctcccccatgactcccatgacccccatcactcctgccacgccagcttcggagagttctgggattgtaccgcagctgcaaaatattgtatccacagtgaatcttggttgtaaacttgacctaaagaccattgcacttcgtgcccgaaacgccgaatataatcccaagcggtttgctgcggtaatcatgaggataagagagccacgaaccacggcactgattttcagttctgggaaaatggtgtgcacaggagccaagagtgaagaacagtccagactggcagcaagaaaatatgctagagttgtacagaagttgggttttccagctaagttcttggacttcagattcagaatatggtgggggagctgtgatgtgaagtttcctataaggttagaaaggccttgtgctcacccaccaacaatttagtagttatgagccagagttatttcctgggttaatctacagaatgatcaaacccagaattggtctccttattttgtttctggaaaagttgtattaacaggtgctaaagtcagagcagaaatttatgaagcatttgaaaacatctaccctattctaaagggattcaggaagacgaccgtaatggctctcatgtacccttgcctcccccagccccttcnnnnnnnnnnnngtaaacaaatcagtttgttttggtacctttaaatggtggtgttgtgagaagatggatgttgagttgcagggtgtggcaccaggtgatgcccttctgtaagtgcccaccgcgggatgccgggaaggggcattatttgtgcactgagaacaccgcgcagcgtgactgtgagttgctcataccgtgctgctatctgggcagcgctgcccatttatttatatgtagattttaaacactgctgttgacaagttggtttgagggagaaaactttaagtgttaaagccacctctataattgattggactttttaattttaatgtttttccccatgaaccacagtttttatatttctaccagaaaagtaaaaatcttttttaaaagtgttgtttttctaatttataactcctaggggttatttctgtgccagacacattccacctctccagtattgcaggacagaatatatgtgttaatgaaaatgaatggctgtacatatttttttctttcttcagagtactctgtacaataaatgcagtttataaaagtgtta

SEQ ID NO: 361493 - DNA, 1397 bp, Homo Sapiens
tttttccactgaaagcattttaatacggaacttgtcactcccagggagcctccgctcagccggcagttggttcatttcaatccccacgacaacccttcaaagtgcagggcagacagcaggtggctctgcccaggcgcctggatcacagcccggcctgcagccctcacctgggcgcggggagaccctgaggacgctcctccaggcggcgctggccggggcccgtcccagccccgccgcccgcagccccagctgcaacgcagccaccgccgccatcgcacccggccccgcgggcgcttccgggacgcaggaggcatctgcatccggggcgccgctgagtcccgcccagagccccgcccccggctccaggttctgcgagcggcttccgccgggctgctccgcgggcgcgtcggccatgagcgagttgccgggcgacgtgcgggcgtttctgcgggagcacccgagcctgcggctccagacggacgcccgcaaggtgaggtgcatcctgacaggtcacgagctgccctgccgcctgccggagctccaggtctacacccgcggcaaaaagtaccagcggctggtccgcgcctccccggccttcgactatgcagagttcgagccgcacatcgtgcccagcaccaagaacccgcaccagttgttctgcaaactcaccctgcggcacatcaacaagtgcccagaacacgtgctgaggcacacccagggccggcggtaccagcgagctctgtgtaaatatgaagaatgtcagaagcaaggggtggagtacgtgcctgcctgcctggtgcaccggaggaggaggagggaggaccagatggacggtgacgggcctcgcccgcgggaagccttctgggagcccacatccagtgatgaggggggagctgcaagtgatgacagcatgacagacctgtacccacctgagctattcaccagaaaggaccttggaagcacggaggatggggatggcactgatgactttttgacagacaaagaggatgagaaggcaaagcccccaagagagaaggccactgatgagagcaggagagagacgaccgtgtaccgagggctggtccagaagcgcgggaagaagcagttgggctcgttgaaaaagaagttcaagagtcatcaccgcaaacccaagagcttcagctcctgtaaacagccaggttaataaaagcacatgccgtgaaatttcgaagaagccttcagatatttcccccgctcctgatcaaaccgggtgtcttctgaatgatcggctgtccccattgtcttctctacccactaatcttggctcatgacatctgctgcccctttaagcagggcctaagggagtcctgtcccccccacccaggaagcaccagggaattctgagggacttattctcc

SEQ ID NO: 361494 - DNA, 1060 bp, Homo Sapiens
  misc_feature (17)..(17): n is a, c, g, or t
  misc_feature (25)..(25): n is a, c, g, or t
ccgacggcagtaatctncggtgtantaggtagcgaggcctgggtggcgaattcggcacgaggcgtgcgttgcagctggggctgcgggcggcggggctgggacgggccccggccagcgccgcctggaggagcgtcctcagggtctccccgcgcccaggggtggcctggaggccaagcagatgtggcagttctgcagcagaagcatctgccacaaaagcggaagatgactcctttcttcagtgggtcctgctcctcatccctgtgactgcctttggcttggggacatggcaggtccagcgtcggaagtggaagctgaacctgattgcagagttggagtccagagttctggctgagcctgtccctctgccagccgacccaatggaactgaaaaatctggagtataggccagtgaaggtcagggggtgctttgaccattccaaggagctgtatatgatgccccggaccatggtggaccctgtccgggaggcccgggagggccgcctcatctcctcctcaactcagagtggggcctatgtggtcactcccttccactgcaccgacctgggagtcaccatcctggtaaatagagggttcgttcccaggaagaaagtgaatcctgaaacccggcagaaaggccagattgagggagaagtggacctcattgggatggtgaggctgacagaaaccaggcagccttttgtccctgagaacaatccagaaaggaaccactggcattatcgagacctggaagctatggccagaatcacaggcgcagagcccatcttcattgatgccaacttccagagcacagtccctggaggacccattggagggcaaaccagagttactctgaggaacgagcatctgcagtacatcgtgacctggtatggactctctgcagctacatcctacctgtggtttaagaaattcctacgtgggacacctggtgtgtgacagatcagctgctgaagccctgtccctggataatgcagtatttcaagactgcctttatgctggatcatgtgctactggtataaagttctggccttctaccttaaaaa

SEQ ID NO: 361495 - DNA, 1213 bp, Homo Sapiens
  misc_feature (1136)..(1136): n is a, c, g, or t
agaagatgagctttttaatagatacgagagagcaatttatgcagctttaagtgggaatcttaagcagctgcttcctgtctgtgacacctgggaagacacagtttgggcctacttccgggtgatggtggacagtctggtagaacaggagatccagacatcagtagcaactctggatgaaactgaagaactccctagagaatatctgggagcaaactggacgttagaaaaggtttttgaggaacttcaagctactgacaaaaagagagttctggaagagaatcaagaacattatcatatagttcaaaagtttcttatcctgggagacattgatggtttgatggatgagtttagcaaatggctttccaaaagcagaaacaatctacctggacacctgcttcgctttatgactcaccttattttgtttttccgtactctgggactacagaccaaggaggaagtttctattgaagttttaaagacatacatacagcttttaataagagagaaacatacaaatcttatagcattttatacctgtcatttgcctcaagacctagctgttgcccagtatgcattatttttggaaagtgttacagaatttgaacagcgccaccattgcctggagttggctaaagaagcagatttggatgttgcaacaataacaaaaactgtagttgagaatattcgaaagaaagataatgggtgaatttagtcatcatgacctggccccagccctagatactggcactactgaggaggatcgtttaaaaattgatgtaatttgactggtttggtatttgacccagcgcagagggcagaagcactgaaacaaggcaatgcaatttatggagaaaattctttggcatcaaaaaagcacggaagctgcaaaaggaagtatttgtgaaaattcctcaggattctatagcagaaatctataatcagtgcgaggaacaaggaatggaaagtccacttcctgctgaagatgataatgctatccgagaacatttgtgcatcagagcttatttggaagcccatgaaacctttaatgagtggtttaagcatatgaattcagttccacaaaaacctgctttgatacctcaaccaacttttactgagaaaagtggctcatgaacacnaagaaaagaaatatgaaaatggattttgggtaatttggaaaggggcattttgggatgcccctaaaactgctgatgtg

SEQ ID NO: 361496 - DNA, 1050 bp, Homo Sapiens; identical to SEQ ID NO: 262499
  misc_feature (670)..(670): n is a, c, g, or t
  misc_feature (774)..(774): n is a, c, g, or t
  misc_feature (890)..(890): n is a, c, g, or t
  misc_feature (892)..(892): n is a, c, g, or t

SEQ ID NO: 361497 - DNA, 1852 bp, Homo Sapiens
  misc_feature (657)..(657): n is a, c, g, or t
  misc_feature (839)..(839): n is a, c, g, or t
  misc_feature (862)..(862): n is a, c, g, or t
  misc_feature (941)..(941): n is a, c, g, or t
  misc_feature (1289)..(1318): n is a, c, g, or t
  misc_feature (1323)..(1323): n is a, c, g, or t
  misc_feature (1326)..(1326): n is a, c, g, or t
  misc_feature (1330)..(1330): n is a, c, g, or t
  misc_feature (1335)..(1335): n is a, c, g, or t
tccgatgtgctttctccacatccctgtgtcctgtttctatttagtaccattttatgatgcacagtttgtttgctctttgtttttctatctttgaaaataaaacaaaatggcaatagggacattagaaaagcggctatgaggaaatgatctttttttcttagcagacatccaaaattatgtacagtgtgttttttctccaattctgttctcatcatttaatgtattgaggttgactacacgaaagctaattttctgatgtgctttttctttaggtgactccaccagtgatgcagaaggagatgctggacctgctggccaagataagtctgaggtgccagagactccagaaattcctaatgagctttcatccaacatcagaagaattcctcggcctgggagtgcaagaccagcccctccccgggtcaaacggcaagacagcatggaggcgctacaaatggataggtcagggagtggtaaaaccgtttcaaatgtgattacagagtcacacaattctgacaatgaagaggatgatcaatttgtggtggaagctgcccctcagctctctgaaatgtcagaaattgaaatggtaacagcagtggaactagaagaagaggagaagcatggtggacttgtgaaaaaaattttggagacgaaganagattatgagaaattgcagcagtcacccaaacctggggagaaggagcgatctctctttgagtcggcatggaagaaggagaaggacatcgtttccaaggagatagagaagctccgcacgtccatccagaccctgtgcaagagcgcacttcccctggggaagatcatggactacatccaggaangacgtggatgccatgcagaatgnagctgcagatgtggcacagcgagaacaggcagcacgccgaggccctgcagcaagagcagaggatcacagactgtgccgntggaggcccttaaaggctgaactcgcggagctggagcagctgatcaaagaccagcaagacaagatctgtgctgtgaaggccaacatcctcaagaatgaagaaaaaatccagaaaatggtatatagtatcaatttgacttcgagaaggtgaacactcaaaagtttcagagatgaaaagtcacctcagtttaaaagcaaaaaggaagatagaaaatcattactcttttaagttccagtttgctaagaaaatgaacagtttacaatgttattatccagctaattttcagagctttaaaactgtaagcatgttaagtgtattaaaaaaaccatgttttcttacctccttccnnnnnnnnnnnnnnnnnnnnnnnnnnnnnnagggnggncggntctanagtatgcctccatgggtccacgcttacgggtacccagctttcttgtacccaggggtcccctatagagaggtggtattaataactagcccactggccgaccggtttaccgcctccgggacctgcgaaaactggtaaaccttggaagcttgcgacgatggaccctttacttcctgtgggcgcggtaatattggggccgaacctaccctaccgagattctaaagctcccagggttcaatatttacattttcaaaggggattaatggggtaaaggcaaacttggctaaggccctgccgccttcgaaagttctgccttactgggtttgggaagttttgacagaatgaaaaccacgggaacctaagggactcccggacgggtttgggggaattcctaaaattccacggtctccaagggtggatttcccgggccccctcgagtccctacgcccccggattttttgtgtcgctaatcgcccctcgttccccaaattcgggaaaagggttttaacttgggtttcct

SEQ ID NO: 361498 - DNA, 1829 bp, Homo Sapiens
aatctcctgtcaccacagaccagcctatttcccctgagcctattactcaacccagttgcatcaagaggcagagagccgctgggaaccctggctccctcgcagctcccattgaccataagccttgctctgcacccttggaacctaaatcccaggcctcaaggaaccaaagatggggagcagtgagagcagctgaatcccttacagccattcctgagcctgcctctccccagcttcttgagacaccaattcatgcctcccagatccaaaaggtggaaccagcaggtagatctaggttcaccccggagctccagcctaaggcctctcaaagccgcaagaggtctttagctaccatggattcaccaccacatcaaaaacagccccaaagaggggaagtctcccagaagacagtgattatcaaggaagaggaagaagatactgcagagaagccagggaaggaagaggtgaggagagggttgggaccacaaagctgggaaaaatgacttcagggctctgaaactcccaccaagatttttctcaatctcaggatgtcgtgactccaaaaccaggcaagagaaagagagaccaggcagaggaggagcccaacagaataccaagccgcagcctccgacggaccaaacttaaccaagaatcaacagcccccaaagtgctcttcacaggagtggtggatgctcggggagagcgggctgtgctggcactggggggaagtctggctggttcagcggcagaggcttcccacctggtcactgatcgcatccgccggacagtcaagttcctgtgtgccctgggggcggggaatcccccattctgtccctggactggctgcatcagtcccgcaaggctggtttcttcttacccccggatgaatatgtggtgaccgaccctgagcaagagaagaactttggctttagccttcaagacgcactgagcagggctcgggagcgaaggctgctagagggctatgagatctatgtgacccctggagtccagccaccaccacctcagatgggagagattattagctgctgtggaggcacatacctacccagcatgcctcggtcctataagcctcagagagttgtgatcacatgccctcaggacttccctcattgctccattccactacgggttgggctgcccctcctctcgcctgagttcctgctgactggagtgctgaagcaggaagccaagccagaggcctttgtcctctcccctttggagatgtcatccacctgagaactccactacccttttccctcccagaccacgaattagaaagatatgtggaagaaagaactcagggcgttagaaaaggattgggggtatattgatacaaacttggccctggcaacatggggtggggaccaggaaaatctttactgaataaaattgaacagagataagggggacacccgcagaacggaaggtggacccgggaagttcagaatatccgtgcgtccgggcccggccaccagcggggctcgcctccggaaggaaagagcgttctccgtaagaaaaacaatattccggggttctggggcgcggcgccccggggcggcccccgcggctcgggggtaaaaggttgcggagccactggggctgccaacgagcgcggtggctctttcctccataaggcgacgaattcccgcggggggtcaaattgggaccttaaaggcggcgacttaggggagttcttcccttcccaccccgaatcatagaaaaaaagaagctgcccccgcggcgggggggagaaaagccccgggggaccccggtgccctctttgcaaacaacactatcttccccccaccaat

SEQ ID NO: 361499 - DNA, 969 bp, Homo Sapiens; identical to SEQ ID NO: 102257
  misc_feature (11)..(11): n is a, c, g, or t
  misc_feature (320)..(320): n is a, c, g, or t
  misc_feature (682)..(682): n is a, c, g, or t
  misc_feature (688)..(688): n is a, c, g, or t
  misc_feature (707)..(707): n is a, c, g, or t
  misc_feature (826)..(826): n is a, c, g, or t
  misc_feature (940)..(940): n is a, c, g, or t
  misc_feature (958)..(958): n is a, c, g, or t

SEQ ID NO: 361500 - DNA, 1581 bp, Homo Sapiens
tggaccggtccggaattcccgggatggcccggccaatcggtgccctgggccgccgcgccccgccctctcccggcggggtctgggcagcggcggccgtggcggagggctatgcggcgggggagacggggcaggcccctcctcctttgtccgccctgccctcccattggtcctagcggggggccgggggcggacaccggcgcggggccggagcatcgcggctcaggctgcgggaaagcggtgcgcgtgcagcggggtgggtgccctggtccgcgggcgagctcgagcagccaaccccgggcgcgtcggggccatggacggcctgaggcagcgcgtggagcacttcctggagcaaaggaacctggtcaccgaagtgctgggggcgctggaggccaagaccggggtggagaagcggtatctggctgcaggagccgtcactctgctaagcctgtatctgctgttcggctacggagcgtctctgctgtgcaatctcatcggatttgtgtaccccgcatatgcctcaatcaaagctatcgagagcccaagcaaggacgacgacactgtgtggctcacctactgggtggtgtacgccctgtttgggctggccgagttcttcagcgatctactcctgtcctggttccctttctactacgtgggcaagtgcgccttcctgttgttctgcatggctcccaggccctggaacggggctctcatgctgtatcagcgcgtcgtgcgtccgctgttcctaaggcaccacggggccgtagacagaatcatgaacgacctcagcgggcgagccctggacgcggcggccggaataaccaggaacgtcaagccaagccagaccccgcagccgaaggacaagtgaagcagccccctgagcctcacaaggacctcctggctggtgaggagggggccgcgccaggctcccaggcctccacagagtcttcagcgcatcccccaacagcagcccctgccagtccctcgggtccaggcaaggccctgggggtctccttaaatgccacctcgggcaagtcccagtcccagtcctcggccacccccagctctggatcccagggccagctgccctctggctctggctgtggctcccgcctgtccggcagggcccagggccagcgtcgggcacagggcagctcccactggtctcggcaacacacccagccgcctggtacttcctccagcccctcccagtcagccctcccggtcctcggggcccctgcagccacccaacgtcacctccagcccggtctcacccatggtccagtctcccagcagcagcaacatccccacgcagccccccagcaagtcctctggcaagccggaggacgcagcccccaagaccagcggacagcgccagaaggaatcgtcgaaacagcctgccagcagcgcctcagtgcccgagctggtcccctgccattccgggacctctctggagtacacttcggagtccaccaccgagatcacctgcagctggccacaccacaggcccccgtgcctgcagcactactggtgcctgaaacacctggcctgctaggaggctccaataaagctaacccggaccag

SEQ ID NO: 361501 - DNA, 999 bp, Homo Sapiens
gctggtaaaccggtccggaattacaaagatcgagcactgtcttccagtactttccccaagaacgctgaccaagtcctgctgatctttgatgggctagatgaagccctccagcctatgggtcctgatggcccaggcccagtcctcacccttttctcccatctctgcaatgggaccctcctgcctggctgccgggagatggctacctcccgtccagggaagctgcctgcctgcctgcctgcagaggcagccatggaccacatgttgggctttgatgggccacgggtggaagaatatgtgaatcacttcttcagcgcccagccatcgcgggagggggccctggaggagttacatacaaatggacgtcgccgaagcccgtgtgcggtgcccgcactgtgccaagtcgcctgtctctgcctccaccatctgctgcctgaccacgccccaggccagtctgtggccctcctgcccaacatgactcagctctatatgcaaatggtgctcgccctcagcccccctgggcacttgcccaccacgtccctactggaactgggggacgcgggccttgacggtgcctgttaaacagggaaaaggctaatcttcctatgccaaaaagatcactggactcccacccccttggaataaacattgttgggggggccaacattcaacgtgccctctacactggaactttcccctttccagcccacaccggcaaacccgggccccctgggggccaaccccacacaccaaccaggcgccctaaggccctttatacaccccccaccctttcgaagccaccgggctccgggaacgatcttcactttagacacgaaaccctgcgtccacaccttctatttggcccttatacccacctctaacaccttcgtgacatcacaaaaccacctcccccctctattaaacccacaccacagaatagtgttcccaacaacctcaccaacacaatttacccctcttcccacatgctgataaaaacaacga

SEQ ID NO: 361502 - DNA, 688 bp, Homo Sapiens
catacggctaggtacgaggctgggtggcgcatcggccgcaggttgtcctttgtgcgctgcgtgctgtgagcggtagttaggctcgtgtttgcattgcaccgtggaaacacgcgaatggcctggttggctgagacttatcaggccactagtcagtggagagagaaaggactactgtattcttagagagcagaatctcaacaacttcctataggaaacgggcagctgtgtcttacctggcaatgctttggcatttaataacaatgtcctgtgaagtactttgtcatagcgcgaagcactttgctttttactgtttctggttggacagtggttacattgcaacatcgtagttcagaattcggtgaaatacccaagattcaaatctctacgtggcagtaatccattttctttccttggtgtgtggttggaagattaatttgagataagtgttcagttctgggctgggctagtcgtgccgggcacgggaaattcaggttctttaagggaaaggcctgatgtgctaagacgaaactctataccgtgtgtagccgcttatgagaatatgaaactaaggagagccacaggtgaaaggtggtagcagtcactcggcctacaacctagagcatctgaccttgtgaacccaagcgactgactgccttgggagaattgaggcgaatgagagtggggagtg

SEQ ID NO: 361503 - DNA, 610 bp, Homo Sapiens
  misc_feature (534)..(534): n is a, c, g, or t
tgtctcagtttcgggacgatcacttgaactcaggaggttgaggccagtgcagtccaacctgggtgacagggtgagtccatctgaaatcacaaaacaaaacaaaaagacaactatggcaggcatgagacgggggtacttctgacacagaggaagtcaaaatcaccatagcccaggtggtcaggaacagcttctcccagggcatgctatgatatatattctcatccccagttgcagatgaggtaacaggatcagagaggttaagcaactcactcaaggtcacacatctagggagtggtggtgaccatttctcactgaggtctgctgaaatacaaaagtcactccaccatttgtgacaccaatctctctttatattgtcacccgttttaattcgcattcatagacgtatacttacctgtggctctccttagtttcatattctcataagcggctacacacggtatagatttcgtcttagcacatcaggcctttcccttaaagaacctgaatttcccgtgcccggcacgactgcccggnccagaactgaacacttatctcaaattaatcttccaaccacacaccaaggaaagaaaatggattactgccacgtaga

SEQ ID NO: 361504 - DNA, 1267 bp, Homo Sapiens
  misc_feature (1006)..(1006): n is a, c, g, or t
  misc_feature (1213)..(1213): n is a, c, g, or t
ccggaattaactgactccccgccccgccctatcgcagtcgctgggcctggtcacgcgcagagccgcgccgcgggatcggggccagcgccgggcggaggcgggacggggacgggggcggagggttgaaatcgcgcggccgggccggggcgcgccgagccgaacccagccacgcggcgccagcgaggcggccggacccgcagccccgatgctgctgacgctggccgggggcgcgctcttcttcccggggctcttcgcgctctgcacctgggcgctgcgccgctcccagcccggatggagccgcaccgactgcgtgatgatcagcaccaggctggtttcctcggtgcacgccgtgctggccaccggctcggggatcgtcatcattcgctcctgcgacgacgtgatcaccggcaggcactggcttgcccgggaatatgtgtggtttctgattccatacatgatctatgactcgtacgccatgtacctctgtgaatggtgccgaaccagagaccagaaccgtgcgccctccctcactcttcgaaacttcctaagtcgaaaccgcctcatgatcacacatcatgcggtcattctctttgtccttgtgccagtcgcacagaggctccggggagaccttggggacttctttgtcggctgcatcttcacggcagaactgagcactccgtttgtgtcgctgggcagggttctgattcagctaaagcagcagcacacccttctgtacaaggtgaatggaatcctcacgctggccaccttcctttcctgccggatccttctcttccccttcatgtactggtcctatggccgccagcagggactaagcctgctccaagtacccttcagcatcccattctactgcaacgtggccaatgccttcctcgtagctcctcagatctactggttctgtctgctgtgcaggaaggcagtccggctctttgacaatccccaagccaaaaaggatggctaaatgctcctgggagtcaggcgcactcancaccagctgcctcctccactcagcattccatggaccaaattgtgccctgggtagcctcagactttgggtattgataagccgatggatttgagtttttctaaagaatattcatattacctccttcttctaacttgccctatttgcaaacgcacttttgtagtaacaactattggggtcctgtcagacctccacggacagcaaagtggntttaatggcaagcccaagggatccttcttaagggtcttattttcaaggagcttt

SEQ ID NO: 361505 - DNA, 1619 bp, Homo Sapiens
  misc_feature (294)..(325): n is a, c, g, or t
gcttgagccggagctgagcggaggcactgggccgagcctgcttcccgggccttcctaccatgccaggctgctccctgcctccgccaccctggcacaccttcacccgcgtaccgcctcctccccgtcgctctgccttttccaaaactcacttgggccctccgtgcgcagggttcttttttggtttttctgtaaaaatcaaaacaaaaaacagagacttttgagaggagcagatgccacctaaagtcccactgcattccctgcaaagcactcaaatgtggaagccagtcattggcnnnnnnnnnnnnnnnnnnnnnnnnnnnnnnnncaccagtggctttttgtaacctctgtgttctgctgtgtttcctctacctagtcttcgagtgcttcgactgaccatgatcccctgggccccctccctcctggctgggagaaaagacaggacaatggacgggtgtattacgtgaaccataacactcgcacgacccagtgggaggatccccggacccaggggatgatccaggaaccagctctgcccccaggatgggagatgaaatacaccagcgagggggtgcgatactttgtggaccacaatacccgcaccaccacctttaaggatcctcgcccggggtttgagtcggggacgaagcaaggttcccctggtgcttatgaccgcagttttcggtggaagtatcaccagttccgtttcctctgccattcaaatgccctacctagccacgtgaagatcagcgtttccaggcagacgcttttcgaagattccttccaacagatcatgaacatgaaaccctatgacctgcgccgccggctctacatcatcatgcgtggcgaggagggcctggactatgggggcatcgccagagagtggtttttcctcctgtctcacgaggtgctcaaccctatgtattgtttatttgaatatgccggaaagaacaattactgcctgcagatcaaccccgcctcctccatcaacccggaccacctcacctactttcgctttataggcagattcatcgccatggcgctgtaccatggaaagttcatcgacacgggcttcaccctccctttctacaagcggatgctcaataagagaccaaccctgaaagacctggagtccattgaccctgagttctacaactccattgtctggatcaaagagaacaacctggaaagaatgtggcctggagctgtacttcatccaggacatggagatactgggcaaggtgacgacccacgagctgaaaggagggcggcgagagcatccgggtcacggaggagaacaaggaagagtacatcatgctgctgactgactggcgtttcacccgagccgtggaagagcagaccaaagccctcctggatggcttcaacgaggtgcccccccctggagtggctgcgctacttttgaccaaaaagagctggaactgatgctgtgccggcatgcaggagatagacatgagcgactggcagaagagcaccatctaccggcactacaccaagaacagcaagcagatccagtggttctggcaggtggtgaaggagatggacaacgagaagaggatccggctgctgcagtttgtcaccggtacctccgcgcagagttt

SEQ ID NO: 361506 - DNA, 1329 bp, Homo Sapiens
  misc_feature (825)..(825): n is a, c, g, or t
  misc_feature (1229)..(1229): n is a, c, g, or t
tcccgggatcccgaatgtcgttagccgtggggaaagatggcggaaaatttaaaaggctgcagcgtgtgttgcaagtcttcttggaatcagctgcaggacctgtgccgcctggccaagctctcctgccctgccctcggtatctctaagaggaacctctatgactttgaagtcgagtacctgtgcgattacaagaagatccgcgaacaggaatattacctggtgaaatggcgtggatatccagactcagagagcacctgggagccacggcagaatctcaagtgtgtgcgtatcctcaagcagttccacaaggacttagaaagggagctgctccggcggcaccaccggtcaaagaccccccggcacctggacccaagcttggccaactacctggtgcagaaggccaagcagaggcgggcgctccgtcgctggggagcagggagctcaatgccaagcgcagcaatctggggacgcatcactgtagagaatgaggtggacctggacggccctccgcgggccttcgtgtacatcaatgagtaccgtgttggtgagggcatcaccctcaaccaggtggctgtgggctgcgagtgccaggactgtctgtgggcacccactggaggctgctgcccgggggcgtcactgcacaagtttgcctacaatgaccagggccaggtgcggcttcgagccgggctgcccatctacgagtgcaactcccgctgccgctgcggctatgactgcccaaatcgtgtggtacagaagggtatccgatatgacctctgcatcttccgcacggatgatgggcgtgggctggggcgtccgcaccctggnagaagattcgcaagaacagcttcgtcatgggagtacgtgggagagatcattacctcagaggaggcagagcggcggggccagatctacgaccgtcagggcgccacctacctctttgacctggactacgtggaggacgtgtacaccgtggatgccgcctactatggcaacatctcccactttgtcaaccacagttgtgaccccaacctgcaggtgtacaacgtcttcatagacaaccttgacgagcggctgccccgcatcgctttctttgccacaagaaccatccggggcaggcgaagaagctcacctttgattacaacatgcaagtgggaccccgggggacatgggagagcacccgcatggactccaaactttggcctgggctgggctcccctggctcccctaanaaaccgggtccgtattgaaatgcaaagggtggggacttgagttcctggccgcaaatacctcctcctagccccttaaaaaatctgagggcaaaaattggat

SEQ ID NO: 361507 - DNA, 1601 bp, Homo Sapiens
  misc_feature (802)..(802): n is a, c, g, or t
  misc_feature (820)..(820): n is a, c, g, or t
  misc_feature (1478)..(1486): n is a, c, g, or t
cagtgcctttgctaatgtcacgcttgagtgacagatttgttctatataggattggtggaactccacgtcatactccaactattatagaacctgggaatgtggttgtgatccatgactggctatattactatgcttacaaggacttgtctctggtttatctccaagagattcaaatctgctgccatgttagctgtctttgctgtatctgctgtagtacacgaatatgccttggctgtttgcttgagctttttctatcccgtgctcttcgtgctcttcatgttctttggaatggctttcaacttcattgtcaatgatagtcggaaaaagccgatttggaatgttctgatgtggacttctcttttcttgggcaatggagtcttactctgcttttattctcaagaatggtatgcacgtcagcactgtcctctgaaaaatcccacatttttggattatgtccggccacgttcctggacttgtcgttacgtgttttagaagcttggactttgtttcctccttgtcactgaagattgggtagctccctgatttggagccagctgtttccagttgttactgaagttatctgtgttatttggaccactccaggctttacagatgactcactccattcctaggtcacttgaagccaaactgttggaagttcactggagtcttgtacacttaagcagagcagaactttttttgtggggctgggttgggggggagaagaccgactaacagctgaagtaatgacagattgttgctgggtcatatcagctttatcccttggtaaaatatatctggntttgttttcttgactctngtccaatcagaagaataaacatcatagtttcttggccactgaattagccaaaacacttaggaagaaatcacttaaatacctctgggcttagaaattttttcatgcacactgtggaaatgtatgctaattgaacatgcaatttggggaagaaaaaatgtagaatgatttttgctatttctagtagaaagaaaatgtctgttttccaaagataatgttatacatcctattttgtaatttttttgaaaaaagttcaatgttcagttttccttagttttttaccttgttttctctataggtcatgatttctgtgaagcaaaaagatgccttttaccatgaattcttgagtttacatcaataatattgtatattaaggggatcagaagtaggaaggaaaaaataagagatagcagaggaaaaagaaaaacatttcctcttataacttctgaagtaatttgtaaaaaagatttgtagagtcaatcatgtgtttaaattattttatcacaaacttaacatggaagatattcctttttaactttgtggtaacttctttgaagttatttagaaatatcctttggaacaattattttattgtctaataaatattgacttctcttgaattattttgcagactagtgagtctgtaacataagtattaatnnnnnnnnntcatattaaagtgatcattaagaatcccgaagctggcttctgcatttgctcagttatacttttaatggtagtatgtttttaggtggaataaattaatatgtgattggtttcaagg

SEQ ID NO: 361508 - DNA, 1028 bp, Homo Sapiens
  misc_feature (225)..(225): n is a, c, g, or t
caggctgtacgcccggagttcgggatggaaaatcgcggctccggtgccgctctgggctcagccagtgagaggccgggggtgtggtagagagaaggagccggccgggtacttaggaccgcgccagcctctgagcccggcctccttcgcactttcgagtgcgcgtttgctgcccgccgcagcccgggcgttgaaggtagtaaagcggccacccggccgcatcatggntgaccccgctgtcccaccgagcccctcgagccccgccgcccgagcggggaggcgggacaacgaccagaaccttcgcgccccggtggaacgaaacgagctagtgtcgttccgcgcctccggaggaagcagccgctgcatcccctgaacccgtgcccgctcccgggagactccggcatttgcgacctgttcgagtcccccagctccggctcagacggcgcagagagcccctctgcggcgcggggtggtagccccctgcccggaccggcccagcccgtggcgcagctagatctacagaccttccgcgactacggccagagctgctacgccttccgcaaggcgcaggagagccacttccacccgcgggaggcgctggcacaggcagccacaagtgacggcggaatcccgctgtaagctgctcagctggctgatcccggatgcaccgccaattcggcctctccttcgagtcgcatgtgcctgacggtgaacactctggaccgcttcctcaccaccaagccggtggctgcagactgcttacagcatgcttgggggtcaactccttagctcatcgacttgcaaaacaggtggaggttgaaacccgacagccgcggtgacggcagcttcctaggggcccctactgacatggcaagagcacaattcataccacagggcaagaaaagctcatggcaaaagcactccgacaggtgaaaaatacagtggctggcaatcaaaggcatgggcaacccaaccaaaccttgggagattgcaggccccaaaacaaactatacgcagagacaatcttccct

SEQ ID NO: 361509 - DNA, 949 bp, Homo Sapiens
gggtccggaattcccgggatagaggacggggcacaaaccctgaccatgaccccccacaggctgctgccaccgctactgctgctgctagctctgctgctcgctgccagcccaggaggcgccttggcgcggtgcccaggctgcgggcaaggggtgcaggcgggttgtccagggggctgcgtggaggaggaggatggggggtcgccagccgagggctgcgcggaagctgagggctgtctcaggagggaggggcaggagtgcggggtctacacccctaactgcgccccaggactgcagtgccatccgcccaaggacgacgaggcgcctttgcgggcgctgctgctcggccgaggccgctgccttccggcccgcgcgcctgctgttgcagaggagaatcctaaggagagtaaaccccaagcaggcactgcccgcccacaggatgtgaaccgcagagaccaacagaggaatccaggcacctctaccacgccctcccagcccaattctgcgggtgtccaagacactgagatgggcccatgccgtagacatctggactcagtgctgcagcaactccagactgaggtctaccgaggggctcaaacactctacgtgcccaattgtgaccatcgaggcttctaccggaagcggcagtgccgctcctcccaggggcagcgccgaggtccctgctggtgtgtggatcggatgggcaagtccctgccagggtctccagatggcaatggaagctcctcctgccccactgggagtagcggctaaagctgggggatagaggggctgcagggccactggaaggaacatggagctgtcatcactcaacaaaaaaccgaggccctcaatccaccttcaggccccgccccatgggcccctccccgctggttggaaaaagtgttggtgttggctggggtgtcaataaagctgtgcttggggtcgctgaaaa

SEQ ID NO: 361510 - DNA, 1701 bp, Homo Sapiens
  misc_feature (303)..(343): n is a, c, g, or t
  misc_feature (1210)..(1218): n is a, c, g, or t
ttttcgtatcatattttcacgtcacttatcactatctgaaattgctatccatctgttttcttgtttattgtctgtctctgttactagggatcctgtgattttgggtagtacttggctgtcacccaagtacctagaacggggttcactgcacaccgaaagtacgcaaaaatactaagtgaatgaatgtcaggaggatgaaagatggagggaggtgagaaatccatcaaaggctcacagaaagaactcaattcttggatgaaagtcggaagaatcccaacagctaacaagcaaatttgctgagannnnnnnnnnnnnnnnnnnnnnnnnnnnnnnnnnnnnnnnngtcaggcggaagccggggagaaggcccaggaagtgacggccgcctcccggctaccggggacttctggagtccgagaagtcaacggcgcggttgctgcggccgccgcgctccccggcccgaggcgatggagaacggagcggtgtacagccccactacggaggaggacccgggccccgccagaggcccccggagcggcctcgctgcctactttttcatgggccggctcccattgctccggcgcgttctcaagggcttgcagctgttgctgtctctgctggccttcatctgtgaagaagttgtatcacaatgtactttatgtggaggactttatttttttgagtttgtaagctgcagtgcctttcttctgagtctccttatactgattgtgtattgcactccattttatgagagagttgataccacaaaagtaaaatcatcggatttttatattactttgggaacaggatgtgtgtttttgttggcatccatcatttttgtttccacacatgacaggacttcagctgagattgctgcaattgtgtttggatttatagcaagttttatgttcctacttgactttatcactatgctgtatgaaaaacgacaggagtcccagctgagaaaacctgaaaataccactagggctgaagccctcactgagccacttaatgcctaaagactctggggagcagatgttacctaaggtagtgaccctgcattgtggtgcctgagccctggcagaagctcttgtaaaatttgttaattgtttaaaccacttcttttggagagcaaggggaaggtcaagaaggcagttttatcaatattgtgtcagtcaccacaaagtaggccagataagttaaaaaaaannnnnnnnnaaataataattgaaacttatctcaaatggagattttggtgggaggaggagaaaacaattgtttttaaatcacacagctcaacggttgataaatgattctgtcattctgttacaggtcattcttttactaggcttagcttccaaattatgctttatagctgtataaacatcgtgattatattcatctacttagaaattgttttatttttaaattaatttgcttagctgtttgttttgatgcttagattatgttctgttaatgggaatttaacatatttaagaaaccaatatttaaaatgttggtctaggtttttttccttaacatatattaccaggctttactgtatttcactcagccttaaatgttataatattttttggataacggttattaattcttttgagaccttcgtatagcctataaaatgtatggggagatggttgggcaattttatggggtattaaaagccaacaaatatccagc

SEQ ID NO: 361511 - DNA, 804 bp, Homo Sapiens
  misc_feature (623)..(623): n is a, c, g, or t
agaaagaactatgttgctgctggagatcaatgaagccgagtgaatgggggctgaatgtgcgagtccatagctgaagaggagcgccagatggtggaggaatacacttatttatgaaactgtcttgagttcttcttgaattgccagttttcagcctcctcatgcctccgtctcctttagacgacagggtagtagtggcactatctaggcccgtccgacctcaggatctcaacctttgtttagactctagttaccttggctctgccaacccaggcagtaacagccaccctcctgtcatcgccaccaccgttgtgtccctcaaggctgcgaatctgacgtatatgccctcatccagcggctctgcccgctcgctgaattgtggatgcagcagtgccagctgctgcactgtggcaacctacgacaaggacaatcaggcccaaacccaagccattgccgctggcaccaccaccactgccatcggaacctctaccacctgccctgctaaccagatggtcaacaataatgagaatacaggctctctaagtccatcaagtggggtgggcagccctgtgtcagggacccccaagcagctagccagcatcaaaataatctacccccatgacttnggcaagaagatgaccaaatgcagcaagagtcacctgccgagtcagggcccctgtcatcattggactgcaggccctttcatggagtaccacaaggaggtcccatcccaaggagctggtccacattaaactgggggccaataaaaatcaaccccggccgggagaactggcaagcaaaggggca

SEQ ID NO: 361512 - DNA, 1145 bp, Homo Sapiens
cagtccagtctctgctgagagcacaggagcctccagcctgccctgtggcacataccaccccccagcttggcctccccaccagcccgctgagcaggctgccacccccgatgctgagcctcacagcgagcctcctgatcaccaggagcgccctgccgtccaccgcgggatccgctacctgttgtacagagcacagagagccatccgccttcgccatgccctccgcttgcaccctcaattgcatcgggcccctattcggacttggtctccccatgtggtccaagccagcactcctgccatcacagggcccctcaaccatcctgccaatgcccaggaacatcctgcccagctgcaaaggggcatcagcccaccccaccggatacgaggggctgtgcgatcccgcagccgctccctccggggctcctcccatttatcccagtggctcaacaacttttttgccctccccttctcctccatggcttcccagcttgacatgtcttccgtggtgggggcaggggaaagcagagcccagactcttggagcaggtgttccccctggggactctgtcagaggctccatggaggcctctcaagtccaagtgcctctggaagcctctccaattacattcccaccaccctgtgccccagaaaggccccccatcagcccagtcccaggcgcccgtcaagcaggcctctgagagtgctacccttctcttgtaaccttgcagccaacacccctgcccggcccctgagctgcctcctccagcccatgctcttacaggccctgcacagagtagcactcattaattcttggttaaggaatgaatcaacgaatgaatggctatgcatggacctctgggcagggagacctgggtcttctctggctgagaggggaaggctaaggcatggctgagattcaagccaccattccaggcctctttgcccaagaaagaaacttctgtcacccttgcactctcctgtattctgagtccctggccaatagcacagccttccatgccccgacccccaccccaagcctctccactaggcctctgccaggatctaagcccatgagcacagggactggctatcccaagacctggcaaatgtggctgctcaataaacacttgctgaaccctccaaaaaaaa

SEQ ID NO: 361513 - DNA, 729 bp, Homo Sapiens
cgggggagatgcaggggacctggacacagctgccaaccaggctgaggggaggccatctaggggatgcaggaggaggacgggcacacaggataactcgtggatctggggggacagtggtgccctgagcccagaagccccagccgcaaggcaggtggaggggagggaggagttcctgattcactgtgtccagctggggccggcaggagtccacgtggggccactggcgcaggtggctgtgggctgcagtcaccgcctcgggaagcatcagtaactggactggcattagagtgggggaggggccacggggcagaggtgagctgatgccagggaagaaaaggggccccaggaagcgggcgtggtgccagcattgggggtgccacagaggtgggcattgtgaggagcctggcacgcgcagagctctggtcccccagtaacccgattctgctcactcaccgggccagaaggtgtctctgccgatctccacttcctctacgtcttggagatccaggtcggacggctgggagagcaccttagggctggagccaggggagccatgttgatgcccatggaggtgaagctgaggctcgtggtgctgggttccaggtgtccccggtgatgagagactgacaggggacgggacagaaggggactcctgaatgtcccctagggctgccatcttcctgagacctgctgaaggtgtcacacctgggaccttccgagcgggaggag

SEQ ID NO: 361514 - DNA, 1013 bp, Homo Sapiens
gatcctggacaatacctcggagcctcagcccggggaggccaggctggcagccctcaccgcaggagacagagttccctgggccaggtgtcgtcaggcctattttggacgtgggaaaaataagcagtctcttgatgctgtggagaaagcagcgttcttcgtgacgttagatgaaactgaagaaggatacagaagtgaagacccggatacgtcaatggacagctacgccaaatctctactacacggccgatgttacgacaggtggtttgacaagtcgttcacgtttgttgtcttcaaaaacgggaagatgggcctcaacgctgaacactcctgggcagatgcgccgatcgtggcccacctttgggagtacgtcatgtccattgacagcctccagctgggctatgcggaggatgggcactgcaaaggcgacatcaatccgaacattccgtaccccaccaggctgcagtgggacatcccgggggaatgtcaagaggttatagagacctccctgaacaccgcaaatcttctggcaaacgacgtggatttccattccttcccattcgtagcctttggtaaaggaatcatcaagaaatgtcgcacgagcccagacgcctttgtgcagctggccctccagctggcgcactacaaggacatgggcaagttttgcctcacatacgaggcctccatgacccggctcttccgagaggggaggacggagaccgtgcgctcctgcaccactgagtcatgcgacttcgcgcgggccatggtggacccggcccagacggtggaacagaggctgaagcacgtcaacgtagggagtctgagaacgcatcagcactatgtactcgacctcgcccatgaccggctctgcggatcgaaccgtcaccatctacctgccctctaccgtggatgtctacactactctcgcatgcaggagatccccctatacctttacacgacagttacactcttgagccctatgcaagaatcatccaagaaaggccagcaacccatcc

SEQ ID NO: 361515 - DNA, 1597 bp, Homo Sapiens
  misc_feature (675)..(675): n is a, c, g, or t
tgctgggcggtcgtctgctgctgatggacatcgtggatgccgagtaggaggcaccagtggaaggctggattgcagtggcatacgtgggcaaggagcaggcggcccagttccaccaggagaataagggcagtggcccgcaggcctatcccaaggccctggtccagcagatgcggcgggccctcttcctgggtgcctctgccctgcttctcctcatcctgaaccacaacgtggtccgagagctggacatatcccagacttctgctcaggccagtgatcgtcctccattattcctccaatgtcaccaagctgttggatgcattgctgcagaggacccaggccacggctgagatcaccagcggagagtccctgtctgccaatatcgagtggaagttgaccttgtggaccacctgtggcctctccaaggatggctatggaggatggcaggacttggtctgccttggaggcagtcgtgcccaggagcagaaacccctgcagcagctgtggaacgccatcctgctggtggccatgctcctgtgcacaggcctcgtggtccaggcccagcggcaggcgtcgcggcagagccagcgggagctcggaggccaggtggaccctgtttaagcgccgcgtggtgcggagactggcatccctcaagacacggcgctgccggctgagcanggcagcgcagggccctccagatccgggtgctgagacctgtgcggtgtggcctggactacttctgcaacaaacagtggctccgggtgctgccctgtaaacacgagtttcaccgagactgtggggacccctggctgatgctccaccagacctgcccactgtgccaaattcaacgtcctgggtgagcaccaggggtggggtccctcggcctactctgcctgctcctcacctgatgcctctctccctgttcttcttcccctcccctgcagggaaccgctactccgatgattagctgcccagctggactctgcacatggggatggacccttcctgcctgcaccccggtcctcagcctgggctcccaggacaggacaggatgggacagcaggatagacaggacagcaagcccagtgggtgggaggaaggatgagggccccaccatgtccacactgggaaggagggccccacagcttcagactgaggatctagggctgggacctgtcagtcaaggaagagaggtcactttggaaccttctctgcaatcctgtgacgtgagtctgccctccttacaggcagctcccaggtcaataaggaaagagaatatggggccagtgtagctgtcgccagggttctggagagctccctgtggcctgtctgggaattcctgggggctgagactacagtggccaggctttgtgcttatttattggggggtgggttgagggaatactatcttgcttccggggagcccgggactgaccgtctcgcaggatacttcttggccaagctgtctgcccggttgcctctggtcctccagccgtgcgaagccatgggtgccccctggctggccaaacgtggttccccttctagggcctggggcaagaacccaaagccccttaaaaaaccgaacctgatgcctggaacc

SEQ ID NO: 361516 - DNA, 1037 bp, Homo Sapiens
  misc_feature (694)..(694): n is a, c, g, or t
  misc_feature (855)..(855): n is a, c, g, or t
  misc_feature (880)..(880): n is a, c, g, or t
  misc_feature (938)..(939): n is a, c, g, or t
  misc_feature (971)..(971): n is a, c, g, or t
  misc_feature (1002)..(1002): n is a, c, g, or t
  misc_feature (1007)..(1007): n is a, c, g, or t
tggaccggtccggaattcccgggatgccgcagccgctctggggcagatctgggcacgaaagcttctctctgtcccttggcttctgtgtggtcccagaagatatgcctcctccagtttcaaggctgcagacctgcagctggaaatgacacagaagcctcataagaagcctggccccggcgagcccctggtgtttgggaagacatttaccgaccacatgctgatggtggaatggaatgacaagggctggggccagccccgaatccagcccttccagaacctcacgctgcacccagcctcctccagcctccactactccctgcagctgtttgagggcatgaaggcgttcaaaggcaaagaccagcaggtgcgcctcttccgcccctggctcaacatggaccggatgctgcgctcagccatgcgcctgtgcctgccgagtttcgacaagctggagttgctggagtgcatccgccggctcatcgaagtggacaaggactgggtccccgatgccgccggcaccagcctctatgtgcggcctgtgctcattgggaacgagccctcgctgggtgtcagccagcccacgcgcgcgctcctgttcgtcattctctgcccagtgggtgcctacttccctggaggctccgtgaccccggtctccctcctggccgacccagccttcatccgggcctgggtgggcggngtcggcaactacaagttaggtgggaattatgggcccaccgtgttagtgcaacaggaggcactcaagcggggctgtgaacaggtcctctggctgtatgggcccgaccaccagctcaccgaggtggggaaccccatgaacatctttgtctactgggacccacnaagatgggggtgctgggaagctggntgacgccccccgctgaaatggtggttatccctgccctgggagtgggttcagacagagnntctactgggacatggcttcagaaacctggggntgggaagtttccgggggtgggtgggaaaccncaccnaatccacccatgaaaagccaagttggctgg

SEQ ID NO: 361517 - DNA, 954 bp, Homo Sapiens
tgggtggcgaattcggcacgaggctggggcagatctgggcacgaaagcttctctctgtcccttggcttctgtgtggtcccagaagatatgcctcctccagtttcaaggctgcagacctgcagctggaaatgacacagaagcctcataagaagcctggccccggcgagcccctggtgtttgggaagacatttaccgaccacatgctgatggtggaatggaatgacaagggctggggccagccccgaatccagcccttccagaacctcacgctgcacccagcctcctccagcctccactactccctgcagctgtttgagggcatgaaggcgttcaaaggcaaagaccagcaggtgcgcctcttccgcccctggctcaacatggaccggatgctgcgctcagccatgcgcctgtgcctgccgagtttcgacaagctggagttgctggagtgcatccgccggctcatcgaagtggacaaggactgggtccccgatgccgccggcaccagcctctatgtgcggcctgtgctcattgggaacgagccctcgctgggtgtcagccagcccacgcgcgcgctcctgttcgtcattctctgcccagtgggtgcctacttccctggaggctccgtgaccccggtctccctcctggccgacccagccttcatccgggcctgggtgggcggggtcggcaactacaagttacgtgggaattatgggcccaccgtgttagtgcaacaggaagcactcaagcgggcctgtgaacaggtcctctggctgtatgaggcccgaccacagctcacccgaggtgggaaccatgaacatcctttgtctactggacccaccaaagatggggttgcctggagcctggtgacgcccccccgcttgaaatggggttatccctggccttgggaagggtccaaaaacaaattcttactgggaacatgggcttccaaacacc

SEQ ID NO: 361518 - DNA, 2020 bp, Homo Sapiens
agaaagctcagcaaattttcttgccatacttcatgacttcactgtggctaagtgtggggaccagacaggactcgtggagacatccaggtgctgaagccttcagctactgtctcagttttttgaagtttagcaatggcgtctttctctgctgagaccaattcaactgacctactctcacagccatggaatgagcccccagtaattctctccatggtcattctcagccttacttttttactgggattgccaggcaatgggctggtgctgtgggtggctggcctgaagatgcagcggacagtgaacacaatttggttcctccacctcaccttggcggacctcctctgctgcctctccttgcccttctcgctggctcacttggctctccagggacagtggccctacggcaggttcctatgcaagctcatcccctccatcattgtcctcaacatgtttgccagtgtcttcctgcttactgccattagcctggatcgctgtcttgtggtattcaagccaatctggtgtcagaatcatcgcaatgtagggatggcctgctctatctgtggatgtatctgggtggtggcttttgtgatgtgcattcctgtgttcgtgtaccgggaaatcttcactacagacaaccataatagatgtggctacaaaatttggtctctccagctcattagattatccagacttttatggagatccactagaaaaacaggtctcttgaaaacattgttcagccgcctggagaaatgaatgatagggttagatccttccctctttccaaacaaactgatcatccttgggacagtccccactgtcttccaacctcaaacatttcaaagaccttctgcagattcactccctaggggttctgctaggttaacaagtcaaaatctgtattctaatgtatttaaacctgctgatgtggtctcacctaaatccccagtgggtttcctattgaagatcacgaaaccagcccactggataactctgatgcttttctctctactcatttaaagctgttccctagcgcttctagcaattccttctacgagtctgagctaccacaaggtttccaggattattacaatttaggccaattcacagatgacgatcaagtgccaacacccctcgtggcaataacgatcactaggctagtggtgggtttcctgctgccctctgttatcatgatagcctgttacagcttcattgtcttccgaatgcaaaggggccgcttcgccaagtctcagagcaaaacctttcgagtggccgtggtggtggtggctgtctttcttgtctgctggactccataccacatttttggagtcctgtcattgcttactgacccagaaactcccttggggaaaactctgatgtcctgggatcatgtatgcattgctctagcatctgccaatagttgctttaatcccttcctttatgccctcttggggaaagattttaggaagaaagcaaggcagtccattcagggaattctggaggcagccttcagtgaggagctcacacgttccacccactgtccctcaaacaatgtcatttcagaaagaaatagtacaactgtgtgaaaatgtggagcagccaacaagcaggggctcttaggcaatcacatagtgaaagtttataagaggatgaagtgatatggtgagcagcggacttcaaaaactgtcaaagaatcaatccagcggttctcaaacggtacacagactattggcatcagcatcacctagaaacttgttagaaatgcaaattctcaagccgcatcccagacttgctgaatcggaatctctgggggttgggacccagcaagggcacttaacaaaccctcgtttctgattaatgctaaatgtaagaatcattgtaaacattagttctatttctatcccaaactaagctatgtgaaataagagaagctactttgtttttaaatgatgttgaatatttgtcgatatttccatcattaaatttttccttagcattgtctaagtcttccagaaaaaaa

SEQ ID NO: 361519 - DNA, 1733 bp, Homo Sapiens
tcggccatcgggcccttggtggtctttgaatgccaccggaggcgactccccatttaagtggtcccctggggggctgttccatttcaaaaggcgccggggagcccaccctttttccaattcttggaagtcccatgggtgcctaaaccaggcaagggcctggggtgggcacagtccaaatgcttggggcccacagggttatcccaggttggccattcccaccaggccccaaattgcccaggctgggagagccccctgggggaggcatccatcctccagagccctggagggggcaccacatcttcccaggggtgagatcctttcaccacgaggcatctcattcctatacctgaaaactactccagacacttctgttaagggataatccctgatttcctgcagcgaaggcagctctcctaagcctcaggcccagctcctgagaacactgtcctgcaaagcctctgggtccaggcactggcccgcttctttacaccagggccctgagtctggtggtggtggcacctgatgtaggattgagagtgccagcctatgaacgcagctccagtttgatcttctccgtgtctctggagtctggcttcctcactcccagtggcgtttcatcagtgtaaatgcctgtcctgctgaaagaacccgcctttcagatggctgaaaaggcaccaatggggcagtatgtgctccccgttccctgcgtccacatcaggactgtggtccccagcagtaggggtgccacggtctcgcagtctccatggatcagcgctgccgtggggccacgctcctcggcagtgggatacccagggcagagtgcgcctgccggctgcgggcctcggccacctggcggggggagcagaagtcctccaggaagatctgtgccaggttccggagcctggcgctggccgagagggagaagcgaagcatgcactgcaccacgggcgtggcggtcagctctgggagaaagctgcggcccggcgggctcaggtgcatgagcgtggtgatggcagacagcaccgtctcctcattggggctggataggcagttgatgatgagtgggacacttcctgcgtgcaggatgtgctccttgttggccctgtctgggcacaggttgcacaggcctccaatagcaaactccaccagggtctcattctcctccgacagcgaatcgagaaataaatccaggacctgcagctgccgcagatactcgtagttgctggggtcataagcgaagttggcgaggttggcgaggacttgctccttggcgtcttggctttgggtctcctggaattccgtgaccagcgcctgcaggtatcccagccgcccgacgtgggggtccaccttcggcttctgggccatggccgcggtgacggaggacccccagggacgggcgggagggtgggaaaggtgcagggggaaagccgagcgagaccctcacccgctctccacctgtctggagagggaagagggggtcggcaaatgggtttctttcctgggttcagattctgcagtaatttgcagctggaaatgggatatgggagatgggacggggtctcagaatcctgtaggagttgcgtttgaaaatcgaaattggggcgcgggagacagggaaccgtctactggttggggctcgcggagggggcactggcgcaccgtccccggctcctgggctcggttccgggctcccggcggaagccgcgctgtccctaccccatcccgggaattcc

SEQ ID NO: 361520 - DNA, 982 bp, Homo Sapiens
cacacttctgctcccacaactgcttgcgacgcaggcaaggcgggagaggaaaccacgctcggagaagggacgggactcagcttctaggaatcagctgagaagtggagacgctgggaccgcggactccaggacccgggctcagtcacccacgccgggaagctgcccaggatggcaagaacccagcccaggcccacgccgcccccatagctcagtggacccggacctcagggtgcccctgtcctgggaaagttgcttcctgaccctgaggaaacgccagcaggaaagactccacttggtaaacacttttggtggggactgctctgtgacttccgccaatttttctccaggggcagcagcttgatttggaggagctctatcgccccctggtggagatttagccacatgcttctgcaggggccaccgtcaccgttcagactgcagcagcaatagcaaactccaccagggtctcattctcctccgacagcgaatcgagaaataaatccaggacctgcagctgccgcagatactcgtagttgctggggtcataagcgaagttggcgaggttggcgaggacttgctccttggcgtcttggctttgggtctcctggaattccgtgaccagcgcctgcaggtatcccagccgcccgacgtgggggtccaccttcggcttctgggccatggccgcggtgacggaggacccccagggacgggcgggagggtgggaaaggtgcagggggaaagccgagcgagaccctcacccgctctccacctgtctggagagggaagagggggtcggcaaatgggtttctttcctgggttcagattctgcagtaatttgcagctggaaatgggatatgggagatgggacggggtctcagaatcctgtaggagttgcgtttgaaaatcgaaattggggcgcgggagacagggaaccgtctactggttggggctcgcggagggggcactggcgcaccgtccccgg

SEQ ID NO: 361521 - DNA, 488 bp, Homo Sapiens
  misc_feature (29)..(29): n is a, c, g, or t
  misc_feature (31)..(31): n is a, c, g, or t
  misc_feature (475)..(475): n is a, c, g, or t
caccacgctcatgcacctgagcccgcccngncagctttctcccagagctgaccgccacgcccgtgtgcagtgcatgcttcgcttctccctctcggccagcgccaggctccggaacctggcacagatcttcctggaggacttctgctccccccgccagtggccgaggccgcagccggcagcaactctgccctgggtatcccactgccgaggagcgtggccccacggcagcgctgatccatggagactgcgagaccgtggcaaccctactgctggggaccacagtcctgatgtggacgcaaggaacggggagcacatactgccccattgggtgccttttcagccatctgaaaggcgggttctttcagcaggacaagcattttacactgatgaaacgccactgggagttaggaagccagatttcagagacaaggagaagatcaaatttggagttgcttcataaggttggcattttcantctaacatcaggt

SEQ ID NO: 361522 - DNA, 869 bp, Homo Sapiens
  misc_feature (702)..(702): n is a, c, g, or t
cgcgattgaaccgatcccctgtggttggacacagctgatccctggtttcttccccatgattactgagtcgcttttaagatggttgtgcgactgtagagccagagtgagcgtcctaggattggagggggctccccgggcagtgcagtcccgatcctgctcctgcctctgtctctgtccctcaggagatactttaagcgggtggtcctggcagcccggaccaaacggggacacctggtactgaagagtttcaaggacacgccgctggaaggcctggagcagctgctgccggagctgaaggtgcgcacgcccaccctgcagcgcgccctgctcaacctcatgctggtagtctccggcgtggcgatcttcgtcaacgtgggcatggtggtgctaaccgacctcaaggtggccacctccctgctgctgctgctcttcgccatcttcatgggcctgcgggcctccaagatgttcgggcagcggcgcagcgcgcaggcgtaggagctggcgcacatgctgtactatcgcagtacgtccaacaactcggagctgctcagcgccctggcctgcgcgcgcaggacgagcacaccaaggaggcgctgctggctcacagcttcctggcccggcggccaggcggcactcaaggctcgccccgaagagacctccaggtggctcaggtcggaggtggagaactggctcctagccaangtcaggctgtgaggtgaccttcaacggaactcgggccctggcgcatctgcaggccctgacccccagcatgtgattgtacccacccccggggtttccccaaactagacccagtggctccgatcacttccgagcccccgcaagccacgcccagcagtaacatctcctga

SEQ ID NO: 361523 - DNA, 1811 bp, Homo Sapiens
gttgatgtagggagtcggcggtgagaaatggacagcccgcattgaccgaagctttgcgcatgcgttttactgctgggtgaagccgaacctcgggagcccaggacgccctcctgcacatgcgcaggaggctcaatgacagtcgagctttggctaaggctccggggaaagggtctagccatgctgcatgtgacccggggggtctgggggtccagggtccgagtatggccactgttgcccgcgctcctcgggcccccccgggccctctcatcgctggcagccaaaatgggggagtatcgcaagatgtggaaccccagggagccccgcgactgggcccagcagtaccgcgagcgcttcattcccttctccaaggagcagctgctccgcctcctaatacaggaattccactcgagtccggcagagaaggcggctttggaggcgttctcagcccacgtggacttctgcaccctgttccactaccaccaaatcctggcccggctgcaggccttatatgaccccatcaaccctgacagggagaccctcgatcagccatcactaacggatccccagcgtctgtctaatgagcaggaggtgcttcgggctctggagcccctgctggcccaggccaacttctccccgctgtctgaggacaccctggcctacgcgctggtggtccaccaccctcaggatgaggtccaggtgacagtaaatttggatcagtatgtctacattcacttctgggccctgggccagcgagtcgggcagatgcccctgaagtccagcgtgggctccaggcgtggcttcttcaccaagctgccccctgcgggagaggagatactttaagcgggtggtcctggcagcccggaccaaacggggacacctggtactgaagagtttcaaggacacgccgctggaaggcctggagcagctgctgccggagctgaaggtgcgcacgccgaccctgcaacgcgccctgctcaacctcatgctggtagtgaccgcagaggtaaacatcagtcaacggcggcaaggtgcagctcatcgccccccaggcggcccaacacgccagtctcctagaacaaccaacacgatggcggcgggtcacgcgggagtactgcgtcacacatattcacaccccatccctctcctcaaccccgacgaccgacttcgactccctcgtctcttcgccaagtcgtctcgcaccgcgacaagtacggtgcaatgtgcggcgtatcaataaagatgccaccaattttccatactgattcgaagacgtaagcgaagacgcaccgcacgaaacgagtaggacaccccgcactaaacttcacttgtcccaaagaacgcgaagattagcagcaccaaccccccaacctaacttaacgcccaccggcacacacgcgccatctcgccaccttcacacatcactccacgccgcatttccacacctatgcgctattttagtcgagcgtgtgcaccactccacagatagaccggcccagcgatcaacgcagtgcgagacacaccgtccacgcgcgaccgagtctgccagaccagcacagacgacggaagaatgcagccgcgagagtatacgccgtcacctctctccgtcactggtaccacagaatcgcggatacgcctgatatacgccggtccgcgcgacatgcacgtcgactcacagcgtctcgtgctatgagcgtgtaacatgaagacgcaacgcacacatcacaagcaggagactagaactagtcgccgggcactatagaccagatgacgcacagacgcagacacgcctatacatcacacctccaaacaac

SEQ ID NO: 361524 - DNA, 1237 bp, Homo Sapiens
  misc_feature (52)..(88): n is a, c, g, or t
gggatgtatagactcctatagggcgaactggagcttatcgcggtggcggcgnnnnnnnnnnnnnnnnnnnnnnnnnnnnnnnnnnnnnatcaggccaaatcggccgagctcgaattcgtcgagagcggggagtctgagggacccggcggctggtgagcgcccgctggaggctggagcttccgggccctggaaaggggtccccgcgcgccccgggtcggaggcagacccctgggtttgggggacatgggcatttggggcgcctgaacccaagacctctggatgagctgccccgttcagaccatggatcctgaggtgaccttgctgctgcagtgccctggcgggggcctgccccaggagcagatacaggccgagctgagccccgcccatgaccgtcgcccactgccaggtggggacgaggccatcactgccatctgggagacccggctaaaggcccaaccctggctcttcgacgcccccaagttccgcctgcactcagccaccctggcgcctattggctctcgggggccacagctgctcctgcgcctgggccttacttcctaccgagacttcctgggcaccaactggtccagctcagctgcctggctgcgacagcagggtgccaccgactggggtgacacgcaggcctatctggcggacccactgggggtgggcgctgcactagccacagccgatgacttccttgtcttcctgcgccgctcccggcaggtggctgaggcccctgggctggtggacgtacctggtgggcaccctgagcctcaggccctgtgccctggtggcagcccccagcaccaggacctcgctgggcagctggtggtacatgaactcttttccagtgtccttcaggagatctgtgatgaggtgaacctgccgctgctcaccctgagccagcccctgctgttgggcatcgcccgaaatgagaccagtgctggccgagccagtgccgagttctatgtccagtgcagcctgacttctgagcaggtgaggaagcactacctgagtgggggacccgaggcccacgagtctacaggaatcttctttgtggagacacagaacgtgcggagattgcccgagacggagatgtgggctgaactctgcccctcggccaaaggcgccatcatcctctacaaccgggttcagggaagtcccactggagcggccctagggtccccagccctactcccgccgctctgaaaataataaacgactttattcttgg

SEQ ID NO: 361525 - DNA, 272 bp, Homo Sapiens
  misc_feature (150)..(150): n is a, c, g, or t
ccgggccctggaaaggggtccccgcgcgccccgggtcggaggcagacccctgggtttgggggacatgggcatttggggcgcctgaacccaagacctctggatggtagggatgcccgggcgttctggataccctgcgggactcggggcttntgcggggaagatggcacgttttactgcccaaggagtggtcaggggggtggagaagcgctgcggtataccctcaggaggtctgcgacagagggggctagctgcgcagccagggagtggtagtg

SEQ ID NO: 361526 - DNA, 285 bp, Homo Sapiens
  misc_feature (259)..(259): n is a, c, g, or t
  misc_feature (265)..(265): n is a, c, g, or t
gccccttaacatgcctccctaaggacagtgcagaggtctctgaggctcaggaattctggcacagccctggcaggagaagtggcaagcttgaatgcctgggtctcgttgtctccccacagaacgtgcggagattgcccgagacggagatgtgggctgaactctgcccctcggccaaaggcgccatcatcctctacaaccgggttcagggaagtcccactggagcggccctagggtccccagccctactcccgccgctctnaaaatnataaacgactttattcttgg

SEQ ID NO: 361527 - DNA, 1503 bp, Homo Sapiens
  misc_feature (710)..(720): n is a, c, g, or t
  misc_feature (723)..(723): n is a, c, g, or t
  misc_feature (791)..(791): n is a, c, g, or t
  misc_feature (1016)..(1055): n is a, c, g, or t
taggtagcgaggcctgggtggcgaattcggcacgaggccgatggcagggccaccgaggagcatccgagtcccttcggaatcccatactccaaactgtctcagtcgaagcacctaaaggccaggacgggcggtagccagtgggcctcatcggattctaaacggagggctcaagccccccgggaccgcaaagacccctagcagcatgtcccagcctggagccacaccttctgaggccccagcccagactcatgacgcggagggcagacaggccgcctgggcctaccagagcccactgggacggcaggaaggtgggatgggcgggagacgttggcactcacctggtcggtgcaccagtaccaggtggccatgatggtcaggccaaaggtcatcccggtccacggcaggtcccctgtgtgggggtctcgaaacatgtgcatggcgtctgtacgtggcaggtggcaggtggtgttggcaatggtcctggagggaatggcctgggcgtaggctgcctccagctgcccgtaaccaccgatctggtcaaaagctggaggggtcagggtggaacagggacagtttggtggttgcggggccctgactccctgggctcccccctgccttcatctcacaagaaacttcctgatgcatcaaacttgagttttttccacctcatctttcccagtgtttggaaaggtgtgagggtagagggttgnnnnnnnnnnnaangtgtatttgaatgactattttattcgtatttagaataatactattaagtaagcattttgcacatgggnaccccagtgtccccctggcccagcatgagtcattgttggcctctggacactcctcgcccttggacaactggtttctatccaggcttccgattgtccattcaaggaagctaaactactcttttcctgacccttggccgacccccccgacccttccaccctgcttctccccgtccccttgcgggcgcccgtttcacccgtacctgacagcggtcgggccgctaatgnnnnnnnnnnnnnnnnnnnnnnnnnnnnnnnnnnnnnnnntccaactccgaacgcggcaaccccctcacatttcccccctccccgcctgtgcgccctctccgccggcccctttatcgtcccctccccccctccgtttcgcttctcccacgccttttctataccgtattcgtgcgcaaactacttctcaccgccctacgcttgtcctatacgctctggtccgccctcccttaccgaccacgcttacaacgagacgaggccgtcgaatgcgactttcctcgctctccctttagcgcacctttcctcctcgacttacgatgtaccgcgtgttcgcccctttccgtcctcccacgctatctcttaccatacatccccgtatcgccgccccctgcccactcgccacctctcgctgtggtcacgccttcccacacattcgcgaatccaatccacacccaaacccactgtttcgccatttttaaccctattcgca

SEQ ID NO: 361528 - DNA, 951 bp, Homo Sapiens
tgactggccagtaatctagcggtataaggtagcgaggcctgggtggcgaattcggcacgagggaggtctgagagacagaggcagcgtgtttgagctgctggtgcggtggtcagcgcgatgcccaaggccaagggcaaaacccggaggcagaagtttggttacagtgtcaaccgaaagcgtctgaaccggaatgctcgacggaaggcagcgccgcggatcgaatgctcccacatccgacatgcctgggaccacgctaaatcggtacggcagaacctggccgagatggggttggctgtggaccccaacagggcggtgcccctccgtaagagaaaggtgaaggccatggaggtggacatagaggagaggcctaaagagcttgtacggaagccctatgtgctgaatgacctggaggcagaagccagccttccagaaaagaaaggaaatactctgtctcgggacctcattgactatgtacgctacatggtagagaaccacggggaggactataaggccatggcccgtgatgagaagaattactatcaagataccccaaaacagattcggagtaagatcaacgtctataaacgcttttacccagcagagtggcaagacttcctcgattctttgcagaagaggaagatggaggtggagtgactggtttacatcacagctgccccaggctgaggcgtcccccggaccagtgaagctggagccagggtgtaaggcaaggaggtgctgtgtggctccagaggagctggccaggtcccatggaatcagaaggttacacacacacgtgcacactccccgctctggggaaggaactgttctcagaggctccaatttatattcatctgggggttcacggaaaagccagaacctgctgttttcagggtgggtgatgtaaatatagtgtgtacataataaagcaaatatattttacttctctgaaaa

SEQ ID NO: 361529 - DNA, 1369 bp, Homo Sapiens
agcggatctcatcaggaatatgttccctgagaatcttgtccaggcctgttttcagcagtacagaactaagcgtgaagaagtgaagcctcccagcgatccagagatgaacatgacagaagagtccttcacagctgtcgatgacaactgcaattgccaagaagcaaaactagaaggaatacaaaattgttggcatgtattcagatggcataaacgtcctgggcttgattgtcgtttgccttgtctgtggacttgtcaatggaaaaatgggagaaaagggacaaattctggtggatgtcttcaatgctttgagtgatgcaaccatgaaaatcgttcagatcatcatgtgttatatgccactaggtatattggtcctgattgctgggaagatcactagaagttgaagactgggaaatattccgcaagctgggccttgacatggccacagtcctgactgggcttgcaatccactccattgtaattctcccactgatatatttcatagtcgtacgaaagaacccgtttccgatcttgccaggggaatggcccaggctctcctgacagctctcatgatctcttccagttcagactaacactgcctgtcaccttccgctgtgctgaagaaaataaccaggtggacaagaggatcactcgattcgtgttacccgttggtgcaacaatcaacatggatgggactgcgctctatgaagcagtggcagcggtgtttattgcacagttgaatgacctggacttgggcattgggcagatcatcaccatcagtatcacggccacatctgccagcatcggagctgctggcgtgccccaggctggcctggtgaccatggtgattgtgctgagtgccgtgggcctgcccgccgaggatgtcaccctgatcattgctgtcgactggctcctggaccggttcaggaccatggtcaacgtccttggtgatgcttttgggacgggcattgtggaaaagctctccaagaaggagctggagcagatggatgtttcatctgaagtcaacattgtgaatccctttgccttggaatccacaatccttgacaacgaagactcagacaccaagaagtcttatgtcaatggaggctttgcagtagacaagtctgacaccatctcattcacccagacctcacagttctagggcccctggctgcagatgactggaaacaaggaaggacatttccgtgagagtcatctcaaacactgctttaaggaaaagagaaacactaatggcccagtgtacatttgatttgatatacagaccttcagattaatttccatatttgggatcacagccctttgcgctctggggttttgggattttgggtggtggggtaagattgaaagggaa

SEQ ID NO: 361530 - DNA, 1894 bp, Homo Sapiens
  misc_feature (1185)..(1268): n is a, c, g, or t
  misc_feature (1379)..(1379): n is a, c, g, or t
  misc_feature (1437)..(1437): n is a, c, g, or t
  misc_feature (1446)..(1446): n is a, c, g, or t
  misc_feature (1634)..(1634): n is a, c, g, or t
agcgggagttctggagactcaacatgaagctaccggccagggttttctttactctggggtcccggctgccctgtggcctcgctcctcggaggtttttcagttatgggacaaaaatattatatcaaaacactgaagctttgcaatctaaattcttttcacctcttcaaaaagcgatgctaccacctaatagttttcaaggaaaagtggcattcattactgggggaggtactggccttggtaaaggaatgacaactcttctgtccagcctaggtgctcagtgcgtgatagccagccggaagatggatgttttgaaagctaccgcagaacaaatttcttctcaaactggaaataaggttcatgcaattcagtgtgatgtgagggatcctgatatggttcaaaacactgtgtcagaactgatcaaagttgcaggacatcctaatattgtgataaacaatgcagcagggaattttatttctcctactgaaagactttctcctaatgcttggaaaaccataactgacatagttctaaatggcacagccttcgtgacactagaaattggaaaacaactaattaaagcacagaaaggagcagcatttctttctattactactatctatgctgagactggttcaggttttgtagtaccaagtgcttctgccaaagcaggtgtggaagccatgagcaagtctcttgcagctgaatggggtaaatatggaatgcgattcaatgtgattcaaccagggcctataaaaaccaaaggtgcctttagccgtctggacccaactggaacatttgagaaagaaatgattggcagaattccctgtggtcgcctggggactgtagaagaactcgcaaatcttgctgctttcctttgtagtgattatgcttcttggattaatggagcagtcattaaatttgacggtggagaggaagtacttatttcaggggaattcaacgacctgagaaaggtcaccaaggagcagtgggacaccatagaagaactcatcaggaagacaaaaggttcctaagaccactttggccttcatcttggttacagaaaagggaatagaaatgaaacaaattatctctcatcttttgactatttcaagtctaataaattcttaattaacgcgtatgccctccccggactgcctgcccccccgtccgcaggcaaggcccagnnnnnnnnnnnnnnnnnnnnnnnnnnnnnnnnnnnnnnnnnnnnnnnnnnnnnnnnnnnnnnnnnnnnnnnnnnnnnnnnnnnnaatggaactacccgcccgtgcgatgataccgcttcgaacagaggccgcacccctcgcccctatcactctctctctaaacacaatatcatctttataggctacgaaccgccncgtgaatatgcgccccaccaaatgccccccgccggcgcgcgtttctccccccccgctncatggtccnccgtgaagctacgccatcatctgtgcgcgccagcgacccgcccccgtccgcgtgcccccgcccatcacgagtgaatgcagccacccccccgcggtacgccctgtccatcgaggatggaaagacggtcggggcggccaactccgtgacctctatcgcgacccccgaatctgacaccgcaacaaaacccntcatgcctcgcggtggggagccggccagtgacaccatggcgatgctccctcttttctctagcccgactcaacttgtttccaccgctcacggcacctcccgtgtatgtaacacgcgcccccagtgcacccggcccggcgtgatcgcgtactccggaaccaagacggtgagtgataccacaacaccggtccggccatgcagataatccaaacagagtacttcgcgggaacaacgcgtcccctcacctcttccgtccccctgt

SEQ ID NO: 361531 - DNA, 977 bp, Homo Sapiens
  misc_feature (854)..(854): n is a, c, g, or t
agcggggtctggagactcaacatgaagctaccggccaggttttctttactctggggtcccggctgccctgtggcctcgctcctcggagggaagatggatgttttgaaagctaccgcgagaacaaatttcttctcaaactggaaataaggttcatgcaattcagtgtgatgtgagggatcctgatatggttcaaaacactgtgtcagaactgatcaaagttgcaggacatcctaatattgtgataaacaatgcagcagggaattttatttctcctactgaaagactttctcctaatgcttggaaaaccataactgacatagttctaaatggcacagccttcgtgacactagaaattggaaaacaactaattaaagcacagaaaggagcagcatttctttctattactactatctatgctgagactggttcaggttttgtagtaccaagtgcttctgccaaagcaggtgtggaagccatgagcaagtctcttgcagctgaatggggtacatatggaatgcgattcaatgtgattcaaccagggcctataaaaaccaaaggtgcctttagccgtctggacacaactggaacatttgagaacagaaatgattggcagaattccctgtggtcgcctgggactgtagaagaactcggcaatcttgctgctttcctttgtagtgattatgcttcttggattaatggagcagtcatttaaattttgacggtgggagaagaagtacttattcaggggaattcaacgaccctgagaaaggtcccaaggagccagtgggacccatagaagaactcctcccgaagacacaatgtcctaagaccacttgggaccttcattcttgggngtagcggacgaaggggattgcaacttgaagccaaattatctctccgcaatcgtttggacgctagttccacggtctagtaaaattctttaattacgcaacacacaaaaaaatcttcccgacggg

SEQ ID NO: 361532 - DNA, 1520 bp, Homo Sapiens
  misc_feature (335)..(335): n is a, c, g, or t
  misc_feature (346)..(347): n is a, c, g, or t
gtgtaaaaaatgtaaagtggtcttctaattcgttatgtaagctttgtcatagttattaaaaagacggtatcatattagaaagcccccacccactttcccaatgctgtatacattatacaaatccgtgacaaaatgtattaccatttccaaatacctctctgttcattaatttacacttgcatagaaagggaagaagaaaacaataatatatggttattataaaaacagaatatccatttctctttggatagtcagtgttttactctttcagtagaacacacagtcagcactcaacatcgtgggccaaggagccatggagcttctgatttaatggnaacttggaatnntggcatttgctgaaaagggcaacactgtacgtcaggaaacattggttggccggatgaatacttcacattgcctgtggcctgctgggaacatttgggcagcaagatggaaacgtgctgtgaatctgctccatgacctccgtgagatccgtgctggtgtcgtgcggtggggccagcaggtcctctcccgctgcctggtggaactgtgggccggaggcatctggatcaagcgagtagctcagtgcagaatgctgaggagaagcccatggggaaacaccattgattcgggaatcagattcaggctgctccagcagctgtcggaggcggtggagctgagactccagctgtttattgtgatcttctaaaatctgcatcctagcctccagccgacctttgtgctgcctgaggagttttgcttctgctataagttctgaatcctcagacgtgtgatggggagatataatcgactctggcggtgaaccgacagggagcccccttcggaggtgctggtccttcagctgctcatactccacctgtagatttctttgttcttcctccaggtcagcaatgatcctctccagttctccacgttcttccctctctactgacttcaggatctgagctgggctctgcggctggctcactggggactctcctccgagtgtttggcaatactgctggatgagggcgtgctcgtcttccacacttcctgtggtggagctgctatcagtgagaaaagacccattagtcctttccatctgggccagtcgtgtggcatattgttctattcttgaatgggtgtcatcatgaaacagttgaggagattgtgagggggtctctaagttgtcaccttcaagaactgtctggacaggcaggtaaccaagtcgagggtgtttggcaaagtacttcttcgacctgaacttgttcttaagtacctttgtgaagtctcgtacatcttccccagatgttgtaggtatacaatattccaccattgggtaatgtaatttgtgaccttttgctgttcgacccgaaaagaaacaactctggcagacatcatagttaaaatgcttaaggcttctataccattcttcttcttccaacatttgtgctttgacttccactggaagtcatctattaccctagctgtctgccaggctaatgctcactctacttcac

SEQ ID NO: 361533 - DNA, 852 bp, Homo Sapiens; identical to SEQ ID NO: 262531

SEQ ID NO: 361534 - DNA, 831 bp, Homo Sapiens
  misc_feature (103)..(113): n is a, c, g, or t
  misc_feature (774)..(774): n is a, c, g, or t
caaggaaaggcgcgttttcaaaaatcccccctttaggttaaaaaagccaaggaggaaaacccccttattttgcaaaaggccaagaaacttgggccaaggaggnnnnnnnnnnnttttggttcatttttttccccaggcaagtttcccttcccccccattttaggggggaaagggggaagccatgataggggaggttccccttttgggggactcaaaccctgattgggatgttgagcagtcacacgctttctcagaaaaggcacaagcacccccagacattcaggcccggagaacaggctggctcagcagttcttcacgatcgggtgtctcgagccttcttcggaacgaggccacagctgagctggcatgaaaccaggccaggggtgctcctggggttggtaaccacactcattggggtccagggggtcccggctgagcagcacccacactgcaggcacatggcggcgcactgtgagggggtctagccctgtgtcaggtgaggctgggacccagctgtcctcagtctgaaggaaacgtagcttggtgagctggtgcaggcctgggacccgccgcttgacaatctcagcgcagctgacagcctttcctgcagccctgccagaacctgagaacactacatgccgagcactgccgccctccaaccgacccagagccaaccccagcaggttgcgaattttgctgccatctcggacccgcatctcaagggtatcaggaggtagctggggcattggggaaggcgctgggagctctacaganccagctttccggtagtgctccatcctgcttgctgtcttgtctgtgactctcgctgcc

SEQ ID NO: 361535 - DNA, 1100 bp, Homo Sapiens
ggagcgaggcctgggtggcgaattcggcacgaggcgtgaggcggcttcggtgagagccggaaccgggcgggcagaggggcgctcgtagggttgggggacgcctgtggcttggctgcagcggccggcaagaccctggaagagaccgtggctatggaaacggccaaggctgtcttggaatgtcctgagcagccctccgagtcgagcctctgcccccgagtttctgagtgacctgggttgatatagattgaccttgtgggcagcgagagtcacagacaagacagcaagcaggatggagcactaccggaaagctggctctgtagagctcccagcgccttccccaatgccccagctacctcctgatacccttgagatgcgggtccgagatggcagcaaaattcgcaacctgctggggttggctctgggtcggttggagggcggcagtgctcggcatgtagtgttctcaggttctggcagggctgcaggaaaggctgtcagctgcgctgagattgtcaagcggcgggtcccaggcctgcaccagctcaccaagctacgtttccttcagactgaggacagctgggtcccagcctcacctgacacagggctagaccccctcacagtgcgccgccatgtgcctgcagtgtgggtgctgctcagccgggaccccctggaccccaatgagtgtggttaccaacccccaggagcaccccctggcctgggttccatgcccagctccagctgtggccctcgttcccgaagaagggctcgagacacccgatcgtgaagacctgctgagccagcctgttctccgggcctgaatgtctggggtgcttgtgccttttctgagaagcgttgtgactgctcaacatccccatcaaggtttgagtccacaaaagtggacctccctatcatgcttccccttccctctagcatgtgggaagggactgctgtgaagaatgacagatgtggggcctctgccaagttctgcattgctaaataagggcttcctctgccttctacctacagtgcatttgaactgccttctgaaagaggtccagggagggatttaggaaataaagtttctacctatttgatgagcctct

SEQ ID NO: 361536 - DNA, 933 bp, Homo Sapiens
  misc_feature (517)..(517): n is a, c, g, or t
  misc_feature (674)..(674): n is a, c, g, or t
  misc_feature (778)..(778): n is a, c, g, or t
ggaactggatttctctcccgcctgccggcctgcctgccacagccggactccgccactccggtagcctcatggctgcaacctgtgagattagcaacatttttagcaactacttcagtgcgatgtacagctcggaggactccaccctggcctctgttccccctgctgccacctttggggccgatgacttggtactgaccctgagcaacccccagatgtcattggagggtacagagaaggccagctggttgggggaacagccccagttctggtcgaagacgcaggttctggactggatcagctaccaagtggagaagaacaagtacgacgcaagcgccattgacttctcacgatgtgacatggatggcgccaaccctctgcaatggtgcccttgaagagctgcgtctggtcttttgggcctcctgggggaccaactccatgcccagctgcgaaacctcacttccagctcttctgatgagctcagttggatcattgagctgctggagaaggatggcatggnccttccaggaggccctagacccagggccctttgaccagggcagcccctttgcccaggaagctgctggacgacggtcagcaagccagcccctaccaccccggcagctttgtggcgcaggagccccctcccctggccagctctgacgtctccaccgcangggactgggtgcttctcggagctcccactcctcagactcccggtgggaaagtgacgtgggaccctggatcccactggatggcaagctcttccccagcggatggnttttcgtgactgcaaaaaaggggggatccccaagcacggggaaagcggaaacgaagcccggcccccgaaagctgagcaaaaagttactgggaactggtctcgaagggcaagaaagagcaagcacggcccccagaaggaccccacctgttggggag

SEQ ID NO: 361537 - DNA, 1138 bp, Homo Sapiens
  misc_feature (201)..(270): n is a, c, g, or t
ccgtggtggccttccctctctccccccgcaactccctacccggcaccggtccggaattttcgggatggcgctggtggcttctgtgctagtcccggcgcgcgttctgctccgcgcgggtgcgaaacccggggtgggcagggatcgggccggggccggggccaggaccgggaactaacgggctcccccacgctgccttcgcannnnnnnnnnnnnnnnnnnnnnnnnnnnnnnnnnnnnnnnnnnnnnnnnnnnnnnnnnnnnnnnnnnnnngcttcgggagccagcgggtgctggtggagccggacgcgggcgcaggggtcgctgtgatgaaattcaagaaccccccagtgaacagcctgagcctggagtttctgacggagctggtcatcagcctggagaagctggagaatgacaagagcttccgcggtgtcattctgacctcggaccgcccgggtgtcttctcggccggcctggacctgacggagatgtgtgggaggagccccgcccactacgctgggtactggaaggccgttcaggagctgtggctgcggttgtaccagtccaacctggtgctggtctccgccatcaacggagcctgccccgctggaggctgcctggtggccctgacctgtgactaccgcatcctggcggacaaccccaggtactgcataggactcaatgagacccagctgggcatcatcgcccctttctggttgaaagacaccctggagaacaccatcgggcaccgggcggcggagcgtgccctgcagctggggctgctcttcccgccggcggaggccctgcaggtgggcatagtggaccaggtggtcccggaggagcaggtgcagagcactgcgctgtcagcgatagcccagtggatggccattccagaccatgctcgacagctgaccaaggccatgatgcgaaaggccacggccagccgcctggtcacgcagcgcgatgcggacgtgcagaacttcgtcagcttcatctccaaagactccatccagaagtccctgcagatgtacttagagaggctcaaagaagaaaaaggctaacgattgggctgccacaggcttacggccacacgtgcccctgtgggtcccagggaggtcttaaacaaggtatttttcaactt

SEQ ID NO: 361538 - DNA, 1582 bp, Homo Sapiens
  misc_feature (391)..(486): n is a, c, g, or t
  misc_feature (624)..(678): n is a, c, g, or t
  misc_feature (748)..(834): n is a, c, g, or t
  misc_feature (981)..(989): n is a, c, g, or t
  misc_feature (1133)..(1144): n is a, c, g, or t
  misc_feature (1334)..(1334): n is a, c, g, or t
gtcactgttaagggggccgccatggcccggctgtggggcgcgctgagtctttggccactgtgggcggccgtgccgtggggcggggcggcagccgtcggtgtccgggcttgcagctccacggccgccccggacggcgtcgagggcccggcgctgcggcgctcctattggcgccacctgaggcgtctggtgctgggtcctcccgaaccgccgttctcgcacgtgtgccaagtcggggacccggtgctgcgcggcgtggcggccccggtggagcgggcgcagctaggcgggtccgagctgcagcggctgacgtaacggctggtccaggtgatgccgcggcggcgctccgtgggcctactcgcgccgcacctggcggtgtcgccccaggccgctnnnnnnnnnnnnnnnnnnnnnnnnnnnnnnnnnnnnnnnnnnnnnnnnnnnnnnnnnnnnnnnnnnnnnnnnnnnnnnnnnnnnnnnnnnnnnnnnttatattccctattcccccatccgtgcttgccaccctgaccctgaatccataccacccttactcgctgccccagccacccgtataccctaccccccgtcccccatagacaccagcttggatccgcaaatttattcacnnnnnnnnnnnnnnnnnnnnnnnnnnnnnnnnnnnnnnnnnnnnnnnnnnnnnnngattatcggcgtactcccgccaccctacgcacgcctttcctacctccccttatccccaccctcttatcgnnnnnnnnnnnnnnnnnnnnnnnnnnnnnnnnnnnnnnnnnnnnnnnnnnnnnnnnnnnnnnnnnnnnnnnnnnnnnnnnnnnnnnngctatacctgaccatgtagcgccgtcccccgcatgcgctaccccgactcgccatctcccctcctgcccattctccgccaccctccaacctacgcccattaataattgcgcgctattgccgcgtcctcaccgcgcgtatatattttannnnnnnnntatatatccgcccccgcgctgcaccccctattcagtctccccgccatactatatccccaccctctagtttatggcccccactaatatagtcccgccacactccgcgcatagtcaactccgcgcgagtgtctctatcttcattannnnnnnnnnnnaccctatagcctaatcacacttatcgcctccccgttcctcctatatcccccaccactgatcacctaccgtatatgacgcgccccatctctccgatatgctctccccgcccggcttgcgctaacagtcggtatgtatacaggcacacgaagtagacccggaactgcccgccatcagtgctctccgttcccnccgctatgcacgcccctcgcatatcgcgtgcccgttacccgccccatagtcgccgcgcatgcctcgaatagataccagcgcgcgctcatatagcctctgcgccctactacgccccccacgtcagactcaatcactattgccttatatcccacgtcgctatatggctatctcaccacccctacctattgcacacgcactcctgagaactagacggctagccgcgcccgccgctttcgcctatttataca

SEQ ID NO: 361539 - DNA, 1089 bp, Homo Sapiens
tctggctgcgcaggaacagctggtgcctccgagggcggtcggcgagcgcgcgggcgtggggcgctggggggccggtcgggcagcgctgcgggagcagccgccggcaccgccgccttgcaccatcgcatcatgtccgggcagctggagcgttgcgagcgcgaatggcacgagctggagggagaatttcaagaactgcaggagacgcacaggatctacaagcagaagctggaggagctggctgcgctgcagacgctgtgtagcagttccatcagtaagcagaagaagcacctcaaggacttgaagcttacactccagaggtgcaaacgccatgccagtcgggaggaggcggagctcgttcagcagatggcagcgaacatcaaggagcggcaggacgtcttcttccacatggaggcctacctgcccaagaagaacgggctctacttgaaacctggtcctcggcaatgtgaacgtgaccctcctcagcaaccaggccaagttcgcctacaaggacgaatatgagaagttcaagctctacctgaccatcatcctgctcctgggtgccgtggcatgtcgatttgtccttcactacagggtgactgacgaagtcttcaacttcctgctggtgtggtattactgcaccctgaccattcgggagagcattctcatcagcaacggctcaagaattaaaggctggtgggtgtctcaccactacgtctccacattcctgtccggagtgatgctgacctggcctaatggacccatttatcagaagtttcgcaaccagttcttagcattttccatttttcagagctgcgtccagttcctgcaatattattacccgaggggctgcctctaccggctgcgggccctggggggagaggaacccacctggatctcacagtgggaagggttcccagtcctggatgtgggcggggcctcaccttttctcctggcccttcctccttctgtgggccatttcttggcaagctctacaatggccgtcaccgctgtttttgagctcctccaggcccccaaggaatgccaaaaaaatggcaggggggttccctactgggcgggttcacccttccc

SEQ ID NO: 361540 - DNA, 891 bp, Homo Sapiens
catcaaggagcggcaggacgtcttcttcaacatggaggcctacctgcccaagaagaacgggtgtttccttaccaggctctacttgaacctggtcctcgcgcaatgtgaacgtgaccctcctcagcaaccagggccaagttcgcctacaaggtacgaatatgagaagttcaagctctacctgaccatcagtcctgctcctgggtgccgtggcatgtcgatttgtccttcactacagggtgactgacgaagtcttcaacttcctgctggtgtggtattactgcaccctgaccattcgggagagcattctcgatcagcaacggctcaagaattaaaggctggtgggtgtctcaccactacgtctccacattcctgtccggagtgatgctgacctggcctaatggtacccatttatcagaagtttcgcaaccagttcttagcattttccatttttcagagctgcgtccagttcctgcaatattattaccagaggggctgcctctaccggctgcgggccctgggggagaggaacgcagctggatctcacagttggaagggtgccagtcctggcatgtggcggggcctcagcctttctcctgcccttcctcttctgtggccatttctggcagtctctacatatgccgtcacgctgtttgagctctccagccgacgaggaatgccagagaatggcaggtgttcgtactggcgttcaccttcctcatcctcttcctcggcaacttcctgaccacgctcaaaagtcgtgcatgccaagctccagaagaacagaggcaagacaaagcagccgtgagcctcgggctcctgtgccctcgggccggacttcagactgcaggggggctcccgggctccttccccagcagccctctcaagcccgtg

SEQ ID NO: 361541 - DNA, 919 bp, Homo Sapiens
acaaaccccggggacttgcaaaaatacattaaggcagaaggcttttcccttcaaatcaagctgaaaaattcttattttccggctcctcttaactcgcagcacagcatcggggttcaatagcagccaacacagtccagtaacccaacttgttgctatgggatcgagtagttgtgataatgtgtttcccagcagagacttctttcagctgaaacccaaaggcgcctaaacctaaaactccccagattgtcctccccaacacagcatctggtcctgcctcatagttgtaatatggctggttaataactcctgctatggcttttccttcataagcaattccaataagaactgttacattgtcaagaagaccttcggtatattccttggttccatccagaggatcaacccagaccacgagatcttcttctttaatagcactgtactgcgatgggcatggttgcttcagtatttcttcccactgactgtcttcaatcagctcttgatccacttcctcagaaggcagatcctcttcccctataattgtgagtttggggaatttccgggccaatgaagaacatatgctcatctgtgccaatcggtcagctttggtctgcaggtctgttgcacaggtcttctccacaatacccaggtctccttcagcaataacacgtctgactatcattcctgccttttgagcaatagaatatgcggaggctaccaaccgcatcaacacagtgttactggaagccatggtacactctggaacaacgttggaccaaagacacttcaggaggagcaaaagcgcgttatcgtagacccaggtccctcgttgtgtccagtaccgagctttggcactgtcaataagtcttttgagaaggatggcatccctacctcagctactgagcatgcgggaaactccgct

SEQ ID NO: 361542 - DNA, 846 bp, Homo Sapiens
gcaggatttccaataaggctttacccatcccttgtgggtcccgggaaggcccattcccaaggggatatcgggttaaacttgccctccccccagccatttaaaattaccttggggacgccccaagtatccccacttctttccaaccaggaccttgcaattccataagcagggggctttcccttcaatcagctgaataatctcatagtggtaatatggcgggttaataactcctgctatggcctttccttcataagcaatcccaataagaactgttacatagtcaagaagacctccggtatataccttggttccatccagaggatcaacccagaccacgagatattcttctttaatagcactgtactgcgatgggcatggttgcttcagtatatcttcccactgactgtcttcaatcagctcttgatccacttcctcagaaggcagatcctcttccccctataattgtgagtttggggaatttccgggccaatgaagaacatatgctcatctgtgccaatcggtcagctttggtctgcaggtctgttgcacaggtcttctccacaatacccaggtctccttcagcaataacacgtctgactatcattcctgccttttgagcaatagaatatgcggaggctaccaaccgcatcaacacagtgttactggaagccatggtacactctggaacaacgttggaccaaagacacttcaggaggagcaaaagcgcgttatcgtagacccaggtccctcgttgtgtccagtaccgagctttggcactgtcaataagtcttttgagaaggatggcatccctacctcagctactgagcatgcgggaaaccgcccgct

SEQ ID NO: 361543 - DNA, 1518 bp, Homo Sapiens
gctggaccggtccggaattccctggattcaaagccatcgactatgacccactggacaagttcatctactgggtggatgggcgccagaacatcaagcgagccaaggacgacgggacccagccctttgttttgacctctctgagccaaggccaaaacccagacaggcagccccacgacctcagcatcgacatctacagccggacactgttctggacgtgcgaggccaccaataccatcaacgtccacaggctgagcggggaagccatgggggtggtgctgcgtggggaccgcgacaagcccagggccatcgtcgtcaacgcggagcgagggtacctgtacttcaccaacatgcaggaccgggcagccaagatcgaacgcgcagccctggacggcaccgagcgcgaggtcctcttcaccaccggcctcatccgccctgtggccctggtgggtagacaacacactgggcaagctgttctgggtggacgcggacctgaagcgcattgagagctgtgacctgtcaggggccaaccgcctgaccctggaggacgccaacatcgtgcagcctctgggcctgaccatccttggcaagcatctctactggatcgaccgccagcagcagatgatcgagcgtgtggagaagaccaccggggacaagcggactcgcatccagggccgtgtcgcccacctcactggcatccatgcagtggaggaagtcagcctggaggagttctcagcccacccatgtgcccgtgacaatggtggctgctcccacatctgtattgccaagggtgatgggacaccacggtgctcatgcccagtccacctcgtgctcctgcagaacctgctgacctgtggagagccgcccacctgctccccggaccagtttgcatgtgccacaggggagatcgactgtatccccggggcctggcgctgtgacggctttcccgagtgcgatgaccaaagcgacgaggagggctgccccgtgtgctccgccgcccagttcccctgcgcgcggggtcagtgtgtggacctgcgcctgcgctgcgacggcgaggcagactgtcaggaccgctcagacgaggcggactgtgacgccatctgcctgcccaaccagttccggtgtgcgagcggccagtgtgtcctcatcaaacagcagtgcgactccttccccgactgtatcgaccgctccgacgagctcatgtgtgaaatcaccaagccgccctcatacgacagcccgggccacagcagtgccatcgggcccgtccttggaatcatcctcctctctctttcctcatgggtggtggcctattttagtgggccagcccctgggggtgccaccgctatgcggggggaccacgggggcccttcccccgcacaaagtattttcaaccgggaaccccccaccgtgccccctcaatttcataacaccccgggcggatttccaaacatggtcccctttcaaacggcctttcccaggtaagaaattccttgaatcaacccccgttgacccaggagaggg

SEQ ID NO: 361544 - DNA, 1002 bp, Homo Sapiens
ggccagtaactctcgggttataaggtagcgaggcctgggtggcgcaatcagccgttttgacacaccgctggagacaaagggacgcttctacacagacagcaatggccgggagatcctggagaggaggcgggattatcgacccacctggaaactgaaccagacggagcccgtggcaggaaactactatccagtcaacacccggatttacatcacggatggaaacatgcagctgactgtgctgactgaccgctcccaggggggcagcagcctgagagatggctcgctggagctcatggtgcaccgaaggctgctgaaggacgatggacgcggagtatcggagccactaatggagaacgggtcgggggcgtgggtgcgagggcgccacctggtgctgctggacacagcccaggctgcagccgccggacaccggctcctggcggagcaggaggtcctggcccctcaggtggtgctggccccgggtggcggcgccgcctacaatctcggggctcctccgcgcacgcagttctcagggctgcgcagggacctgccgccctcggtgcacctgctcacgctggccagctggggccccgaaatggtgctgctgcgcttggagcaccagtttgccgtaggagaggattccggacgtaacctgagcgcccccgttaccttgaacttgagggacctgttctccaccttcaccatcacccgcctgcaggagaccacgctggtggccaaccagctccgcgaggcagcctccaggctcaagtggacaacaaacacaggccccacaccccaccaaactccgtaccagctggacccggccaacatcacgctggaacccatggaaatccgcactttcctggcctcagttcaatggaaggaggtggatggttaggtctgctgggatgggccctccaagcccaagcctcctgctccgggggcagaccagactctgactctcctcttggggctgctgccattaaaacgctactactaagactc

SEQ ID NO: 361545 - DNA, 1917 bp, Homo Sapiens
ggtttgcgcctgtgtttgtgtccagcgtgagctggagctgctctggcgtacttggttgtcatcgcagcgtgtggtttcctcacggcgtgttgattggtgagggtgaagtatcctgttcgctgcaagtttcaaggtatcgggggccgcttctggtgtaccgtccggaatccttttctacggcacactggtgcatccaaggcgatgcagcaccattttcggggccccatctggccagcgtgagcaggtacaccaaggcggcaggtcctggcgcagccctgagaactgcgtgctcggaggagccccgagattgtagcggcagccgccacccgggccagcaccacctgagggccaaggacctcctgctccgccaggagccggtgtccgccggctgcagccctgggctgtgtccagcagcaccaggtggcagcccttcgcacccacgcccccgacccgttctccattagtggctccgatactccgcgtccatcgtccattcagcagccttcggtgcaccatgagctccagcgagccatctctcaggctgctgcccccctgggagcggtcagtcagcacagtcagctgcatgtttccatccgtgatgtaaatccgggtgttgactggatagtagtttcctgccacgggctccgtctggttcagtttccaggtgggtcgataatcccgcctcctctccaggatctgcccggccattgctgtctgtgtagaagcgtccctttgtctccagcggtgtgtcaaaacggctgatgacctccttcccccaggtgtcgcccacaggtatcggccccaccgaccactctagctccaggtgccgctgtcctgggtacaggcagaaccacctgggaacaccaagctgagaagttctggtgcacctcctgcaccaagggtgtcttcaccaggtggatctgagcccagcggctcacaggcagcggtttctgttggttgggtctgaagatgtaggcacctgaggcctggtcactttcgttgtcacctatactggcgttgtaccagaagaaggtctggcgaacaggcagcaggagttgctgattcatgttcataatctccatcaacagccctgtgtcaggatcaaacgttgcccggatgtgctcattttcgatggttaaagcaggggaccaggatcttctggggatgggctgtggtgcgcgggcctggggcttccagcgaggcacctgggctactgaataggtgctgaagcccagggcgggcagtgaggctgagaacagcagctccggagggtgcgcctggctgtctgagctgggaaatattaccacatcgctgggcactgtcctgccattggggtccttcacaacgaaaacgccttcgctgaccggcagccgtaccatccaattcaccttccgccccaggggattataaacgatgacctggaagcgcgccgccgtctggctgagcgggcagatgctgatgtttagctgttggcaaaaggtgaagtgatctttgaagcctctgagccgcgccagcgcgttgctcagaagaacctcgcaaggcccccagcctgccgcaagctggcgcgcgtagtcgttggccacgtgctggcgggaggtgccgctgacggcgtcgtgatgctggagcacagccatcgcctcattgaggggtgcactgtctccggagccatagggtcccacgttggccgccaggcccaccagcgcctccagctggttgcacacctgcaggaagttgtagctgaggcgctcgtagcgtttgagggccggccgactggaaaagtaaccggtccagaactggtgggggccatccgcgtaagggaagaagtcgtcatgtttcactgaccaggtgaggttggccttgttcagctcccagaggtaacaagcgcctcgtgccgaattcgccacccaggcctcgcta

SEQ ID NO: 361546 - DNA, 530 bp, Homo Sapiens
  misc_feature (360)..(360): n is a, c, g, or t
  misc_feature (364)..(364): n is a, c, g, or t
cacaggatctgccaggatcttctgcagggatagcaggatatgctgatagaggccacttacaaggtccccatgagtcctgtgggagcaccattcagttagggaggggaatgaggcatggtgccacccaacagggcacaagacaacacaaagagaatagcatctgtacagcacactcgggagtgctggggttaagtgaagaaggctgccaggggtgactggcctaggacctgagggctgaagaaccaataccttggcgtatttgtaatccattttcagaatcccagtgtgtcacagcacaccagctaggacgctcctagggaaaaggttccccatcttctcatagactctcaaagccagagnttcngccccatttccttaccccaacccacttggctctgcagcaatcccacccgcagtttaaggcccagtggctaccagaagatgtggctgagcaggagggcagccccatcccgcagagtccagtggtcattcagggggttgatggaggcagccagtggttccaggacaaa

SEQ ID NO: 361547 - DNA, 995 bp, Homo Sapiens
cagggatagttgtatatgctgatagaggccacttacaaggtccccatgagtccagaagatgtggctgagcaggagggcagccccatcccgcagagtccagtggtcattcagggggttgatggaggcagccagtggctccaggacacagtagaggacactgcccaccagacagcggacatagggccccaagcacaggtgcggattacgaaataggctccgtgccacctgcagcagccggtgcagttgctccaggtcatggcttacagatttcaccccactgaccacataaacaaagtaaggcaggagtgccccaatcttggagttcgtctgcaagtcctggagtgcaaccttcatcagttgcggatcatcccctagcacagcacgagtcacctggtgatagtacttgagaaggtcatctgtcagtgaagacacagcactgggcaccgatccttgaggtgccaggttccctttgccatccaggtaggagacatgaactctgacagctgtctcagcacagcctttggggatgttggtagccagggccagctccaccaggttcacctctcgatcctcaggaaagtagagttcaccctccctggcggggcggtcatgggcagtgcctcctgtgatccgtaaccacacacagcctccacgctgctccatctgagggccctgttgaagtcctcaaccgtcagcttccggcgtttggtgtgcttcatgaactgagagctattctgcgtggcctctctcagacgatagcacacgtcctctgcgagcagcgccgccacctcatcgctcagctccaggcccgtgctctccgccatgagccggacagactcccgagggatctccacaaaccgccgctcttctcgctctgacatggccccagtggagctgaagaccccggcgtggcgaaggctgctaccgagacgacggcggcgggggcggtggcggcggcgcccactcacgagctcacactcattcccactcccgct

SEQ ID NO: 361548 - DNA, 1029 bp, Homo Sapiens
ttggggtgaaacaccgccccagcaggctgtgcccagacttcggtcttagcatccaacatgctgcattatgactagttacaggtctgggcccccatctccaactctgagccctccatgcagagcccagcgcccactcagaccatgccacaaggcaggcatgggtaaacacatgttagacgcagactcgggggcacataggcaccaccctcagaacctaagggagaaaattcatccaaagagcctgtttcctacatcaccccttacccgatccttgaggtgccaggttccctttgccatccaggtaggagacatgaactctgacagctgtctcagcacagcctttggggatgttggtagccagggccagctccaccaggttcacctctcgatcctcaggaaagtagagttcaccctccctggcggggcgcatgggcagtgcctcctgtgatccgtaaccacacacagcctccacgctgctccatctgagggccctgttgaagtcctcaaccgtcagcttccggcgtttggtgtgcttcatgaactgagagctattctgcgtggcctctctcagacgatagcacacgtcctctgcgagcagcgccgccacctcatcgctcagctccaggcccgtgctctccgccatgagccggacagactcccgagggatctccacaaaccgccgctcttctcgctctgacatggccccagtggagctgaagaccccggcgtggcgaaggctgctaccgagacgacggcggcgggggcggtggcggcggcgcccactcacgagctcacactcattccctctcccggggccccggccccgccctccccaatacagccagtcggcgggcgccttggaaagtttccggccctccaggaggcttcctggctcttgattggccagtgtgaacagactgtagagaccggcggtcacgtgacgctgaagattcccgcttcttaaagcaacctctcttgctacgtttgcgagtaggtgtgtattgttttaacacacgtttaataagcata

SEQ ID NO: 361549 - DNA, 1170 bp, Homo Sapiens
  misc_feature (974)..(982): n is a, c, g, or t
gggtccggaattcccgggatgccgccggccgccgctggcgcatggcggggagctgtggcgcggggccttccaggagtctgagctatgagtggcccctgtggagagaagcctgtcctggaagccagccccaccatgagtctgtgggaatttgaggacagccacagccgtcagggcaccccaaggccgggtcaagagctggccgctgaggaggcctcggccctggaactgcagatgaaggtggacttcttccggaagctgggctattcatccacggagatccacagcgtcctgcagaagctgggcgtccaggcagacaccaacacggtgctgggtgagctggtgaaacacgggacagccaccgagcgggagcgccagacctcaccggacccctgccctcagctccctctagtcccgcggggtggtggcacccctaaggctcccaacctggagcctccactcccagaagaggaaaaggagggcagcgacctgagaccagtggtcattgatgggagcaacgtggccatgagccatgggaacaaggaggtcttctcctgccggggcatcctgctggcagtgaactggtttctggagcggggccacacagacatcacagtgtttgtgccatcctggaggaaggagcagcctcggcccgacgtgcccatcacagacgctggactcactcccgtacgtctcccaggattgcctggactcgggcattggctccctggagagccagatgtcggaactttggggggttccaagggaggaggcctggggagccgggcccaccccgagccccttaaacgggctaaagtccctatgggatctgagcctccagccacccgcagccttctcttgcctttggccggggccatgggtggcctggccatttaaggggccctgtgcgaaatacccacccggccccctggccttttcaccccccaaaagagtgggtctgaacccaataccatggnnnnnnnnnaatacgagttccttccggaaccccaccgtggaaaaccccccgcggtgctcgccgagattaccctccggcctgggtcgagctagcctcgtcgcaaggtgctgcagccgtcggccggactacatagacgtgtcatggtcggcctgtccccctgcccccgtgcggcgcaggctcgctctcgtgcgtcctcc

SEQ ID NO: 361550 - DNA, 1312 bp, Homo Sapiens
  misc_feature (665)..(737): n is a, c, g, or t
tccggaattcctcgcgatcggggtcgggcctgggtccgacggtagtgggtagcgggtctcgggttgcgggttgcaggttgcaagccgcaggccccaggcaactgccttcccggcgccatgttcggctccagtcgtggaggcgtgcgcggcgggcaggaccagttcaactgggaggacgtgaagactgacaagcagcgggagaactacctgggcaactcgctgatggcgccggtaggccgctggcagaagggccgcgacctcacctggtacgccaagggccgggcgccatgcgcgggcccgagccgcgaggaggaactggcagccgtgcgggaggcggagcgcgaggcgctgctggccgcccttggctacaagaacgtgaagaagcagcccacgggcctgagcaaggaggacttcgcggaggtctgcaagcgggaaggaggcgaccccgaggagaagggcgtggaccggctgctggggctggggagcgcaagtggctccgtgggccgcgtggcgatgtcccgagaggacaaggaggccgccaaactggggctgtctgtgttcacgcatcaccgcgtagagagcggcgggcccgggacctcggcagcctcggccaggaggaagccgcgggcggaggatcagacggaaagcagttgtgagagccacannnnnnnnnnnnnnnnnnnnnnnnnnnnnnnnnnnnnnnnnnnnnnnnnnnnnnnnnnnnnnnnnnnnnnnnngcacaggcggccagctgaggccacctcctctcccacatctcctgagaggcccaggcaccaccaccatgactccgactccaactccccctgctgtaagaggaggaagcggggacacagtggggacaggaggagcccgtctcgcaggtggcatgacagaggctctgaggcctgatggctggaccctgctcactgctgttgtgggaccctgaaccctcccttcaccttgcttgcctcctgcctcggaagctccttgggtgtgggtgaagcccgaggctgctcctgtggaagtggctctgggcaccagcctgtggggctaaagacttgacagctagctctggagcagccggcttcctggaaaacctccaggtttcgcataccagggatggcccctggcttggcctgcgaaggtgaacctgcccagatttatcagtagaggctggactccctctgtgtcctgcccatggttgcagcagccatgggcctatgagcggtctaactgtggccaagtatggtgacctctatttttctttatattgactctttgtatttcaataaatatattttaaaaggaaaaa

SEQ ID NO: 361551 - DNA, 212 bp, Homo Sapiens
ttcccgactagcccgacagtcctcactgtctcacagttgaactggtactgccgccgcgcacgctccacgactggagcctgaacatggcgccgggaaggcagttgcctggggcctgcggcttgcaacctgcaacccgcaacccgagacccgctacccactaccgtcggacccaggcccgaccccgcctcccctgtcgggctagtcgggggggt

SEQ ID NO: 361552 - DNA, 1467 bp, Homo Sapiens
ctcctgctataccttatcaggaaaggcctagcttgaaactgctgggggatctgattcatttccagagcattgtggagagggggtaaaaggaaatgtgacttgaaagagatatttggtatccaacatcagctgtgatgaatcctccccggctatttaggagagcctgtactttgcgaacaaaggatggagtcactctcttctcaaagtcatctataggtgtgtatgaattaaggatctttatgatctgcacagcagacagtgaggtgcagcgttcgtagatctccttggcatcactgtctgtggtcttcttgacctgaagcaaccaggctgcctgagagaggggctccaaagtttcctttgctaagctgttctgcaagttcttatctttaagccattcttctaagtagctgatattgcacctgatctgcatcccttttctgcaggagcacatgtccttgcgcaggaagaggctgttcagcgtgaccgccccgatcaagaagaagagctgcttcaccgcctgcctcacaagctcggggtccaggccgttctggcacatggtggtgtaaaagtagctcagctgttgcaggacggaggtcatggtgtagccgtccgtgtcgtctatgctagaggagcgcttccggaagcctgtgggcttcaggccgggaaatgcccggcaggctctcatactccagcattcccgggaactattatcggtgggatattcttttccattatgataataaattgatgatatattcgtatagccacatcactgagaatctgtctgtattctgaaaggtcaaaattgttcaagcaattcttattctgctgtggactattatgcttcatgaattcctcttctccgctgtactgcttcaggcaattgagaaaatgacaagtgttggaaagccaaaaggacagcatttcaaagtcttctaaatgttccttaaccacctgcttgatgccattaatggtgctgttcatgagggacttcagcatgttggcatcattcagagagtctgcgtagcgcacacacatgaacaggatatgagccggcagcccggggatcatgttcaccaccacgccacggggcttcaagtcaagaatgaggttctgaatgagcttggcctcgtcttctctcttgtattgcagcattccaaggtactccttgggtcctgaggacgagtgcacatcattggctgtagacagaggcaaacaatcagctaaatacacaaaagcagctttcacaggtctcacaatgtgactactctcctaccccattctggctggtttgcacgtaaatgtctgtggctttcagatacattaaaactgtactgtattgtatcctgaagaatttctccaagtagtgattcctctttatgagtacatcagtgagtacagctgctgctgaaaaggcccaattatccttgaagaccttagatcccgagaatccggaccggtccagcc

SEQ ID NO: 361553 - DNA, 1363 bp, Homo Sapiens
gaaggccaggctggtactggtctgggatttatggatcgcgcccccgtggcacgaccccgtgagtctccgcgggcggccagggctgcgcgtgcgcggaggttctcctcgttcctgcccgtttgttcatgctgatggtgaggctctgcgcgtgccgcagctgacggggaaactgagtgcacggagctgggcctgtaggagctgtccaggccatctccaaccatgggagtgaggcacccgccctgctcccaccggctcctggccgtctgcgccctcgtgtccttggcaaccgctgcactcctggggcacatcctactccatgatttcctgctggttccccgagagctgagtggctcctccccagtcctggaggagactcacccagctcaccagcagggagccagcagaccagggccccgggatgcccaggcacaccccggccgtcccagagcagtgcccacacagtgcgacgtcccccccaacagccgcttcgattgcgcccctgacaaggccatcacccaggaacagtgcgaggcccgcggctgttgctacatccctgcaaagcaggggctgcagggagcccagatggggcagccctggtgcttcttcccacccagctaccccagctacaagctggagaacctgagctcctctgaaatgggctacacggccaccctgacccgtaccacccccaccttcttccccaaggacatcctgaccctgcggctggacgtgatgatggagactgagaaccgcctccacttcacgatcaaagatccagctaacaggcgctacgaggtgcccttggagaccccgcatgtccacagccgggcaccgtccccactctacagcgtggagttctccgaggagcccttcggggtgatcgtgcaccggcagctggacggccgcgtgctgctgaacacgacggtggcgcccctgttctttgcggaccagttccttcagctgtccacctcgctgccctcgcagtatatcacaggcctcgccgagcacctcagtcccctgatgctcagcaccagctggaccaggatcaccctgtggaaccgggaccttgcgcccacgccccgggcgaacctctacgggtctcaccctttctacctggcgctggaggacggcgggtcggcacaagggggtgttccctgctaaacaagcaatgccatggatgtggtcctgcagccgagccctgcccttagctggaggtcgacaggtgggatcctggatgtctacatcttcctgggcccagagcccaagagcgtggtgcagcagtacctggacgttgtgggatacccgttcatgccgccatactggggcctgggcttccacctgtgccgctggggctactcctcca

SEQ ID NO: 361554 - DNA, 1121 bp, Homo Sapiens
  misc_feature (95)..(95): n is a, c, g, or t
  misc_feature (174)..(174): n is a, c, g, or t
  misc_feature (230)..(230): n is a, c, g, or t
gccacagcccgcgctctagaaaggggccccccttgtgtccaggggaatttttaaagccccccaattgctcttttcccacccaaaacaccaggggnttgtgggggttgtggtgaatttcggggaaaagggcaaagtggaccccggggcccataccctttcccaaattaaagcggnttggcccgtttttcgttggtggatgaaaaacccccccttcccgcaagacccttgtngtagggccctgtagctccccggcagggccccgagcctgttgatggccaggatcccacgaatcatccatgtagcgcccgcccgcccctggtgcagcttcctgcaccatggcccgggaagtccccggaagccatccttgttgaacgtgaagtccctccggggagtccatgtagtccaggtcgttccattggacgtccagggggaagtgggccctggtcatgttctccaccacctggcgggtgatagcggtggaggagtagccccagcggcacaggtggaagcccaggccccagtatggcggcatgaacgggtatcccacaacgtccaggtactgctgcaccacgctcttgggctctgggcccaggaagatgtagacatccaggatcccacctgtcgacctccagctaagggcagggctcggctgcaggaccacatccatggcattgctgtttagcaggaacaccccgtgtgccgacccgccgtcctccagcgccaggtagaaagggtgagacccgtagaggttcgcaccgggcgtgggcgcaaggtcccggttccacagggtgatcctggtccagctggtgctgagcatcaggggactgaggtgctcggcgaggcctgtgatatactgcgagggcagcgaggtggacagctgaaggaactggtccgcaaagaacaggggcgccaccgtcgtgttcagcagcacgcggccgtccagctgccggtgcacgatcaccccgaagggctcctcggagaactccacgctgtagagtggggacggtgcccggctgtggacacgcggggtctccaagggcacctcgtagcgcctgttagctggatctttgatcgtgaagtggagcctcgtgccgaattcgccacccaggcctcgctacctt

SEQ ID NO: 361555 - DNA, 1170 bp, Homo Sapiens
  misc_feature (666)..(666): n is a, c, g, or t
aatatctgctgcagaaaacggacagacgaatagaagtccatgccatttttatcagcaatgacatgcgcctcaatagctggtttgatccctcctggcgtaagcggatgctcctcaccttgaagagcaataagtacaagtcaagtctggtccatatgattttgggtctctctttacagatttgcttaactaaaaacagcaccttggagccagtgttggctgtttatgtcaatcccttcggaggcagccactctgagagctggtttatgcctgtgaatgaaaacagctttccagactgggagcggactaagttggacctacccctgcagtgttataactggacattaactctggggaacaaatggaagacattttttgagacagtacacatctacctgagaagtcgcatcaagtccaatggtcccaatggtaatgagagcatttactatgaacctctggagtttattgacccttcccggaacctgggctatatgaaaatcaataacattcaagtgtttggctacagcatgcactttgaccctgaagcaattcgggacctgattttgcagctggactacccctatactcagggatcccaggattcagcacttttgcaactactagagatcagagaccgtgtaaataaactctccccacctgggtcagcgntcgtctagatcttttctcttgcttgcttcgtcatagactcaagctgtctacctagtgaagggtggtgaggatccaatctgctctgcaggcgtttaatgccaaattgccaaacacaatggattatgacacgaccaaattatgtagttaaccataaatgtcaagcacaacccaaaatcttgaaggagtttttacagtgcttttgtggaacagtttatgtttggaagagtaaatttaaattgtcttttcaatatctgtcttatatcagtcaataacattggatggcaatttacacacatgaacttgctgacaatgaatatattatacagcagttttggtttatgaatgacataaatactgacaccagtctagaagacattctactttttacaataaatttcatttgtaattttatatgttccgtggcaatgcttttgtgcattacatcctctagagggaacataaaaagataccaataaaattttgtagctgaacagttattaaaaa

SEQ ID NO: 361556 - DNA, 1543 bp, Homo Sapiens
actgagctagtatattctggtatattgagaccgtccactgtcaatgaactggaatctggtcagatttcttatgacgaggttggtgagagaattaaggacttcctccagggttcaagctgcatagcaggcatatacaatgagaccacaaaacagaagcttggcatttatgaggccatgaaaattggcttagtccgacctggtactgctctggagttgctggaagcccaagcagctactggctttatagtggatcctgttagcaacttgaggttaccagtggaggaagcctacaagagaggtctggtgggcattgagttcaaagagaagctcctgtctgcagaacgagctgtcactgggtataatgatcctgaaacaggaaactcatctctttgttccaagccatgaataaggaactcatcgaaaagggccacggtattcgcttattagaagcgacagatcgcaaccggggggatcattgacccaaaggagagccatcgtttaccagttgacatagcatataagaggggctatttcaatgaggaactcagtgagattctctcagatccaagtgatgataccaaaggattttttgaccccaacactgaagaaaatcttacctatctgcaactaaaagaaagatgcattaaggatgaggaaacagggctctgtcttctgcctctgaaagaaaagaagaaacaggtgcagacatcacaaaagaataccctcaggaagcgtagagaggtcatagttgacccagaaaccaataaagaaatgtctgttcaggaggcctacaagaagggcctaattgattatgaaaccttcaaagaactgtgtgagcaggaatgtgaatgggaagaaataaccatcacgggatcagatggctccaccagggtggtcctggtagatagaaagacaggcagtcagtatgatattcaagatgctattgacaagggccttgttgacaggaagttctttgatcagtaccgatccggcagcctcagcctcactcaatttgctgacatgatctccttgaaaaatggtgtcggcaccagcagcagcatgggcagtggtgtcagcgatgatgtttttagcagctcccgacatgaatcagtaagtaagatttccaccatatccagcgtcaggaatttaaccataaggagcagctctttttcagacaccctggaagaatcgagccccattgcagccatctttgacacagaaaacctggagaaaatctccattacagaaggtatagagcggggcatcgttgacagcatcacgggtcagaggcttctggaggctcaggcctgcacaggtggcatcatccacccaaccacgggccagaagctgtcacttcaggacgcagtctcccagggtgtgattgaccaagacatggccaccaggctgaagcctgctcagaaagccttcatagggcttcgaagggtgtgaaggggaaagaagaagatgtcagcagcagaggcagtgaaagaaaatggctcccgatgaggctggccagcgcttctggagtccagtacctccggag

SEQ ID NO: 361557 - DNA, 421 bp, Homo Sapiens
tccagcacctcctcccaacagatttaatatctggcctggatatcgctgggacggagtggacagatccaatggatttgaacagaagcgctttgccaggcttgccagcaagaaggcagtggaggaacttgcctacaaatggagtgttgaggatatgtaactttcctgaggctgtgggggtggctgggctgtggtagtgggcataggcagcgagatatccagtggtaacagtggtctgtgctaataattggagcccacacagaccagcaacttgttgaatgccagtttggaccacagaagaatattcgagacctgatgtttggatctgaggtacctgtacttctagggtgtgacagcaccggctgttgctggctttcagaggaagcattgatttctcattgaccagggtttgttcttggtaggg

SEQ ID NO: 361558 - DNA, 1445 bp, Homo Sapiens
  misc_feature (244)..(244): n is a, c, g, or t
  misc_feature (281)..(281): n is a, c, g, or t
gcaggttgggcctttgcccatcattccccccccattttgggggctttttctcctttccaccggggggctgctccagcaggggagagggtttagggcttgccgcagggccagcagccttcctcctgtttcagccacctgaccttgaggcttccagtgacccgtgggagggccagctgcagagcgggcctccttctttccaagccacttgggtgccacagtgctgggggccacaggctcctcctcntcatgccctggggtcacctcctccttctggctgctcntgaggcccttcctcctccagctcccgaggcagccagtcctccccgtctaggtctaggccctccagggtggccagcagttctcggacctcctctggggggcagggagaggccattgggtcaggggctggacccaggaggagttggaatggatgaaagatggggagcaagtttttagggtacagggtgggcctaagatgggtcagtagacagatgggagcacagagcagggcagggggtgaggtcaagtgagggccacaggatgtgctgagggctcccagggagccctacccagggctcacgtcctcctggtcaccacctgtactgtctggggtccacagggtgtgggcgttgccagggagcactgggagggcctcggtagggtccacctcttcaaggcctgtgtccaacgtggctgtggccaggcgctctgtcccaaagacacactggaactgagcctccagcccctggagaaggtgctgcccttctgggcccaggagaaacctggcgctgcccgggtgctccaggcacaacacatggcagctaatgctgcccagcaggctccgcagaaactcctcagccgcctggcaggaagcctgggctccacagagccgaaagccagtcatatccggtccttcaagtggcaagagagcgacgtctcccaggcccgcaagaaggtcctcatggtagagctgcaggaagcgcatcgcccctggctccatcaatagcaccatctccaccaggccctcctgccctgccagcttcacacatcctgggctcacaggccctgccttctccagagaccccatggtgatctccatgggacccaccagcccctcttgctctggtgagtccatggcaatttccaccaggccctcctgccccagcaaccccttagaggtctccactgggcctgcagaccccacaggccccaggctcatgggcccctcctggtcctgcaaccccacaggcctcaggcttaccagcccctcatgttccagagaccccatgggcatcgagctgacttgctctgcctgtcccagagaccccatgggacctgtcctcagagaggtccctgactgccctggttcctggccagagcctgttgtcataatccctctaccctgcaccatcctcgtgccgaattcgccacccaggcctcgctac

SEQ ID NO: 361559 - DNA, 1832 bp, Homo Sapiens
ctacagatgccgcgaccccccaaatagcaagtgtggacattcacattcaggtgcacaggctgtccgtacagcgaacgttgtcaccattcccggagatagggccccgaccttcaagggggcggtgcggttggcgcgcagttctcaggcgccttctagaatcccctgccagcctccccgctgcctggttaccaaactcggccggggacacccaaaccttcccctctcgaggacctgggttggccagcccagctttgtacgggtgactgaagtccacatcgacgtaacagttgaaagggaaggacgcggagaccacccggtacccgccccaggcgtttccagagtctccgcttaggcggcccgtgggggtcggggtcgcggtcgcggtcgcggaccggggacagagcaatggggcgggcgcgcagcgccggctgcaactcccagagcctcccaccgccgcacccacggccgcctagcagcgcgccgggactgcatttcccataggcccacgctgcggagcaaccgcccacccgagtctcacgcgagtgcgctgccgcgaggtgtccctgccgcagcccccgcccgcccgcagagcttttgaaaggcggcgggaggcggcgagcgccatggccagtccgggccgcctgctgtgcgtgctgggcctgctactctgcggggcggcgagcctcgagctgtctagaccccacggcgacaccaccaagaagcccatcatcggaatattaatgcaaaaatgccgtaataaagtcatgaaaaactatggaagatactatattgctgcgtcctatgtaaagtacttggagtctgcaggtgcgagagttgtaccagtaaggctggatcttacagagaaagactatgaaatacttttcaaatctattaatggaatccttttccctggaggaagtgttgacctcagacgctcagattatgctaaagtggccaaaatattttataacttgtccatacagagttttgatgatggagactattttcctgtgtggggcacatgccttggatttgaagagctttcactgctgattagtggagagtgcttattaactgccacagatactgttgacgtggcaatgccgctgaacttcactggaggtcaattgcacagcagaatgttccagaattttcctactgagttgttgctgtcattagcagtagaacctctgactgccaatttccataagtggagcctctccgtgaagaattttacaatgaatgaaaagttaaagaagtttttcaatgtcttaactacaaatacagatggcaagattgagtttatttcaacaatggacaggatataagtatccagtatatggtgtccagtggcatccagagaaagcaccttatgagtggaagaatttggatggcatttcccatgcacctaatgctgtgaaaaccgcattttatttagcagagttttttgttaatgaagctcggaaaaacaaccatcattttaaatctgaatctgaagaggagaaagcattgatttatcagttcagtccaatttatactggaaatatttcttcatttcagcaatgttacatatttgattgaaagtcttcaatttgttaacagagcaaatttgaataattccatgattaaactgttagaataacttgctactcatggcaagattaggaagtcacagattcttttctataatgtgcctggctctgattcttcattctgtatgtgactatttatataacattagataattaaatagtgagacataaatagagtgtttttcatggaaaagccttcttatatctgaagattgaaaaaaataaatttactgaaataca

SEQ ID NO: 361560 - DNA, 1368 bp, Homo Sapiens
agcggagaggctggcgggcatcgtgcccgtccctgccggtctcccgggcacccggccaccgccccaccccctcctccgtgccatggagcccgagctggcggctcagaagcagcctcgaccgcggaggcgaagccgccgggcctctgggctcagcacggagggagcgacggggccttcggccgacacctccgggtcggagctggacgggagatgttcccttcggagaggcagctccttcacattcttaacacctggccccaactgggacttcactttgaaaagaaaacgcagagagaaagatgatgatgttgtaagccttagcagccttgatctgaaggagccaagcaataaaagagttcgacctctggctcgtgtcacgtccttggcaaatttaatctctcctgtaagaaatggagctgtcagacgttttggtcaaacaatacagtcatttacccttcgtggtgaccacagatccccagcctctgcccagaagttttctagcaggtcaacagtcccaacacccgccaagagaaggagcagtgcactgtggtcagagatgctggacatcaccatgaaggagtctctcaccaccagggagatcagacggcaggaggcaatatatgaaatgtcccgaggtgaacaggatttaattgaggatctcaaacttgcaagaaaggcctaccatgaccccatgttaaagttgtccatcatgtcagaagaggaactcacacatatatttggtgatctggactcttacatacctctgcatgaagatttgttgacaagaataggacgaagcaaccaagcctgatggaacagtggagcagattggtcacattctcgtgagctggttaccgcgcttgaatgcctacagaggttactgtagtaaccagctggcagccaaagctcttcttgatcaaaagaaacaggatccaagagtccaagacttcctccagcgatgtctcgagtctcccttcagtcgaaaactagatctttggagtttcctagatatccctcgaagtcgcctagtcaaataccctttactgttaaaagaaattcttaaacacactccaaaagagcaccctgatgttcagcttctggaggatgctatattgataatacagggagtcctctctgatatcaacttgaaaaaaagtggaatccgagtgccagtattacatccgacagctggagtacctggatgaaaagcagagggaaccccaaaatcgagccgagcaaagtgctgctggtgccatgggggagctgccggagccagaaggggacataaacctttacctttttcctggtttcaagaacatcctggggttcttggactcggccccgttccccacgggaaacgaaacggct

SEQ ID NO: 361561 - DNA, 740 bp, Homo Sapiens
agcggagtagcctctgctccaccgcggcgagaggcatgggcacgtggctgccgagggtggccgagctctgggaagaaaagcccgtgtgcctctgcatagcgtcgctacagcgctgactcggtgtggattgattggaaaggtttgagggagtacttgggaagcatggtggcacatgatgagactggaggtctcctacctattaaaaggaccatacgagtcctagatgtcaataaccagtccttcagagaacaagaggagccaagcaataaaagagttcgacctctggctcgtgtcacgtccttggcaaatttaatctctcctgataagaaagtggagctgtcaggacgtgtttggtcaaacaatacagtcattaacccttcgtggtgaccacagatccacagcctctgcccagaagttttactagcaggtcaacagtcccaacacccgccaagagaaggagcagtgcactgtggtcagaagatgctggacatcaccatgaaggagtctatcaccaccagggagatcagacggcaggacgcaatatatgaaatgtcccgaggtgaacaggatttaattgaggatctcaaaacttgccaagaaaggcctaccatgaccccatgttaaagtgtccatcatgtcagaagaggaactcacacatatattggggatctggactcttacatacctctgcatgaagatttgttgacaagaataggcagaagcaagcaagcctgatggaa

SEQ ID NO: 361562 - DNA, 1585 bp, Homo Sapiens
cggtccggaattcccgggatcccccccgcctctgacttctctgtccgaagtcgggacaccctcctaccacctgtagagaagcgggagtggatctgaaataaaatccaggaatctgggggttcctagacggagccagacttcggaacgggtgtcctgctactcctgctggggctcctccaggacaagggcacacaactggttccgttaagcccctctctcgctcagacgccatggagctggatctgtctccacctcatcttagcagctctccggaagacctttgcccagcccctgggacccctcctgggactccccggccccctgatacccctctgcctgaggaggtaaagaggtcccagcctctcctcatcccaaccaccggcaggaaacttcgagaggaggagaggcgtgccacctccctcccctctatccccaaccccttccctgagctctgcagtcctccctcacagagcccaattctcgggggcccctccagtgcaagggggctgctcccccgcgatgccagccgcccccatgtagtaaaggtgtacagtgaggatggggcctgcaggtctgtggaggtggcagcaggtgccacagctcgccacgtgtgtgaaatgctggtgcagcgagctcacgccttgagcgacgagacctgggggctggtggagtgccacccccacctagcactggagcggggtttggaggaccacgagtccgtggtggaagtgcaggctgcctggcccgtgggcggagatagccgcttcgtcttccggaaaaacttcgccaagtacgaactgttcaagagctccccacactccctgttcccagaaaaaatggtctccagctgtctcgatgcacacactggtatatcccatgaagacctcatccagaacttcctgaatgctggcagctttcctgagatccagggctttctgcagctgcggggttcaggacggaagctttggaaacgctttttctgcttcttgcgccgatctggcctctattactccaccaagggcacctctaaggatccgaggcacctgcagtacgtggcagatgtgaacgagtccaacgtgtacgtggtgacgcagggccgcaagctctacgggatgcccactgacttcggtttctgtgtcaagccccaacaagcttcgaaatggccacaagggggcttcggatcttctgcagtgaagatgagcagagccgcaacctggctggctggctgccttccgcctcttcaagtacggggtggcagctgtacaagaattaacagcaggcacagtctcgccatctgcatccatcttgtttgggctccccacccttgagaagtgcctcagataataccctggtggccatggacttctctggccatgctggggcgtgtcattgagaacccccgggaggctctgagtggggccctgggagaagcccaaggcctggaaggaaaaagacaaaccaccgccctcagcctgcccatgccagcctccgggcacgagccctcagtgcagccatccaccgcaccccaattctggttcccacgggcgcatttccccggtaggaagagccagcggctttattggaa

SEQ ID NO: 361563 - DNA, 1176 bp, Homo Sapiens
  misc_feature (1080)..(1080): n is a, c, g, or t
  misc_feature (1091)..(1091): n is a, c, g, or t
aggctggaccggtccggattcccgggatcaaaaggttcgacccttaaacatgaaggatcattaaatcttttagggttggagaccattagattaatatatttcaaaaataagatggcagaaggggacgaactggtagtacctgaaacatcagataatagtcggaaacaaatggttagaaacattaacaataagcggcgttattccttcagagtcccagaagaggaaaggatgcagcagaggagggaaatgctacgagatccagaaatgagaaataaattaatttctaatccaactaattttaatcacatagcacacatgggtcctggagatggaatacagatcctgaaagatctgcccatgggtcatccgcacagaatggcagcgcattaaagagggaattctctggaggaagctacagtgccaagcggcagcccatgccctccccgtcagagggctctttgtcctccggaggcatggaccaaggaagtgatgccccagcgagggactttgacggagaggactctgactctccgaggcattccacagcttccaacagttccaacctaagcagccccccaagcccagtttcaccccgaaaaaccaagagcctctccctggagagcactgaccgcgggagctgggacccgtgagctgcctcagcactgggacctctcgctctccgctccctgccactcacctcctctcactttcatctcttccctccacctcgcctgctcggcctgaaagccaccaggggctggcagcagtagcaggacagggcttcaggagttctgacgacacgactctcagatccacgcccccagcctaacagcaacaacaaagacagactttccgtagcagcttagattaacgttgatttcattccatgcacttagagttgctttcagtaacattttacccctactcccaaaggtagcttaaataggacagattacacaaatgtaagtgataaggaataagattaggacagattttgcttttcacagtaggagtcttcattatagttcctaaaatagctcatggggcttctccgcatccagaagggaggaatccgttccnggggagtgggntcattaaggtttttattcaggcaaacggcatgaggtattcaacctgattgtttgccggggaattcctatggatttaaaacattgc

SEQ ID NO: 361564 - DNA, 617 bp, Homo Sapiens
aacaggagtccgcgccggcaaagtcccacgctgaggcatcacatccgtggaccatgccaccggaggacaaagagccctctgacggggagggcatgggctcccgcatgccactgtagctacctccagagaataccctctataatgcactagccattctgtgcggataacctatgcagacaagccaatgctagcactcatggagcagcctggctcagggcgggactttggtgatagatggaatactgactgagccactgaatacttgtccgactattcctgaggcccgagggttcagtggacagagcgcagagacggggaatattcagggtttatggaatcaggagagagaaatttttcagcagaattaaacagtcatgtgatagatgtgttcaaagttgatcggagaggagatcagaccggagtgatgatgaggggatggataagggaaacctggcatgggcagatctttcaggactctgtattccatctcccggacccatgtctgctatctgactaaaattagttcacttcccaagtcatttatctctcacttctcgatctcgtagcatttccctcctctgctccatcccttcctcctctccgactctgtaccaatc

SEQ ID NO: 361565 - DNA, 599 bp, Homo Sapiens
attccctctgtaatgcgctgccattctgtgcggatgaccttgctgacaagccactgctcgcactcatggagcggcctggctcagggcgggatttggtgatagatggaatactgactgagccactgaatactgtccgactttcctgaggccgagggttcctcagagtcataaagcttggtgtaccagggacagagcgcagagacggggaatattcaggatttatggaatcaggagagagaaattttgtcagcagaattaacagtcatgtgatagatgtgtgcaaagttgatcggagaggagatcagaccggagtgatgatgaggggatggataagggaaacctggcatgggcagatctttcaggatctgtattccatctccaggacccatgtgtgctatgtgattaaaattagttggattagaaatcaatttatttctcatttctggatctcgtagcatttccctcctctgctgcatcctttcctcttctgggactctgaaggaataacgccgcttattgttaatgtttctaaccatttgtttccgactattatctgatgtgtcaggtactaccagttcggccccagcgggggggatcct

SEQ ID NO: 361566 - DNA, 966 bp, Homo Sapiens
  misc_feature (769)..(769): n is a, c, g, or t
gggcacttgtgaaaatggatctttaaatatggaaataaatggtgaggaagaaatcctaatgaaaaataagaattccttatatttgaaatctgcagagatagactgcagcatatcaagtgaggaaaatacagatgataatataaccgtccaaggtgaaataatgaaggaagatagaatggaaaacctgaaaaatcatgacaataacttgtctcagtctggatcagactcaagttgctctccagaatgcctctgggaggaaggcaaagaagttatcccaactttctttagtaccatgaacacaagctttagtgacattgaacttctggaagacagtggcattcccacagaagcattcttggcatcatgttgtgctgtggttccagtattagacaaacttggccctacagtgtttgctcctgttaagatggatcttgttgaaaatattaagaaagtaaatcagaagtatataaccaacaaagaagagtttaccactctccagaagatagtgctgcacgaagtggaagcggatgtagcccaagttaggaactcagcgactgaagccctctttgtggctgaagagaggtctcaaatttttgaagggatttttgacagaagtgaaaaatggggaaaaggatatcccagacagccctgaataacgcatatggtaaaacattgcggcaacaccatggctgggtagttcgaggggtttttgcgttagctttaagggcaactccatcctatgaagattttgtggccgcgttaaccgtanaggaaggtgaccaccggaaagaagctttcagtattgggatgcagagggacctcagcctttacctccctgccatgaagaagcagatggccatactggacgctttataagaggtccatgggctgaaatctgatgaaggttgaagaatggctgctgggcaaccccctcttaattccaggggataaaagggcttaagtggt

SEQ ID NO: 361567 - DNA, 1130 bp, Homo Sapiens; identical to SEQ ID NO: 262558
  misc_feature (599)..(599): n is a, c, g, or t
  misc_feature (886)..(886): n is a, c, g, or t
  misc_feature (939)..(958): n is a, c, g, or t

SEQ ID NO: 361568 - DNA, 877 bp, Homo Sapiens
ccctcaaaggtgtcacagttgctttggcccggtctgctgttggcccccagccccggttgggttttgttctgcaggttttgcaagggcccggtgcccacctggttgggccaagcctcgagcctctgggagaatctccctttcccccgttcttcgtagatctgctaattagaagtcagagcagatatttccccaagggaacgtagaatgtcatctctttctttaggatcatcacataattctgctattttccgagcttcagccaaagcacctcgaatctgctcttctccttccggtccaccatttggatctgcaagccagttctgagcagcatcgatcttctttgcaatgctctgctttgagttggtcatggcttccagcttgcgagctgcattttccacttttgctgtgagcacatccagaccctgagatacctgctgagctttctgcatggccaccggtgaggatccttgtcctctggcacggaggtcagccacttgatcagtcatctgccctagcattttgcaagttcccagaatctccctgcgttctttgcctgcacagagttcaccaacttttccagcttcatctaagatctgtctgatggcctgctcaccagcatcccctggggaggcactagggtcacggagccaacctttggcctggttcagtttggagtctatggaggccaatgctctcttcatggcttcagtgtccttgctggcccaggcatcttcatcccaagaggtgagttgtaacacacgaattatctcattaatttcagcactcattttttctacagtaaaattgcgattttttaaagcttcctctatgccttggttttttgagtttttagttgttacaaaaatcttcatagctg

SEQ ID NO: 361569 - DNA, 1389 bp, Homo Sapiens
  misc_feature (1106)..(1106): n is a, c, g, or t
agcggcttgttcctcgtggataaggactggcagtcccctgacaccctaagaccggcatctgtcgatgttatttccccagcatggccgaaacagaagccctgtcgaagcttcgggaagacttcaggatgcagaataaatccgtctttattttgggcgccagcggagaaaccggcagagtgctcttaaaggaaatcctggagcagggcctgttttccaaagtcacgctcattggccggaggaagctcaccttcgacgaggaagcttataaaaatgtgaatcaagaagtggtggactttgaaaagttggatgactacgcctctgcctttcaaggtcatgatgttggattctgttgcctgggtaccaccagagggaaagctggggcggagggatttgttcgtgttgaccgagattatgtgctgaagtctgcagagctggcaaaagctggagggtgcaaacatttcaacttgctatcctctaaaggagctgataaatcaagcaattttttatatctacaagttaagggagaagtagaagccaaggttgaagaattaaaatttgatcgttactctgtatttaggcctggagttctgttatgtgataggcaagaatctcgcccaggtgaatggctggttagaaagttctttggctccttaccagactcttgggccagggggcattctgtgcctgtggtgaccgtggttagagcaatgctgaacaatgtggtgagaccaagagacaagcagatggaactgctggagaacaaggccatccatgacctggggaaagcgcatggctctctcaagccatgaccacactgggaaaaatggtttttattgtcaaaccttaacacccatcaccaaaatcggtaatttcagggtctaaaaaaagtcagcatgtttttaactttgttgttttactatcctcaggcatcccattccatcaagaaatgatggtgctctgcatcagtggttcagaagcctggttatacatatagatcactcagggagctttggaaaaataaagatttgtcagccctatctcaaacttgaatcaaaatttctggggtgtgggcacaataatctgtaattttctttgtttatacttcnccctgatgccactggttccgatgccactggctggggggcctgctttgaaatgcttgtctgcagagtcacagcagccatgaaaaccttatgaccgtgcaaatgagctctgctctaaaattgttgacattcatgtctctgagttacaaaagtgctaattcactacatgtaattgtgtaagtaaacattgtgcctttactacttctttatgtaatagaagttatatacctaagcttatataatacatggggaggattaaataaaggaataaagatgaatggacaaa

SEQ ID NO: 361570 - DNA, 1567 bp, Homo Sapiens
ccttagaggggggggccaaccccccaaagaacccctcttttcccccagggggcccagggctctccacgtgggaaacttttggggttttttacccgggcccccaattttccccccaaaggcccaaggggctttttggttcccaaaagagaaggtggcgcctttttcttggaaattcgggagaaattaaaaaatttttgggggggaaatggaccccttaaaaaacccctttcaaattccctttccctttctggaggccccttaaccaggttcgttcaaaaatccatttattccaattccttcgaagttccctgttcctccaggcaggggagtcgatcagattcggggggtcccagcccacactagagagccccattgcccacctggctgcccgctataggcaaaaggcagcttcttggcccgcggtccgcccagggtaggccctgggtgcagtgcagccccgcccgaccgcccatctgtgaggcagggctctggctgaaggcccccagctcaggccctgctgggctcaggccaggcaagccctgctgaggggctgttgggggtggtgctggggccaggggcgctggtcctctgctgtgcactcactgggggtagcaaggaccccacggcagctgctgagctcatgggagccatgggcctgttgggcactgcctgggagaattgcgggctagacaattttcaggtggggcctgctgctgcatgtggaaactggaggctgcagtgaagggactcacgttgctgttcccctggggtctggccactgaggttcggcattccctgatgctgccaggaggaattctggcctcccatggctggtgacacccttgggaccggtggctttgttaaaccagggttcagggtccccttattgtgctgctgggagaggccagagcttcccagagagttctgcccataggcagctgagacggaggtgttctggcccacgttggtctgccgtggaatgtgggcatgtccattggtggcctgtggcgggggctgggcaactatctgggttatgccagaagccatgccatagaggctgctctgaggcatgttttgggagccagggaactgagccacaccccggtcctgttggcctgagtttgtggggagagaggaaactgaagcatgtccagggcccattggcatcagattcccagcctgagggaacactcgaggacagctggagttggatggacccaaggtgttcatgccgggcacggcagcagaggaccctgtgaactgtccaacctgctgtgggaagctgccttgtgtcgggtcttggtactggggtggtgggcgggtcagatggcgctgaaactgttgcttctcctgttccgcgagaaggtgctgttgcctctgaaggaactgctgttgctgtaaatgcttttgctgctgctccctttgtttctgttggtccaaaagcaactgatgctgcttcattacagcggcctgttgctggctgctgagatagggggagctgttgtgggagctggccacggacacggcaggcggccctcgtgccgaatacgccacccaggcctcgctc

SEQ ID NO: 361571 - DNA, 905 bp, Homo Sapiens
aatacgacggctctgggcgctctgtccacttctatcatgggtcctaggccgcacgcctattttggaccagaagcctctgccagtaaattcaagctgctacatccggacttcatcagctacctgacagaaaggttcttgaaatcaaagttgattaacacacattttggagacctatatatgcctagtaccggcgctctcatgctgctgacagctttgcatacctgtgaccaggtcagtgcctatggatgcatcacaagcaactactggaaattttccgaccactatttcgaacgaaaaatgaagccattgatattttatgcaaaccacgatctgtccctggaagctgccctgtggagggacctgcacaaggccggcatccttcagctgtaccagcgctgaccccaatgcactgagccctttgcttcttcaagagttgcggccctgatcctctcaagtggccaaaagcttttttaacttttcaatcttcaccttcccttgccaacagagggcactggggtgaattcaagattttcatcgaggtctgttcaatataggacaccccagcttgtccttggctcatccaagaactcttctgtatctaaaacaatacatctcaatcttggccaagggaaaatggactgctttgctggattggcactgagcaactttaggaaatgtcggtggagtgttcagcaagatcagacagcagtccaggtcaaaggcaaacacacacgctccagcccaaatactcctggtggcacatcctaccccagatgctaaagtgattcaaggactccagggacacctcttaagagcctttctaagaaaatgaaaaaggctaacttcgggtcccataataaaggggggagaaaaagcccggaatataccttaggactagataacgg

SEQ ID NO: 361572 - DNA, 1461 bp, Homo Sapiens
ttttcaagtgaaaggcacagaaatgcaattacagtcctcaaagggttaaatttgacactaccaggttctatgacctttattgtcatggcaacttcaccattttaggatgtctttttatcattgttatttgtgtctttctttactgctaaataatgtctctgagtagtgtgccccactatttcctacaaaagatagcttaacaccaagaacagatgttgaaaataaaggtcagactttgactcacggaaaaagaaaaataacatgcacagatcggacagagagcatataaatatacaaaatatgtgtaagaaaaccaaggtccagagaggcgggccagcaacaaaggaaagactgatttcagaggctcaggccaggcctagtgcagctcgacgacgtttagtgcaatgttccgcggtctcttgcatacctggacgctactgtttctccaactcagtcacatagatcaggtggtcctcgggagacttgccgtgggtcttactaaggtgcagtttgactgcgtgcttgctcgcaaaagtccggttgcagagcttacattggaatgtggagcccaagtcttcctcggtggcccccagtgggcccagagttttgttggtgaggactttcgaaacattctgctgttcttgaatctgattgagtggcagcttggagagatccttcaggctgaagcccaagtgtgtctccaaatgacttatgtatgtagaagcagttctgaactgagaggcacaatcgttgcaaaagaaaacaggatgccctgtgtccaggttctttaggaatttcgttccccctgtcctcctcaactggtacttcacattggccagccagtggctgatggtggtcatggagagcccagtaaacttcgagatgtgcaccctctcctgcgggcccaagtccgacatgatgtacttgccctctgtggtctcccgcaagctcgaggcgaactgggcctgcaggatgagaaggtgctgcgggttccagttggactgccggcccttcctcttgtggaccggtgacagctcgtccaacgcctcctcaaagctgctgccatcagcatcggacttctctgaaactgtggagggcgtggaggacttgggcgtcaggcggcctgtgaggtttttcaccatgtcggagatgtccatgagtgcgctctcccgcagaggtgatgccaccgaatcagccacgctggacaccagcggcttgttcttggacttggttaagtcaatgggctggtcgctgttttcataatagtagcggtcgatggcatcggcctgcttcacaggggtggcggggtacaccggcttgtccagcatgctgttgctgatcttgtacagcatcgccagcgggtccagcgagggactcacgggcttggacaccttgcccaggtgggtgttcatgatggactgcaaagcgctcagcgggttgatgaaggaaggctccggtgag

SEQ ID NO: 361573 - DNA, 912 bp, Homo Sapiens
gaagtgatggagaatggggataacttctcagtgggggaacggcagctcttgtgcatagctagagccctgctccgccactgtaagattctgattttagatgaagccacagctgccatggacacagagacagacttattgattcaagagaccatccgagaagcatttgcagactgtaccatgctgaccattgcccatcgcctgcacacggttctaggctccgatagaattatggtgctggcccagggacaggtggtggagtttgacaccccatcggtccttctgtccaacgacagttcccgattctatgccatgtttgctgctgcagagaacaaggtcgctgtcaagggctgactcctccctgttgacgaagtctcttttctttagagcattgccattccctgcctggggcgggcccctcatcgcgtcctcctaccgaaaccttgcctttctcgattttatctttcgcacagcagttccggattggcttgtgtgtttcacttttagggagagtcatattttgattattgtatttattccatattcatgtaaacaaaatttagtttttgttcttaattgcactctaaaaggttcagggaaccgttattataattgtatcagaggcctataatgaagctttatacgtgtagctatatctatatataattctgtacatagcctatatttacagtgaaaatgtaagctgctttattttatattaaaaaaagcactgtgcctaataacagtgcatattccctttccatcactttttgtaccagtttgcctgaactacaaaatctgggtcttgctatcaaaactggcaagaaagactaacattcttctttccccccctaacctgggcggttcccccggtgaccaggaatccctcgggcggcgccccaaggattaccctgt

SEQ ID NO: 361574 - DNA, 1547 bp, Homo Sapiens
  misc_feature (1299)..(1299): n is a, c, g, or t
ggcctgggtggcgaattcggcacgagggcgtaccacgggccaggccggcggcgggctccgcagctccgagtcgctccccgcggcggccgaagaggcgccagagccccgctgctgggggccccatctgaatcgggctgcgaccaagagtccacagcctacgccagggcggagccgccagggctcggtgccggactacgggcagcggctcaaggccaatctgaaaggcaccctgcaggccggaccagccctgggccgcagaccgtggcctctaggaagagcctcatctaaggcatccaccccaaagcccccaggtacagggcctgtcccctcctttgcagaaaaagtcagtgatgagcctccacagctccctgagccccagccaaggccaggccggctccagcatctgcaggcatccctgagccagcggctgggctccctagatcctggctggttacagcgatgtcacagtgaggtcccagattttctgggggcccccaaagcctgcaggcctgatctaggctcagaggaatcacaacttctgatccctggtgagtcggctgtccttggtcctggtgctggctccccagggcccagaagcttcagccttccaagaagtcagcatccgtgtggggagcccccagcccagcagcagtggaggcgagaagcggagatggaacgaggacccctgggagagccccgcacaggtccagcaggagagcagccaagctggaccccccatcggagggggctgggggctgtaccagttgaggaaaaccccccagggggaacctggacaggaacagccacctcagccctgcagcagcccatcgaaccccaggtaccacggactcagcccctccagtcaagctagggctgggaaggctgagggcacagcccccctgcacatcttccctcggctggcccgccatgacaggggcaattacgtacggctcaacatgaagcagaaacactacgtgcggggccgggcactccgtagcaggctcctccgcaagcaggcatggaagcagaagtggcggaagaaaggggagtgttttgggggtggtggtgccacagtcacaaccaaggagtcttgtttcctgaacgagcagttcgatcactgggcagcccagtgtccccggccagcaagtgaggaagacacagatgctgttgggcctgagccactggttccttcaccacaacctgtacctgaggtgcccagcctggatcccaccgtgctgccactctactccctggggccctcagggcagttggcagagacgcccggctgaggtgtttcangcccctggagcagctggggcacccaagcctttcgccctggggcagggagcgtgcaggtcatgccggatccctgtctgggtgaacgtggcctcccaggggctgaaggcttgggctgaaggcccagcctggcataaacccggctggctggaattccccgccccattccagggcatcttccaccacctggttggggtggttgccttaacgggggcccgggcaaggtcccctgggggcattccaaatccccc

SEQ ID NO: 361575 - DNA, 1393 bp, Homo Sapiens
gaggaccaaggtgggcgggacccggcgagtcctagagactcgagggggcgtggttagagcgtgggtgtggccttgtgggcggggccagtctggcctagccaattacagactctcaaccccaggctgcagtacgcggttcttggcatctgggtgagcgtggctgggctgcctccttcccatctggggggtgctacctgctggggccaggatggacgggagccaccagcagctccctcaagtgagaatggggttctggatgggtccatcccacctgagaactgggtctagtgtgcgcgggtcttggccttccctcccgaccttggaggggctctgctgggctcaaggtaggcggtccccggcccgccctctatcgtcccccaccggggccgcccctctccgcggcaggcgagaagtcgctgcagctggtcatggagtacgtgcccctgggcagcctccgagactacctgccccggcacagcatcaggctggcccagctgctgctcttcgaccagcagatctgcgagggcatggcctatctgcacgcgcagcactacatccaccgagacctagccgcgcgcaacgtgctgctggacaacgacaggctggtcaagatcggggactttggcctagccaaggccgtgcccgaaggccacgagtactaccgcgtgcgcgaggatggggacagccaccgtgttctggtgaccaggcggggtgcagtctgagggggtgctggggtcacttggaacaggcagggtggagtagacggatgctgggtatcatgatagggcatgatcccagtgaagcgcggcggggcctagcggtgcgggggtggggcctatggaggcaaggggcggtgtatagagtgcggcttggcctggtgggcggggttaacccggcctagccaatgagcggcctagccaatgagcatatcaccccgctcaggctgcgctcttaagggtgggtcccaactgagcccagagggtccttcagtctcaggtgagggcttcagcctggtctgatccccaagccctcagtgcagcaccccgtggctgagtgaccacctccccctaggtatgccccagagtgcctgaaaggagtataaagttctactatgcgtcagatgtctggtcccttcgggggtgacgctggtatgagctgggtgacgcacctgggactccagacaagagcacccaccaggaaaattcccttgagcctcataggcataggcgcagggtcagatgacaagtctgagacatcactgagtggctggaaccgaggggagaggctgccacggccccggacggaatgtccctgtgaaggcctatcaactcatgacgaaactgctgggagacagaggcgtccatacggccaagcatcgagaaactcatagcag

SEQ ID NO: 361576 - DNA, 213 bp, Homo Sapiens
ccccctccccataggtatgccccagagtgcctgaaggagtataagttctactatgcgtcagatgtctggtccttcggggtgaccctgtatgagctgctgacgcactgtgactccagccagagcccccccacggtgagagccaggcccgcagccccaccgggagtttgctagagcaattagaaaggcataggctgggccaggcgcggtggctca

SEQ ID NO: 361577 - DNA, 1121 bp, Homo Sapiens
  misc_feature (12)..(12): n is a, c, g, or t
  misc_feature (44)..(44): n is a, c, g, or t
  misc_feature (251)..(390): n is a, c, g, or t
ttccaaagaccnccaagaaaattttaagagacagtccatagaantgggagaaattttctgcaaattttaattgataaggttctagcaaccagagaatacagagaattcttccaattcagtcatttctagccaatgtatctgcagaaaaacagaaaaaactctaataaaaaacaacccaactgctgggtgtggcggctcacacttgtcatcccagcactttgaggtcaggagtttgagacgaacctggccannnnnnnnnnnnnnnnnnnnnnnnnnnnnnnnnnnnnnnnnnnnnnnnnnnnnnnnnnnnnnnnnnnnnnnnnnnnnnnnnnnnnnnnnnnnnnnnnnnnnnnnnnnnnnnnnnnnnnnnnnnnnnnnnnnnnnnnnnnnatcctatcccaaaagcccaactaaactatggagaaaggatttgaataagacatttccccagagaagatacacaaatggccaagcacatgaaaagacgctcagcgtcggtcaacagggaactgagaagagcccacagcaagccacccgttcagcagcatggccagaacaaaaaagacatagtaacaggttgttgaggatgtggagaaaccgcaacctcgtgttggtggtgggaaccttagatggtggagctgctatggaaaaccagcagctcctcatgatggaaaccaccaccagcacttccggccctggcgtgcagccacaggaccaggggcacgggcacacagacgtgtacaccggcgtgcctggcagcatcacgggcaacagcccatcaacagatgagcatgttgtggtccatccatgccacagaatatcatttgcccataaacaggaaggccatactgccacgtgggtggacctcagagacaccatgctgagcaaggccagctgattacaaaaggacaaacgctgtctgagcctgttttcatgaaatatccactgtaggcaaatctcatagaaccaggacctagacaaggggttactaggggccaggggaggggaaaccgagtgacagccaatgggcactgggtttcttctttttacttttttagagacagggcctcaccgaacgcgtgggtcgacgatatcccggaattccggaccgtaccagctgc

SEQ ID NO: 361578 - DNA, 1299 bp, Homo Sapiens
  misc_feature (354)..(355): n is a, c, g, or t
  misc_feature (669)..(677): n is a, c, g, or t
  misc_feature (708)..(729): n is a, c, g, or t
  misc_feature (772)..(821): n is a, c, g, or t
  misc_feature (1115)..(1115): n is a, c, g, or t
  misc_feature (1245)..(1245): n is a, c, g, or t
ggaattcccgggatcgccagctggatgagtactcaagcagtgtagccaacttcctgcaggcccggggcctggcctcgggcgatgtggctgccatcttcatggagaaccgcaatgagttcgtgggcctatggctgggcatggccaagctcggtgtggaggcagccctcatcaacaccaacctgcggcgggatgctctgctccactgcctcaccacctcgcgcgcacgggcccttgtctttggcagcgaaatggcctcagccatctgtgaggtccatgccagcctggacccctcgctcagcctcttctgctctggctcctgggagcccggtgcggtgcctccaagcacagaacacnnctggaccctctgctgaaagatgctcccaagcaccttcccagttgccctgacaagggcttcacagataaactgttctacatctacacatcccggcaccacaggcatgcccaaggaccccatcccggcgtacggcaccgccatcccccacccatctgccctgcggcgatctgcgaccaaaaccgtccaacccacccacgcggactagtggacccctaccccgagataccccttcccccctaaattcccaaacgacccagcgcagccccaataacggctgccacgaaatcgacacactcgtatctcccaccctaaannnnnnnnngaacgccgccccgccgcgaaaccatccggtnnnnnnnnnnnnnnnnnnnnnngcaagacgcagaagcaacccccacgaacccgtgcactaccctnnnnnnnnnnnnnnnnnnnnnnnnnnnnnnnnnnnnnnnnnnnnnnnnnncaataaaataccgcggagaccgcgcgacccgaaataacaccactcgttcgaaccatttaacgcccatagaacgccgcccgccccggccgccgcaaataataaaggccggccccccgcgaatataaaatcggagcgagaaaaatcggcagctcgaacccgcgcgcccactatatgagtccatagcacgcaacggagaactcggtacctccgatatagtacgccgcccgcggattaaatcattggcccggtacgcgagaacccatccggtgagggtactccccccaagtccgcccnccgccggattataacacgcggctatgatatgcaacacagacaggcgccgcctccgcgtccacggcttgaggtacggagcaacccgcgtggtcatacgcctcgccctcacccagctatatacgaggggggncgccaacacgcaaatacccgcccgaccccctcgcataacgcaataatatctccc

SEQ ID NO: 361579 - DNA, 1879 bp, Homo Sapiens
  misc_feature (1098)..(1163): n is a, c, g, or t
  misc_feature (1180)..(1230): n is a, c, g, or t
  misc_feature (1245)..(1255): n is a, c, g, or t
  misc_feature (1678)..(1678): n is a, c, g, or t
ctggccttctccatgctcggaataacttcctgcagcgaccaacaggctaaagagggggaaggtctggagggatccagcaccggctcctcctccggcaaccacggtgggagcggcggaggaaatggacataaacccgggtgtgaaaagccagggaatgaagcccgcgggagcggggaatctgggattcagggcttcagaggacagggagtttccagcaacatgagggaaataagcaaagagggcaatcgcctccttggaggctctggagacaattatcgggggcaagggtcgagctggggcagtggaggaggtgacgctgttggtggagtcaatactgtgaactctgagacgtctcctgggatgtttaactttgacactttctggaagaattttaaatccaagctgggtttcatcaactgggatgccataaacaagaaccaggtcccgccccccagcacccgagccctcctctacttcagccgactctgggaggatttcaaacagaacactcctttcctcaactggaaagcaattattgagggtgcggacgcgtcatcactgcagaaacgtgcaggcagagccgatcagccgggtgcaggatggcaggaggtggcagctgtaacttccaagaactacaattacaaccagcatgcgtatcccactgcctatggtgggaagtactcagtcaagacccctgcaaaaggggggagtctcaccttcttcctcggcttcccgggtgcaacctggcctgctgcagtgggtgaaagttaggtaggcaatttcttgcaaccaccaccgaggccccgaaaagcactggtcgtcagggagctcctccccttggcccccagcctgtgccagccctggcccggctgccacacctctgtttcctaggctggggacccagcttgtctctccttgtttcttcccactgcactgtggtgcttcagtggccaccagcctcgtcacatacaccagcatctttctgtacctcctccctttggtgacctgaagtcactgtgacagttctccaggaaggaggagcttcctacttttgagtttctctgtggaaataaaacatgaatcttgtttccctacccnnnnnnnnnnnnnnnnnnnnnnnnnnnnnnnnnnnnnnnnnnnnnnnnnnnnnnnnnnnnnnnnnncaaccatacaaacaacnnnnnnnnnnnnnnnnnnnnnnnnnnnnnnnnnnnnnnnnnnnnnnnnnnntctttgtcccgcctnnnnnnnnnnntaaataaatcttttataacactttctttttgtcgcccgggccccccctaaggaaatagacaaatgtctccctaaagttgttttccctcaagaaaatcctctccactagaatacacgcgtcggtaaccctcccacaatacaacaaaacccccgcgggggcaaaccccaattcgtttcttgacaaacatcttcccagaaggagcgctcccggaggggtttatattccgtgggacccttctcccccgagagtaacctcccgaaccacaaacctccacacttataaaagtttaaacaccccctggatcctggtcaccaccgaacacggagaaatacattggttgacataatctcataaaaaagcctctctcttccgacaacatgcggcacagcgtctaagcactagccacggtcacgttacaaaaanacctaaaaaaccgccgcccggtggccaaaaaaaccaaccttactggatgtccctcgctgtgtccataaaacaatatctccgcccccgagtggtgcaaaacacaggtcgggagtgaaacaaaagcaacattgcctcccaataatctgtctcaccatttcttatatataatccacaacaatggcgcttggacaacaacactcc

SEQ ID NO: 361580 - DNA, 868 bp, Homo Sapiens
  misc_feature (566)..(590): n is a, c, g, or t
  misc_feature (599)..(637): n is a, c, g, or t
  misc_feature (684)..(756): n is a, c, g, or t
  misc_feature (796)..(804): n is a, c, g, or t
ggcctgggtggcgaattcggcacgaggctccatgctcggaataacttcctgcagcgaccaacaggctaaagagggggaaggtctggaggttggaaagaggactggaatctgattggggttccaacaaatctgtaacaccgctgggaacgactgggtcccctttaggtcctttaggacagcgtttgaaatcttgctttcccctgcagggatccagcaccggctcctcctccggcaaccacggtgggagcggcggaggaaatggacataaacccgggtgtgaaaagccagggaatgaagcccgcgggagcggggaatctgggattcagaactctgagacgtctcctgggatgtttaactttgacactttctggaagaattttaaatccaagctgggtttcatcaactgggatgccataaacaaggaccagagaagctctcgcatcccgtgacctccagacaaggagccaccagattggatgggagcccccacactccctccttaaaacaccaccctctcatcactaatctcagcccttgcccttgaaataaaccttagctgccccacnnnnnnnnnnnnnnnnnnnnnnnnnctcgaggcnnnnnnnnnnnnnnnnnnnnnnnnnnnnnnnnnnnnnnncatggtcatagctgtttcctgacccagctttcttgtacaaagtggtnnnnnnnnnnnnnnnnnnnnnnnnnnnnnnnnnnnnnnnnnnnnnnnnnnnnnnnnnnnnnnnnnnnnnnnnngtgcagtacccgggaatttaacccgcctaaggagcgggcnnnnnnnnngtgaatccaaagggaacttcttggagatccttttttttccggcgagtaaatctgcctggctggc

SEQ ID NO: 361581 - DNA, 1348 bp, Homo Sapiens
  misc_feature (1332)..(1332): n is a, c, g, or t
agcggagctccgctcgcgctctcgccgctcctgccggctcgcccggccccgcgctccgccgtctcctcgccacccgcccctccgccagccccggggaccgcgcggccgcagcctgagccaggccccatccctcgtcaggaccggggcagcaagcaggccgggggcaggtccgggcacccaccatgcgaggcgagctctggctcctggtgctggtgctcagggaggctgcccgggcgctgagcccccagcccggagcaggtcacgatgagggcccaggctctggatgggctgccaaagggaccgtgcggggctggaaccggagagcccgagagagccctgggcatgtgtcagagccggacaggaccaagctgagccaggacctgggtgggggcaccctggccatggacacgctgccagataacaggaccagggtggtggaggacaaccacagctattatgtgtcccgtctctatggccccagcgagccccacagccgggaactgtgggtagatgtggccgaggccaaccggagccaagtgaagatccacacaatactctccaacacccaccggcaggcttcgagagtggtcttgtcctttgatttccctttctacgggcatcctctgcggcagatcaccatagcaactggaggcttcatcttcatgggggacgtgatccatcggatgctcacagctactcagtatgtggcgcccctgattggccaaacttcaaaccctggctactccgacaaactccacaagttgtttacttttgacaatgggacagtctttgtggttcagtgggaccacgtttatctccaaggctgggaagacaagggcagtttcaccttccaggcagctctgcaccatgacggccgcattgtctttgcctataaagagatccctatgtctgtcccggaaatcagctcctcccagcatcctgtcaaaaccggcctatcggatgccttcatgattctcaatccatccccggatgtgccagaatctcggcgaaggagcatctttgaataccaccgcatagagctggaccccagcaaggtcaccagcatgtcggccgtggagttcaccccattgccgacctgcctgcagcataggagctgtgacgcctgcatgtcctcagacctgaccttcaactgcagctgggtgccatgtcctccagagatgctccagtggctttgaccgctatcgccagggagtgggatgggactatgggctgtgcacaggagggcagaggggcaggatgtgcgaggacttccagggatgagggaccacgacttcagccttcccttgacaattcctttcagcccttttgatnggagacctcaccatta

SEQ ID NO: 361582 - DNA, 803 bp, Homo Sapiens
cccggttcagaaggttggtcccccgcaggtcccgggcccggtccgcaaggcgccgcgcgttggcggcgtacctggcagtaagatgcgcgcgtagagtgcacagatcgcggccaggatgcccacgaaggcgagcacgcagaagagcacgtaggccttggcgtagagcggcaagacagtggagcaagcgtccaggcgacccaggcaattccagcccagcgctggcaggagcccgaggagcagcgacacgccccaggccgcggctgccatcgccagcgtgcgcccccgactggagacgggcgcgggccccctgcgcgccatggtgaggctgcgctccagcgcgatggccaggaggctcagcacggacgcagtgagtgccacgaagacgcctccctcccgtgcgaaccagagcgcgggggacagtttcagcgtgagcggccccgacagtaggatgttggcggcgtaggcggcgcctgccagcagatccgacaacgtgaggctgcccaggagcaggaacatgggagcgtggaagcgcgggtggcgtccgagcaccaacaacacggctagattctctagcacgatgaaggcgcacaccgccaggcacaccacggcgtcggcgcgcaggccggcacccggctggtagcgcgcaccgcggagcttgccggtgtagttgtaatgcaggacgatgacctcgctcaccggcgccggccgcagcagccccgactccatgggccgcgcgccccaaggtctgcgccctggtcgtgcgccacccgcagtcgcgctgccttgaaccgagtgaccccgct

SEQ ID NO: 361583 - DNA, 919 bp, Homo Sapiens
  misc_feature (775)..(775): n is a, c, g, or t
aggctggaccggtccggattcccgggatgcatctggatatcagctgcgtgggcatgatatctagaaggctaattgattttttcactttcacctgactctcttgccaacctgcagagacagacattgggtgtaggacagtgaactgagaaggaagctattaagattctggccttggcttagctctcaactggccattggtcttgcagtgacttcatggtcatgacgattttcttcaatgtgagcaggcggtttggctatgttgcctttcaaaactatgtcccttcttccgtgaccacgatgctctcctgggtttccttttggatcaagacagagtctgctccagcccggacctctctagggatcacctctgttctgaccatgaccacgctgggcacattttctcgtaagaatttcccgcgtgtctcctatatcacagccttggatttctatatcgccatctgcttcgtcttctgcttctgcgctctgttggagtttgctgtgctcaagcttcctgatctacaaccagacaaaagcccatgcttctcctaaactccgccatcctcgtatcaatagccgtgcccatgcccgtacccgtgcacgttcccgagcctgtgcccgccaacatcaggaaagcttttgtgtgccagattgtcaccaactgagggaagtgatgggagaggagcgcccgtcttgctcagcccagcagccccctagcccaggtaagccctgagggtccccgcagcctctgctcccagctgccctgcctgtgaatggntgcaaccgtttttaaaaagtacttctgcatggtccccccaattgttgagggcagtaccctgggcagcagggccggcctctggcatccatggtctaacgcctggataactaacctccgaaaagttggtttttcccaggggccttt

SEQ ID NO: 361584 - DNA, 1898 bp, Homo Sapiens
  misc_feature (172)..(222): n is a, c, g, or t
  misc_feature (1425)..(1433): n is a, c, g, or t
cctagcgtgctcgctcgctcattgctttccttccctccctcggtcttccttcgcacgctgtttggtgattgtggcgctcgcgacagacagggaggcggtggcagaggacacttgtcatggccgcctctaaacctgtggaggcagcggtggtcgcagccgctgtaccgagctnnnnnnnnnnnnnnnnnnnnnnnnnnnnnnnnnnnnnnnnnnnnnnnnnnntgccgcgatggcagctggctctggcggtcggggcacccctgctgctgggcgcgggtgccatatacctgtggagtcggcagcaacggcgccgggaggccagaggccggggcgacgccagcggcctgaagcgcaacagcgagcggaagaccccggagggcagggccagtccggccccgggcagcggacaccctgaaggtcccggtgctcacttggacatgaactctcttgatagagcccaagcagccaagaataaaggcaataaatattttaaagcaggaaaatatgaacaagctattcagtgctatactgaggctattagcttgtgccctacagagaagaatgttgacctttctacattttatcaaaacagagctgctgcctttgaacagttggcaaaaatggaaagaagtggcacaagactgtacaaaagctgttgaacttaatcccaaatatgtgaaagctctctttagacgtgcaaaagcccatgagaagctagacaataagaagggaatgtttagaagatgtcactgctgtgtgtatataagaaagggttccaaaatcaacaaagcatgctgttagccgaataaagttcttaaactccttggaaaagagaaagccaaagaaaaatataagaatcgtgaacctctgatgccatctccacagtttatcaaatcttacttcagttctttcacggatgatatcatttcccagcccatgcttaaaggagagaaatctgatgaagataaagacaaggaaggggaggctttagaagtgaaagaaaattctggatacttaaaggccaaacagtatataggaagaagaaaactacgataaaatcataagtgaatagctcaaaagaaatacatgctgaaaggcaaatacatggcagaagcattgctactacgagctaccttctacctgcttattggcaatgccaatgcagccaaaccagatttagataaagtcatcagtttgaaagaagctaatgtgaaggtacattaaaaaatgtgtgtgaagaaattattaaatagaaggcgatgcctttcattatgttttgccagattttttaaagcatttcaactgccattcttcaaagggctgtttttgtttttgaagaaactactcttaataataatgtagttggtgcagtgaatctgaaaacataaatatcaatgatatttatctttatttaagaaaggaaannnnnnnnncctatagcatccggtagtttcatcgtctccctgtagccactgcctaccatattggactgtatttgggcagtggtaaaggtgatatgcaattctgtagataatgctgtcagtaacgtgtaatatgtagcaccaggttataaaacacttaataaaaacacattaatatattcagaaaggttctagaaatagaatgcataaatatgccaaaagtcttgcagttgtacagttggaacagcctttcattttctaagtattcttaatgtgctatgcattacacatttcataattaagattcaggtgcatctgatgaattgttacattctattcagtgtaacaaaacaatttaaccaccaattaactatattacctgattagcttgataacatctctgtgacctgtttcctcattgcattaaatgaactctggtagcctctctactctcctatatttggggggggatatcaa

SEQ ID NO: 361585 - DNA, 1196 bp, Homo Sapiens; identical to SEQ ID NO: 262576
  misc_feature (1016)..(1016): n is a, c, g, or t
  misc_feature (1045)..(1095): n is a, c, g, or t

SEQ ID NO: 361586 - DNA, 831 bp, Homo Sapiens
tgagccaccgcgcccggccgggagtatttttataaagcctttttgtacagattaatcggccatgtccaggttattggttttgatattttataggacatttgagtggtgtggcgatgtgtagagaatgtgccagagctgcagagacagtccattctgggctgctggctttttgcccttcctgcatgatttccagctactgtgacctggatgctgggaacccaggcatcggctccaaaaattagaaggcgagtgctgagaagacttgtcacaggtttctcaaatcagaatatactcagtcatagtggttccctgggaagccccagaccctttgacttgtgacattactggtttgcagacataataactacactcagaggaccatggaggcagagggatcatggcttcagggcactgaaaactctacgagccaagaggactagtgcatggactgaaagtcaggcatgcccttcaaataggctgtattttctttccaggagatgtaacctttccccctttttcttctgacctgagccaagattgggaaatcagaaagtctcctgttacagggagctgaaggaggggctgctgttttccgaatgttttccatttcacaggcgccacctgcttgcccggggttggtccttgaaaagaccccccaatgttcattgcctcacaacgggagcaaaatgccttttaagaaattttttttaagcaattttgaagctatatacaaagtctggtacagaattaaacaatttgtttcctcctccttttctcacctcatttccctggacggtggttatctgaaccctggcttggaccgacgatgtt

SEQ ID NO: 361587 - DNA, 1207 bp, Homo Sapiens
cggccccggaattccgggatatcgtcgacccacgcgtcggtcgagctcaggaagcccctagagaacctgggaatgaccgacatgttcagacagtttcaggctgacttcacgagtctttcagaccaagagcctctccacgtcgcgcaggcgctgcagaaagtgaagatcgaggtgaacgagagtggcacggtggcctcctcatccacagctgtcatagtctcagcccgcatggcccccgaggagatcatcatggacagacccttcctctttgtggtccggcacaaccccacaggaacagtccttttcatgggccaagtgatggaaccctgaccctggggaaagacgccttcatctgggacaaaactggagatgcatcgggaaagaagaaactccgaagacaaaaagaattttagtgttaatgactctttctgacaggacagagaagacatgtgccttttgttaaacagatggtaaaccagatctgtctccaagaccttggcctctccttggaggaccttataggtcaaacctccctagttctccacctgaggaccctgggagacaagtttgaacgccacaaactcccttaaaggtctccaaaccagacggtgacgcctgcgggaccatctggggcacctgcttccacccgtctctctgcccactcgggtctgcagacctggttcccactgaggccctttgcaggatggaactacggggcttacaggagcttttgtgtgcctggtagaaactatttctgttccagtcacattgccatcactcttgtactgcctgccaccgcggaggaggctggtgacaggccaaaggccagtggaagaaacaccctttcatctcagagtccactgtggcactggccacccctccccagtacaggggtgctgcaggtggcagagtgaatgtcccccatcatgtggcccaactctcctggcctggccatctccctccccagaaacagtgtgcatgggttattttggagtgtaggtgacttgtttactcattgaagcagatttctgcttccttttatttttataggaatagaggaagaaatgtcagatgcgtgcccagctcttcaccccccaatctcttggtggggaggggtgtacctaaatatttatcatatccttgcccttgagtgcttgttagagagaaagagaactactaaggaaaataatattatttaaactcgaaa

SEQ ID NO: 361588 - DNA, 866 bp, Homo Sapiens
  misc_feature (749)..(749): n is a, c, g, or t
gtgactgggacaacctgcgggattacaggcgtgagccaccgcacctggcctgtttattctcttaaaaaagaaaatgaggggattaatggactgtagttctggacaaggtggaaaactcttaaagtggaagtattggggcaagtgctctgacaggctaggatggtgcagtcagtcccttcacccagaaatcagtagaatgttaacagttcagactcaaaccttgtgaaaaacaggtggtggaaaggaaatccctcacagcaactggcaccataatcaagacagaatgtttgcagaataaatggagttacctgctttcagccccaggttgtagctattgtctgccctgatgatatgtggtaataatttgtgatcctattgtcttaaaatggggtcactcatctccagtagaattaagtccacagtgaagttgtccccccatccccaaagagataaacatatatgaatgaactcacgtgataacaactactgctgcctgggatcatgagagacctgaactgaactgataggaagtgaaaggtggctgagataatgagaatagacccatctgcagaggatcataaaaccagcaaagacaagatcttgtctaagatgccttcacaagctttgtccatgagaactcttaaggatttcaccagacctgttggctgctgctgtgatctctgcccaagaggagcctctgaccaacatccaaagggcttctgggacccactgggactcctctggagggnaccttggtctcccgatccatgggctgtggtttttttactccctttatcactgcctgtgtgtagaatgataattgcacaattgatagtgtgaagacctcttgataaatggtaaatctg

SEQ ID NO: 361589 - DNA, 826 bp, Homo Sapiens
  misc_feature (552)..(552): n is a, c, g, or t
  misc_feature (565)..(565): n is a, c, g, or t
  misc_feature (622)..(622): n is a, c, g, or t
  misc_feature (664)..(664): n is a, c, g, or t
  misc_feature (669)..(670): n is a, c, g, or t
  misc_feature (672)..(672): n is a, c, g, or t
  misc_feature (761)..(761): n is a, c, g, or t
  misc_feature (787)..(787): n is a, c, g, or t
ggggaatcaaagcggcgcattgaggcagtgcgctgctggtcccagcatgaatgcgggccccggctgtgaaccctgcaccaagcgaccccgctggggcgccgctacaacttcgccggctgcttcggacgcccggagctttcccagcaggcagaggcgcgtcctcgaccccaaggacgctcacgtgcagttcaggctcccaccgtcctcgccagcctgcgtcccagggcgggcgggacagcacagaggcagcgccacctcgcttgttttcaaacaaaagactattaccagttggatggacactaaaggaatcaagacagcggaatcagaaagtttggatagtaaagaaaacaacaatacaagaatagaatccatgatgagttctgtacaaaaagataacttttaccaacataatgtagaaaaattagaaaatgtttctcagctaagtcttgataagtcacccactgaaaaaagtacacagtatttgaaccagcatcagactgcagcaatgtgtaagtggcaaaatgaagggaaacacacggagcagcttttggnaagtgaacctcanacagtaaccctggtaccagagcagtttagtaatgctaacattgatcggtcacctcanaatgatgatcacagtgacacagatagtggagagaatagagancatcnncngtttctcacaactgtaaagctttgcaatggcaagcagactacagaagatgaacaggcccagagaagccaaaagccaccagaagtgcagncaagtcttgcggatccctgggggaangactggtgcaagttggtcagcaaggatgagaataggatg

SEQ ID NO: 361590 - DNA, 1991 bp, Homo Sapiens
  misc_feature (1960)..(1960): n is a, c, g, or t
  misc_feature (1966)..(1966): n is a, c, g, or t
taaggtagcgaggcctgggtggcgaattcggcacgaggctgataggaagtgaaaggtggctgaggtaatgagaatagacccatctgcagaggatcataaaaccagcaaagacaagatcttgtctaagatgccttcacaaactttgtccatgagaactgtaaggtcttctccagacctgttggctgctgctgtgatctctgcccaagaggagcttctgaccaacatccaaagggcttctggacccactggactcctctggagttgctccttcacatgttcccactctctgtgcggccaccatggaagtcggacctgcccttctgccatgattgactaaaatctcaggaagctggtgatgaatgaaaaccttagtcccaatggcactgcacgaggggccaggagagcagcagcatcataagccacaggcgtcagcctcgagtttgaccagcagcaggggtcggtgtgtccctctgaatctgagatctatgaggcaggagctggggacaggatggcaggagcgcccatggctgctgctgtacagcctgctgaggtgactgttgaagttggtgaggacctccacatgcaccacgttcgtgaccgggagatgcctgaagctttggagtttaacctttctgccaatccagaggcaagcacaatattccagaggaactctcaaacagatgctttggagtttaacccttctgcataagaagaagcaaatgtacaaaccatgtatctactgtgcgtttcagtcaacaatacagctcgtgttcgacaatattccttgatgacagcacagccatccagcattatcttacaatgacaataatatctgtgaccttggagatacctcatcatatcacacaaagagatgcagatagatctttgagcatacctgatgaacagttacactcatttgcggtttccaccgtgcacattatgaagaaaagaaatggaggtgggagtttaaataactattcctcctccattccatcgactcccagcaccagccaggaggaccctcagttcagtgttcctcccactgccaacacacccacccccgtttgcaagcggtccatgcgctggtccaacctgtttacatctgagaaagggagtgacccagacaaagagaggaaagccccggagaatcatgctgacaccatcgggagcggcagagccatccccattaaacagggcatgctcttaaagcgaagtgggaaatggctgaagacatggaaaaagaaatacgtcaccctgtgttccaatggcgtgctcacctattattcaagcttaggtgattatatgaagaatattcataaaaaagagattgaccttcagacatctaccatcaaagtcccaggaaagtggccatccctagccacatcggcctgtgcacccatctccagctctaaaagcaatggcctatccaaggacatggacaccgggctgggtgactccatatgcttcagccccagtatctccagcaccaccagccccaagctcaacccgaccccctctcctcatgccaataaaaagaaacacctaaagaagaaaagcaccaacaactttatgattgtgtctgccactggccaaacgtggcactttgaagccacgacgtatgaggagcgggatgcctgggtccaagccatccagagccagatcctggccagcctgcagtcatgcgagagcagtaaaagcaagtcccagctgaccagccagagcgaggccatggccctgcagtcgatccaaaacatgcgtgggaacgcccactgtgtggactgtgagacccagaatccttaagtgggccagtttgaacttgggagtcctcatgtgtattgaattgctcaggtatccaccgcagtcttgggcacccgccttttcccgtgttgcgatctttgggagctgggatggattggccagtttgagctcagggaaggttatgttcatctattttgggcantggacntaggccaacagcattttggggaatt

SEQ ID NO: 361591 - DNA, 947 bp, Homo Sapiens
atcaggccaaatcggccgagctcgaattcgtcgagagcgggaaaaagtgaacgaatcccgaatcaaagcggcgtattgaggcaggtggggtgccagtggaagagagaaagcaggcgagtgtatacggcctgacttgggaggccggcggatcagcaattgcagaagcaggcagcggcagagagggaatggtgcaggcaggcgctgagaaggacgcgcagtccatctctctcaggttagtgaaatgaggctctccgcccggggccggcccggggacagggcgctgttggtcccagcatgaatgcgggcccggctgtgaaccctgcaccaagcgaccccgctgggggcgccgctacaacttcgccggctgcttcggacgcccggagctttccgagcaggcagaggcgcgtcctcgagcccaaggacgctcacgtgcagttcagggtcccaccgtcctcgccagcctgcgtcccagggcaggcgggacagcacagaggcagagccacctcgcttgcgtcagcctcgagtttgaccagcagcaggggtcggtgtgtccctctgaatctgagatctatgaggcaggagctgaggacaggatggcaggagcgcccatggctgctgctgtacagcctgctgaggtgactgttgaagttggtgaaggacctccacgatgcaccacgttcgtgaccgggagatgcctgaagctttggagtttaacctttctgccaatccagaggcaagcacaatattccagaggaactctcaaacagatgctttggagtttaacccttctgccaatccataggcaagcacaatattccagaggaactctcagacagatgttgtagaaataagaagaagcaactgtacaaaccattgtgaccttggagatacctcatcatatcacacaaagagatgcagatagatctttgagcatacctgatgaacag

SEQ ID NO: 361592 - DNA, 608 bp, Homo Sapiens
tacttgccagatgtcaagtattcatctttattgaaataggactgtggtaagccactttatggctctcgattctgtatgagaaaatcatgcttagtgcctggttagtaaaagaaagaaaacctgaaagtccctgccatggaaggaagaaatagcggggagaaaagggagttggtaagtttcagcatttcagagcttggaggtgacaagttaggtttctattttatggagaaggaggtggaggcaggatgggtcctaaggtgtcattcaaaacacacagccataactctttattgagagtagagctagggccccagggattgctgtggtcaagttgcggacaaaaatgaccactcgttggaagacaggagaggagtgtttagttacaaaagcagtcaacaattcaggtgtatctatattcagacagcaaataaaagttgttcaacttggttgctaatgggacccactctactgaggctttgtatagaactcatagaggaagctggcttcaaggaatgaactaccctgtgcttttcttaggactaaaatctcaggaagctggtgatgaatgaaaaccttagtcccactggcactgcacgagggggcattgg

SEQ ID NO: 361593 - DNA, 901 bp, Homo Sapiens
  misc_feature (64)..(64): n is a, c, g, or t
gggtttatagtgggcaaacccaccttttaaaggatccgggtcaaagttaaggacattcccggancttccactgaggggacagttcgtgttctcctaggtgggtagtacagtgtgcttattttataaaacgcttcagtattatcattcttcaactttgacgcagcttttaagtcacttatagctttcctaggttctccttcttttataaaacattcagctcgaagttcccgtagttctgcatcccaaacacaaacctctaaaatcttatcaaggaaggctatagcagcagtataatctccacttccaaaagcgttaagtgcttgtgaacgcaaacgctgcatttcatcagattttataagttgagactgtgcttccttttcttcattttcacttggattagatttgagcacttttttaaaatcatcttctgcttcatcaagttttccttgtttgagtaataagtgacctctctgtaatcttgctgcagtgaagtccatcttcaattgaatcactttagttaaatcaggaagtgcagcttttgatttgcccatagctaaaaagacagtagccctccgataataagcaatatagttatcagggtcaccatctacggcagcatgaaactgagataaagcatcagctagctgtccagctgcaagtaatttcttgcccaattcaagatgtttctcaacatctgcatttactccacattcagcaccttcgtactgcagatccaccaggactagcaggaaggggaataccgagcccagccggctggtcacggagccgggggccaccatgtccgagggctcgcgagtgaagaggaggaaaggtgtgtggcccaccagcacgcgccggcgctccggcagcagctgcgcccgcccgccgtcggctctcgctc

SEQ ID NO: 361594 - DNA, 1535 bp, Homo Sapiens
  misc_feature (467)..(467): n is a, c, g, or t
  misc_feature (1434)..(1434): n is a, c, g, or t
  misc_feature (1516)..(1516): n is a, c, g, or t
ctgaatctgtgggaaccagaccacccctgagacaggaggcagccctgatgcctctccagggcctgggcctgcagcggaaccccttcctccaagggaagcggggcccggggctcacgtcttccccgcccctcctgcctccttccctgcaggtgaacttccacagcccccggagtggccagaggtgctgggctgcacggacccaggtggagaagcggctggtggtgttggtggtacttctggcggcaggactggtggcctgcttggcagcactgggcatccagtaccagacaagatccccctctgtgtgcctgagcgaagcttgtgtctcagtgaccagctccatcttgagctccatggaccccacagtggacccctgccatgacttcttcagctacgcctgtgggggctggatcaaggccaacccatgtccctgatggccactcacgctgggggaccttcagcaaccntctgggaacacaaccaagcaatcatcaagcacctcctcgaaaactccacggccagcgtgagcgaggcagagagaaaggcgcaagtatactaccgtgcgtgcatgaacgagaccaggatcgaggagctcagggccaaacctctaatggagttgattgagaggctcgggggctggaacatcacaggtccctgggccaaggacaacttccaggacaccctgcaagtgggcaccgccccactaccgcacctcacccttcttctctgtctatgtcagtgccgattccaagaactccaacagcaacgtgatccaggtggaccagtctggcctgggcttgccctcgagagactattacctgaacaaaactgaaaacgagaaggtgctgaccggatatctgaactacatggtccagctggggaagctgctgggcggcggggacgaggaggccatccggccccagatgcagcagatcttggactttgagacggcactggccaacatcaccatcccacaggagaagcgccgtgatgaggagctcatctaccacaaagtgacggcagccgagctgcagaccttggcacccgccatcaactggttgccttttctcaacaccatcttctaccccgtggagatcaatgaatcccgagcctattgtggtctatgacaaggaataccttggagcagatctccactctcatcaacaccaccgacagatgcctgctcaacaactacatgatctggaacctggtgcggaaaacaagctccttccctgaccagcgctttcaggacgccggatgagaaagttcatggaaagtcatgtacgggaccaagaagacctgtcttcctcgctggaagttttgcgtgagtgacacagaaaacaacctggggctttgcgttgggccccatgtttgttcaaaggcaacctttcgccgagggacaggcaaggagcattagccaccgagattcattcntgggagatttaaggaagggcttttgagggaaaggccttgaggcaccctggaagttggatgggattagggaaacccgaaattnaggccaagggaaaagggcc

SEQ ID NO: 361595 - DNA, 1580 bp, Homo Sapiens
  misc_feature (54)..(90): n is a, c, g, or t
tggaaaagtatagactcactataggggaaccggattacaccgcggtggcggcgnnnnnnnnnnnnnnnnnnnnnnnnnnnnnnnnnnnnnatcaggccaaatcggccgagctcgaattcgtcgagagcgggttccctggcaggctggagggcaggagctggggccacgctggtctgggatagttgggcagggaggctgtctacctggtctccagaatggacggccctgtggcagagcatgccaagcaggagccctttcacgtggtcacacctctgttggagagctgggcgctgtcccaggtggcgggcatgcctgtcttcctcaagtgtgagaatgtgcagcccagcggctccttcaagattcggggcattgggcatttctgccaggagatggccaagaagggatgcagacacctggtgtgctcctcagggggtaatgcgggcatcgctgctgcctatgctgctaggaagctgggcattcctgccaccatcgtgctccccgagagcacctccctgcaggtggtgcagaggctgcagggggagggggccgaggttcagctgactggaaaggtctgggacgaggccaatctgagggcgcaagagttggccaagagggacggctgggagaatgtccccccgtttgaccaccccctaatatggaaaggccacgccagcctggtgcaggagctgaaagcagtgctgaggaccccaccaggtgccctggtgctggcagttgggggtgggggtctcctggccggggtggtggctggcctgctggaggtgggctggcagcatgtacccatcattgccatggagacccatggggcacactgcttcaatgcggccatcacagccggcaagctggtcacacttccagacatcaccagtgtggccaagagcctgggtgccaagacggtggccgctcgggccctggagtgcatgcaggtgtgcaagattcactctgaagtggtggaggacaccgaggctgtgagcgctgtgcagcagctcctggatgatgagcgtatgctggtggagcctgcctgtggggcagccttagcagccatctactcaggcctcctgcggaggctccaggccgagggctgcctgcccccttccctgacttcagttgtggtaatcgtgtgtggaggcaacaacatcaacagccgagagctgcaggctttgaaaacccacctgggccaggtctgaggggtcccatcctggccccaaagacccctgagaggcccatggacagtcctgtgtctggatgaggaggactcagtgctggcagatggcagtggaagctgccctgtgcaactgtgctggctgcctcctgaaggaagccctcctggactgcttcttttggctctccgacaactccggccaataaacactttctgaattgagaccacgaacacacaaaccgggcgggccggtcaagaagtatccctcggagggggccaagctttacgcgtacccagcttttctttgtacaaagggggccctattggtgagcgtttataagctagggcctggcgttgttttaaacgtcggtgactgcgaaacgggtacctgggactctcg

SEQ ID NO: 361596 - DNA, 927 bp, Homo Sapiens
  misc_feature (272)..(272): n is a, c, g, or t
tgagccaccatgcctggcctcttggaatatttaataagctaaaaaattcttatacacaggtagattaattaggtagccaggagtggcccctgaaagtatgtctggcaaaacctagaactgcatcctagccatcactgtaccttctgccctccctgctgtctcctctgccagttacagttaaaaggttgtgggtgaggacgctgggcagagtcccaggcgtctgctgtcagctccccagcccggcctgcctgccgagccatctgggcgtcccnacggtggagagtgtggtgcttgtgacgcggtggtgctgggagccatcctggtggcagatgtgggctctcactgcaagtcagtgtaagtccccagggactgtcagcagcacgtcctgctgcccctctctctgcagaagccctggtaacctgcgtttggaaaaatctctaaggatttctgaggagctgtcaggccatgtccttgtccaccctgtgtggggcacggcttcgacatggctctgctcccgtcgtgggctgagaaggagcaggtggggctgtgccttggaaaggaggccctcccgacatgcctttgtgcgaggtccctgtccatgctgtctccatcccggagccttacggcgatgggtggccacagagcctattccaagagtctggtttagggctgggtcttcccatcttcacctctgagtcttaggcgatgcgtgaccacgcagccccttccaggagtctggtttagggctgggtcttcccatcttcacctctgagtcttaggcggtgcatgaccacgcagccccttcccggagtctggtttagggctgcgtgctcaagagtctggtttggggctgggtcttcccatcgccctggaggaggcttttgtctcatctcatgattcacattaaactctgtgccatgaaaaaaa

SEQ ID NO: 361597 - DNA, 1189 bp, Homo Sapiens
ccgaggactgtgcgtgggggtgagtcgcggggagctcggggcgcgcccgacgggtgtctgcggacgacgccccgggggtgcttggcgccatctagccctagggagtccctggtcgacccccgtgtcgcctcttgtcccgttgacccttgtaggacgacggtcatgcctgggccgggcggaggcgtgggtgaggccgaggagtgagtgcctggggccggctcggggtcgtgagtgcggaggaggacgcgctgtgggatgcgaatcgtagggcgttccggcattcggtctggctctgcgccctgatagcccggtccaagtctcacgccgtatctgcgccagtgccgggtcatcgacgagcaggagcgaggatggaggtgctgagcacctaccgcttcccgtgccgcgtcaaccgcgatcgcgggcgcctgatggacatcttgcgctgccggtggcaagaggggctagtgaggccttcctggaaggccctggagttcgtactagccccgaacacttcacgctgctcactgggccgaggaacccgcgcgctagcgctgcgtccaatgatcctcgatgaggagtgggccgtgagggcctgaccctaattcgttgatgacgagaggtgcgactggcttgctgggaagctctgcaagagccagctgcagcggtgagcagcaactgcagtgcccggggccgggtgctcgaggaggagcgggcagggctggagcagcggctgcagggaccagcagcaggctcaggagcgctgacaaaggctgcgggaggactgggaggcgggcagcctggagctgctgcggctcaaggatgagaactacatgatcgccatgcgcctggcacagctcagtgaggagaagaactcggctgtacttcgcagccgtgacctgcagctggcggtggatcagctcaagctcaaagtgagtcggctgggaggaagagtgtgcactgcttcgaagggccagggggcccgccccctggggcagaggagaaggagaagggaaaggagaaaggagaaggagccagaaaatgtgggaccttgtctctgagcctgctgctggaaaacagcgggctgacggcgtcccctgccgggagttgccaggagggcctgcagcaggaagcgaagccggcccgggggccccccgggctccgagcgcatcccggctggaaaatccctaaa

SEQ ID NO: 361598 - DNA, 1190 bp, Homo Sapiens
  misc_feature (925)..(925): n is a, c, g, or t
  misc_feature (1076)..(1076): n is a, c, g, or t
aaggctgtacggcccgggttacgggatagtgcactcatagtccagcaaatctggccatgcacgtctgctcccagcttggtggtcaccccacagctgcccaccccccataccaggccaacttctggctgcacactccgaactggtgattggttaggggcatgggattttatttgaagctgtgaagacagccacggtcacactgtggcagctctgtagcccttcatagtttagaggcctctgcccacttgctgtcttgtttgattcttgcaacacctttgggaggcaaatgatggggccaggggattgactgggcccattttactgatgaggaaactgaggcccagaggaggtggatcagctcaagctcaaagtgagtcggctggaggaagagtgtgcactgcttcgaagggccaggggcccgccccctggggcagaggagaaggagaaggagaacggagaaggagaaggagccagacaatgtggaccttgtctctgagctgcgtgctgagaaccagcggctgacggcgtcactgcgggagttgcaggagggcctgcagcaggaggcgagccggccgggggccccgggctccgagcgcatcctgctggacatcctagagcatgactggcgggaggcgcaggacagcaggcaggagctgtgccagaagctgcatgccgtgcagggggagctgcagtgggccgaggagctgcgcgaccagtacctgcaggagatggaagacctgcggctcaagcacgcgcacgctgcagaaggactgtgacctgtacaagcaccgcatggccactgtcctggcccaactggaggagattgagaaggagcgagaccaggccatccagagccgtgaccggatccagttgcagtactcacagagcctcatcgagaaggaccagtaccgcaagcaggtgcggngcctggaggcggagcgggatgagctgctgacaacgctcaccagcctggagggcaccaaagctctgctgggagttcagctgcagcgggccccagggtggcacctgcctcaaagcctgtgcctcctcccaatcccctgtgcttccaacctcancagcacttggaagcctgagcgagttcccctccccttctggggaggccccaaaaccactgggggaggcaccctgtcatgggggggacctggaacccttacaactcggaaggaaac

SEQ ID NO: 361599 - DNA, 867 bp, Homo Sapiens
ggcctttcgcggtgtgctgtcttgttgcgccgtctttgcgggccagctgtcggtggaagacggtgcaggaggccccagggagctgccatgcagctgggttccaggctcgctgagcaagttctcaaatgtggcaattcatcaccgtgggccttggtgcatttgtgccagggctcttccaccaacgtggagcagcaagcccgcctgcaggccctgccatggctgcgcagctctgagacgtggtccagtgtgctgccacccaggtgcagtgagaagtgatgtggtgacatgggtattcatggtccatgaacagctggtggatctccagcaccatctcctgcgggaacacccacagggagaagggttcgatctcggggccaggatctccacagaaaagtccaaatcctgaatggtgacttctatctggtggtgtcgtctcctggcttggcctcatccagcccatgttcccgggatggctcagcctcctccttcctccttcaggctccttcttcttcagggtctccaggcagttcccattcaagaacatgagtgatggtggctctcaccctctcccatggcttcaaagatggtcccatttcccagctctcatagccaatcctggcctcgatcaggcctttcagaccaaggaggcagctggtcctgggcatcaacatgtggctctcccttcagtatcatggaagacccatccatctcgcggcttcaggagcgtcccggtatcctctctagggaccgtccagtacctgcaggtcacagggcaaaggaggctgcggaatgaaggagaaagagcagggcctcgtgccgattcaccacccagcctcgtacctagcctaaggtctcctttatcatccg

SEQ ID NO: 361600 - DNA, 1409 bp, Homo Sapiens
  misc_feature (679)..(690): n is a, c, g, or t
  misc_feature (931)..(944): n is a, c, g, or t
  misc_feature (968)..(1021): n is a, c, g, or t
tcttgctgtttcttcggaggagagcggtggtcaaagagcccttactgcccccagaggatgacacccgggacaacgtttattactatgatgaagaaggaggcggagaagaggaccaggactttgacttgagccagctgcacaggggcctggacgctcggcctgaagtgactcgtaacgacgttgcaccaaccctcatgagtgtcccccggtatcttccccgccctgccaatcccgatgaaattggaaattttattgatgaaaatctgaaagcggctgatactgaccccacagccccgccttatgattctctgctcgtgtttgactatgaaggaagcggttccgaagctgctagtctgagctccctgaactcctcagagtcagacaaagaccaggactatgactacttgaacgaatggggcaatcgcttcaagaagctggctgacatgtacggaggcggcgaggacgactaggggactcgagagaggcgggccccagacccatgtgctgggaaatgcagaaatcacgttgctggtggtttttcagctcccttcccttgagatgagtttctggggaaaaaaaagagactggttagtgatgcagttagtatagctttatactctctccactttatagctctaataagttgtgttagaaaagtttcgacttatttcttaaagcnnnnnnnnnnnncccatcactctttacatggtggtgatgtccaaaagatacccaaattttaatattccagaagaacaactttagcatcagaaggttcacccagcaccttgcagattttcttaaggaattttgtctcacttttaaaaagaaggggagaagtcagctactctagttctgttgttttgtgtatataattttttaaaaaaaatttgtgtgcttctgctcattactacactggtgtgtccctctgccnnnnnnnnnnnnnnaagacagggtctcattctatcggnnnnnnnnnnnnnnnnnnnnnnnnnnnnnnnnnnnnnnnnnnnnnnnnnnnnnngctcaaagctatccttgcacctcagccctccaagtagctgggaccacagggctgccccactacgcatgactaattttttacaaaatttgagacgggggtcccccttgtgttaccccaggcctggggctccaaacttcctggggggtaaagtggaatcccccgatcttggggcctccccgaaatattggggatttcccgaaccttaatcccattggcccttggccccagccttccccaaacttccctgtggtcgttttttttatagaagaaaaagttttttgcctcccaatcgggcccagggcgcgtggggaaagcacattggaaaggggaattcaaaagccctacacggggagaacccccaaaaaactctgggggggttctaaaggta

SEQ ID NO: 361601 - DNA, 970 bp, Homo Sapiens
gaggggctgtaccagggcgtgcccagagctgagccgggcaccgaggcccggagacactatgatgaaggcgttcggatgggcagcctggggctgttcctgcagtgcgccatctccctggtcttctctctggtcatggaccggctggtgcagcgattcggcactcgagcagtctatttggccagtgtggcagctttccctgtggctgccggtgccacatgcctgtcccacagtgtggccgtggtgacagcttcagccgacctcaccgggttcaccttctcagccctgcagatcctgccctacacactggcctccctctaccaccgggagaagcaggtgttcctgcccaaataccgaggggacactggaggtgctagcagtgaggacagcctgatgaccagcttcctgccaggccctaagcctggagctcccttccctaatggacacgtgggtgctggaggcagtggcctgctcccacctccacccgcgctctgcggggcctctgcctgtgatgtctccgtacgtgtggtggtgggtgagcccaccgaggccagggtggttccgggacggggcatctgcctggacctcgccatcctggatagtgccttcctgctgtcccaggtggccccatccctgtttatgggctccattgtccagctcaaccagcctgtcactgcctatatggtgtctgccggcaagccctgggtctggtcgccaatttactttgctacacaggtactatttaacaaaaacgacttggaccaaaaactcagcgtagaaaacttccagcacattggggtggagggcctgcctcactgggtcccagctccccgctcctgttagccccatggggctgccgggctggccgccagtttctgttgctgccaaagtaatgtggctctctgctgccaccctgtgctgctgaggtgcgtagctgcacagctgggggctggggcgtcccgaaactgagaca

SEQ ID NO: 361602 - DNA, 901 bp, Homo Sapiens
gctgggtggcgaattcggcacgaggcagcggccaggtaacgctgtcttgtggacccgcacttcccacccgagacctctcactgagcccgagccgcgcgcgacatgagccacgggaagggaaccgacatgctcccggagatcgccgccgccgtgggcttcctctccagcctcctgaggacccggggctgcgtgagcgagcagaggcttaaggtcttcagcggggcgctccaggaggcactcacagagcactacaaacaccactggtttcccgaaaagccgtccaagggctccggctaccgctgcattcgcatcaaccacaagatggaccccatcatcagcagggtggccagccagatcggactcagccagccccagctgcaccagctgctgcccagcgagctgaccctgtgggtggacccctatgaggtgtcctaccgcattggggaggacggctccatctgcgtcttgtacgaggaggccccactggccgcctcctgtgggctcctcacctgcaagaaccaagtgctgctgggccggagcagcccctccaagaactacgtgatggcagtctccagctaggcccttccgcccccgccctgggcgccgccgtgctcatgctgccgtgacaacaggccaccacatacctcaacctggggaactgtatttttaaatgaagagctatttatatatattattagatcataagaaagggaggaacagaaaccaaaagttaatcttaagagacaaaatccttcaaggggagctgcttggcaagtggctcccaaggtgcctttgggagcagaacgtgtggcgtgcttgagtctgtgagccagggtctggctataggagggggaactgtaaggggtagactagcaagagagtgggaaagataggaaacaca

SEQ ID NO: 361603 - DNA, 1204 bp, Homo Sapiens
  misc_feature (710)..(710): n is a, c, g, or t
aggctggaccggtccggattcccgggatcatggagctggctggaggggtccccctggaccagtgccagggcctaagccaggacctgcggaaccagatttgcttccagctcctgacgctgtgtctgcgggagctgtttgagttccgattcatgcagactgaccccaactgggccaacttcctgtatgatgcctccagccaccagctgaccctgctggactttggtgcaagccgggagtttgggacagagttcacagaccattacatcgaggtggtgaaggctgcagctgatggagacagagactgtgtcctgcagaagtccagggacctcaaattcctcacaggctttgaaaccaaggcattctccgacgcccacgtggaggcagtgatgatcctgggggagcctttcgccacccagggcccttatgactttgggtcgggggaaacggcccgccgcattacaggacctcatcccggtgctgctgcggcaccggctgtgtcccccacccgaggagacctatgccctgcaccgcaagctggcaggggctttcctggcctgtgcccacctccgagcccacatcgcctgcagggacctcttccaggacacctaacaccgctactgggccagtcgccagccagacgcagccactgccggcagcctccccaccaaaggggactccctgggtggatccctcatgacagcctccatggngggattcagtccccagagcaggccgtaccctgctgtagtgcctcttatcccttccccgtctgccctgggtcagaggagcccccttgggcttcccagtcttgcctggctctcctccttggcccaggagctcaggatccctggggctggggaactcccaacttcgtgccctagatcctgcacctccccactcgaaagtgggtatccgaaaactaagccagggaagcggttaacttatctttgccaaacatttgagggagccttgggccgctgcatgtcgttatgcagatcagactcatcagggggagccctcacctctgcctcaagcctcccgtggaaggcgagatggtcctggaggcagtcctcacctctgcctccctcgctcctccaacagctgccttctcccgggttccagcctctcagtgtgttggaaaggtaggggtgcggggtgggggggagctgaatcttcaatcggaataaaagcagccctccccttt

SEQ ID NO: 361604 - DNA, 1518 bp, Homo Sapiens
  misc_feature (243)..(320): n is a, c, g, or t
  misc_feature (1452)..(1465): n is a, c, g, or t
ggcgccttcgggaaaaccggagttggccatgagtcggcgtggatgaggtcatctccaaatacgcaatgttgcaagacaaaagtgaggagggcgagagaaaaaagagaagagctcggctccaaggcacctcttcccactctgcagacacccccgaagcctccttggattctggtgagggccctagtggaatggcatcccagggtgcccttctgcctccagagctgagacagatgacgaagacgnnnnnnnnnnnnnnnnnnnnnnnnnnnnnnnnnnnnnnnnnnnnnnnnnnnnnnnnnnnnnnnnnnnnnnnnnnnnnnatctggaacagatgcaggagggtcaggaggatgatgaagaggaggacgaagaggaagaagcagcagcaggtaaagatgaagacaagagcccccatgtcctccactacagatctccaatgaaaagaacctggaacctggcaaacagatcagcagatcttcaggggagcagcaaaacaaaggacgcatagtgtcaccatcgttactgtcagaagaacccctggccccctccagcatagatgctgaaagcaatggagaacagcctgaggagctgaccctggaggaagaaagccctgtgtctcagctctttgagctagagattgaagctttgcccctggataccccttcctctgtggagacggacatttcctcttccaggaagcaatcagaggagcccttcaccactgtcttagagaatggagcaggcatggtctcttctacttccttcaatggaggcgtctctcctcacaactggggagattctggtcccccctgcaaaaaatctcggaaggagaagaagcaaacaggatcagggccattaggaaacagctatgtggaaaggcaaaggtcagtgcatgagaagaatgggaaaaagatatgtaccctgcccagcccaccttcccccttggcttccttggccccagttgctgattcctccacgagggtggactctcccagccatggcctggtgaccagctccctctgcatcccttctccagcccggctgtcccaagctatgtggaaaggcaaaggtcagtgcatgagaagaatgggaaaaagatatgtaccctgcccagcccaccttcccccttggcttccttggccccagttgctgattcctccacgagggtggactctcccagccatggcctggtgaccagctccctctgcatcccttctccagcccggctgtcccaaaccccccattcacagcctcctcggcctggtacttgcaagacaagtgtggccacacaatgcgatccagaagagatcatcgtgctctcagactctgattagctgcctccccttctccctgcctccagaatgttctgggataacatttggaggaaggtgggaagcagatgactgaggaagggatggactaagctaatccccttttggtggtgtttctttnnnnnnnnnnnnnngcttaagttttacacagaaacattaataaacaataaagttcttttcttactgt

SEQ ID NO: 361605 - DNA, 729 bp, Homo Sapiens
  misc_feature (488)..(544): n is a, c, g, or t
ttaggtacgaggccggggggtgaatcggcacgagggtgcttcgggctgtagagaaggcagctgcccgacacagccttggcctcccccgacagcagctccagctcatggctcaggatgccttccgagatgtgggcatcaggttacaggagcgacgtcacctcgatctcatctacaactttggctgccacctcacagatgactataggccaggcgttgaccctgcactatcagatcctgtgttggcccggcgccttcgggaaaaccggagtttggccatgagtcggctggatgaggtcatctccaaatatgcaatgttgcaagacaaaagtgaggagggcgagagaaaaaagagaagagctcggctccaaggcacctcttcccactctgcagacacccccgaagcctccttggattctggtgagggccctagtggaatggcatcccaggggtgcccttctgcctccagagctgagacagatgacgaagannnnnnnnnnnnnnnnnnnnnnnnnnnnnnnnnnnnnnnnnnnnnnnnnnnnnnnnnccacagattctgaagaggaggaggatctggaacagatgcaggagggtcaggaggatgatgaagaggaggacgaagaggaagaagcagcagcaggtaacgatggagacaagagccccatgtcctcactacagatctccaatgaaaagaacctggacctggcaacagatcagcgatctcacgagagc

SEQ ID NO: 361606 - DNA, 904 bp, Homo Sapiens
aagaaggagggctgcaccatcctcttcatgatgctctacttcttcagcatggccagctccatctggtgggtgatcctgtcgctcacctggttcctggcggctggcatgaagtggggccacgaggccatcgaagccaactcacagtattttcacctggccgcctgggctgtgccggccatcaagaccatcaccatcctggcgctgggccaggtggacggcgatgtgctgagcggagtgtgcttcgtggggcttaacaacgtggacgcgctgcgtggcttcgtgctggcgcccctcttcgtgtacctgtttatcggcacgtcctttctgctggccggctttgtgtcgctcttccgcatccgcaccatcatgaagcacgatggcaccaagaccgagaagctggagaagctcatggtgcgcattggcgtcttcagcgtgctgtacactgtgccagccaccatcgtcatcgcctgctacttctacgagcaggccttccgggaccagtgggaacgcagctgggtggcccagagctgcaagagctacgctatcccctgccctcacctccaggcgggcggaggcgccccgccgcacccgcccatgagcccggacttcacggtcttcatgattaagtaccttatgacgctgatcgtgggcatcacgtcgggcttctggatctggtccggcaagaccctcaactccctgaaggaagttctacacgaagctcaccaacagcaaacaagggggagactacagtctgaaaacccgggggctcagccccatgcccaaggcctcggccgggggcgccaacgaatccccccaaaagccaagcgcccttgggaatttcggtggcccaatccctggacaatcctccgaggggtttttccttccacttagaaaaaaccttccc

SEQ ID NO: 361607 - DNA, 975 bp, Homo Sapiens
cgtggtgcacgggcgcttgcgccgagccgggttaccgcacggtggtccaggtctccctggaggaggcctgcaccatcctcttcatacgcgctcgacttcgtcagcatggccagctgccatctggtggtcatccctgtcgctcacctggttcctggcagccggcatgaagtgggttcctcgaggccatcgaggcctactctcagtacttccacctggccgtcctggcccgtccggccgtcaagaccatcaccatcctggccatgggccagatcgccggcgacctgctgagcggcgtgtgcttcgtaggcctcaacagcctggacccgctgcggggcttcgtgctagcgccgctcttcgtgtacctgttcatcggcacgtccttcctcctggccggcttcgtgtccctcttccgcatccgcaccatcatgaagcacgacggcaccaagaccaaaaagctggagcggctcatggtgcgcatcggcgtcttctccgtgctctacacagtgcccgccaccatcgtcatcgcttgctacttctacgagcaggccttccgcgagcactgggagcgctcgtgggtgagccagcactgcaagagcctggccatcccgtgcccggcgcactacacgccgcgcatgtcgcccgacttcacggtctacatgatcaaatacctcatgacgctcatcgtgggcatcacgtcgggcttctggatctggtcgggcaagacgctgcactcgtggaggaagttctacactcgcctcaccaacagccgacacggtgagaccaccgtgtgagggacgcccccaggccggaaccgcgcggcgctttcctccgcccggggtggggcccctacagactccgtattttatttttttaaataaaaaacgatcgaaaccatttcacttttaggttgctttttaaaagagaactctctgcccaacacccccacaaggtttgtaattaaaactgtaaatagtc

SEQ ID NO: 361608 - DNA, 2241 bp, Homo Sapiens
  misc_feature (1753)..(1774): n is a, c, g, or t
  misc_feature (1909)..(1941): n is a, c, g, or t
gctgggtggcgattcggacgaggctgggtagcgccaccagagcgaccaaacgtcccgcgccttccaggccgcactccagagccaaaagagctccatggcggcggcggccaagcccaacaacctttccctggtggtgcacggaccgggggacttgcgcctggagaactatcctatccctgaaccaggcccaaatgaggtcttgctgaggatgcattctgttggaatctgtggctcagatgtccactactgggagtatggtcgaattgggaattttattgtgaaaaagcccatggtgctgggacatgaagcttcgggaacagtcgaaaaagtgggatcatcggtaaagcacctaaaaccaggtgatcgtgttgccatcgagcctggtgctccccgagaaaatgatgaattctgcaagatgggccgatacaatctgtcaccttccatcttcttctgtgccacgccccccgatgacgggaacctctgccggttctataagcacaatgcagccttttgttacaagcttcctgacaatgtcacctttgaggaaggcgccctgatcgagccactttctgtggggatccatgcctgcaggagaggcggagttaccctgggacacaaggtccttgtgtgtggagctgggccaatcgggatggtcactttgctcgtggccaaagcaatgggagcagctcaagtagtggtgactgatctgtctgctacccgattgtccaaagccaaggagattggggctgatttagtcctccagatctccaaggagagccctcaggaaatcgccaggaaagtagaaggtcagctggggtgcaagccgggaagtcaccatcgagtgcacggggggcagaggcctccatccaggcgggcatctacgccactcgctctggtgggaccctcgtgcttgtggggctgggctctgagatgaccaccgtacccctactgcatgcagccatccgggaggtggatatcaagggcgtgtttcgatactgcaacacgtggccagtggcgatttcgatgcttgcgtccaagtctgtgaatgtaaaacccctcgtcacccataggtttcctctggagaaagctctggaggcctttgaaacatttaaaaagggattggggttgaaaatcatgctcaagtgtgaccccagtgaccagaatccctgatgttaatgggctctgccctcatccccacagtcttgggatctcagggcacaatggctggacatgggtgggctctgatgcagaactttctcttttgaatgttaagaataactaatacaattcattgtgaacagaagtccttaagcagaggaattggtgtgccttaaagatacaatctgggatagtttgggggaacttgtagccagaatgccctgttcatgctgagcaaagttcagcaagtagagcagagtttggcaggcaggtgccaggaactccccttcttcctggagtgccttcattgaggaaggaaatctggcccttgggtttcctggttccactgctactgacccagaggggaatgagggctgagttatgaaaagataacttcatgaagacttaactggcccagaagctgattttcatgaaaatctgccactcagggtctgggatgaaggcttgtcagcacttccagtttagaacgcaatgtttctagagacatattggctgtttgttttgatgataaaaggagaataagaaaaggcatcactttcctggatccaggataatttttaaaccaatcaaatgnnnnnnnnnnnnnnnnnnnnnnggaaatgtcatgtgaggttaaaccagtttgcattcccctaatgtggaaaaagtaagaggactactcagcactgtttgaagattgcctcttctacagcttctgagaattgtgttatttcacttgccaagtgaaggnnnnnnnnnnnnnnnnnnnnnnnnnnnnnnnnntaagtacggtcccttgtcaccaggcaaccaggaaactgctacttgtggacctcaccagagaacagggaggttttggttagctcacaaggacttcccccaccccagaagattagcatccccatactagactcatactcaaactcaactaggctcatactcaatttgatgggttattagacaattccattttcttttctggggtattataaaacaggaaaatcctttcctcttctccatacccagtaaaggcttcttgggaatcttttccgggtgggaatggatttctattgaacttgtcct

SEQ ID NO: 361609 - DNA, 928 bp, Homo Sapiens
ccaccagagcgaccaaacgtcccgcgccttccaggccgcactccagagccaaaagagctccatggcggcggcggccaagcccaacaacctttccctggtggtgcacggaccgggggacttgcgcctggagaactatcctatccctgaaccaggcccaaatgaggtcttgctgaggatgcattctgttggaatctgtggctcagatgtccactactgggagtatggtcgaattgggaattttattgtgaaaaagcccatggtgctgggacatgaagcttcgggaacagtcgaaaaagtgggatcatcggtaaagcacctaaaaccaggtgatcgtgttgccatcgagcctggtgctccccgagaaaatgatgaattctgcaagatgggccgatacaatctgtcaccttccatcttcttctgtgccacgccccccgatgacgggaacctctgccggttctataagcacaatgcagccttttgttacaagcttcctgacaatgtcacctttgaggaaggcgccctgatcgagccactttctgtggggatccatgcctgcaggagaggcggagttaccctgggacacaaggtccttgtgtgtggagctgggccaatcgggatggtcactttgctcgtggccaaagcaatgggagcagctcaagtagtggtgactgatctgtctgctacccgatttgtccaaagccaaaggagattggggctgatttagtccctccagatcttccaaggagagcccctcaggaaatcgccaggaaaagtaaaaagtcagctgggggtgcaagccggaaaatcaccatcgagtgcaccgggggcagaagcctcccatccaagcgggcatctacgccacttcgctctgggggggacccctcgtgctttgggggggctgggctcctaaaatgaccaccggtacccc

SEQ ID NO: 361610 - DNA, 1363 bp, Homo Sapiens
atcttctcttcctacgggtcggactcgggaacatcaataggaggtgctcctgtaccctggccacagcccaatcctgccactgctgacatctggggagactttaccaaatctacaggatcaacttccagccagacccagccaggcacaggctgggtccagttctgacctgagcacggtttttcctcatgtgacttctgggaaggcgctccctcatctgggccaaaggaaggaggacgaagccctcctcagctggcctgtgtttggggcatgaatctctcctctcctccttgtctggctctgttgacaaaccgggcatgtttggcagtaaattggcaccgtgtcacactgtttcctgggattcaagtatgcaaccagaacacaggagaagaaaagctccaggatccctgtccccatctgtcctcttgatgtgagagagactctgagacttcttccatcgcaatgacctgtattaaacacaagccccccaaggcaaaagaagaggttgagttttgctgccaggattcagatcagcccttcccagggtctgcaggtgtcacatgatcacagttcagcgggaggctttccgtacccacactggctgtagccacttcagtccatctgccctccagaggaggggtttcttcctgatttttagcaggtttagaggctgcagcttgagctacaatcaggagggaaattggaaggattagcagcttttaaaaatgtttaaatattttgctttgctaatgtgctgatccgcactaactcatctttgcaaaaggaactgctcccttcggcgtgccccagctggggcctctgaagggattcctcactgtgggcagctgccctgagcttcaggcagcagtgttcatctctggccagttgtctggtttccatgtattctaggccaggtaggcaacacagagccaaggcgggtgctggaagccagacggaacagtgttggggcaggaaggtggatgctgttgtcatggagctgtgggagttggcactctgtctgctggtggccctctcggctcacatgttcacagtgcagctcctggcagacttgggttttctctttggtggtttctaaagtgccttatctgcaaacaacttcttttctccttcaggaactgtgaatggctagaagaaggagctcagtaaactagaagtccagggttgcttggtttactggtttataagaaatctgaaagcacctctgacattccttttattaactcacctctcagttgaaagatttcttctttgaaaggtcaagaccgtgaactgaaaaaagtgttggcctttttgcgggaccagatttttaagataaaataaatatttttacttctgtcaaaaaaaa

SEQ ID NO: 361611 - DNA, 918 bp, Homo Sapiens
agcggagggagtcgcaccgcttccgtccgtcggacagaggaacggtggaagtcgccggaagttcggtgggctccaggcgtcgcgatggaggagagcgggtacgagtcggtgctctgtgtcaagcctgacgtccacgtctaccgcatccctccgcgggctaccaaccgtggctacagggctgcggagtggcagctggaccagccatcatggagtggccggctgaggatcactgcaaagggacagatggcctacatcaagctggaggacaggacgtcaggggagctctttgctcaggccccggtggatcagtttcctggcacagctgtggagagtgtgacggattccagcaggtacttcgtgatccgcatcgaagatggaaatgggcgacgggcgtttattggaattggcttcggggaccgaggtgatgcctttgacttcaatgttgcattgcaggaccatttcaagtgggtgaaacagcagtgtgaatttgcaaaacaagcccagaacccagaccaaggccctaaactggacctgggcttcaaggagggccagaccatcaagctcaacatcgcaaacatgaagaagaaggaaggagcagctgggaatccccgagtccggcctgccagcacaggagggctgagcctgcttccccctcccccaggggggaaaacctccaccctgatccctccccctggggagcagttggctgtggggggatccctcgtccagccagcagttgctcccagttcaggaggtgctcctgtaccctggccacagcccaatcctgccactgctgacatctggggagactttaccaaaatctacaggatcaaatttccagccagacccagccaggcacagggctgggggtcagtttctgaccctgaagcacggtttttttcctcatggtggacttct

SEQ ID NO: 361612 - DNA, 703 bp, Homo Sapiens
  misc_feature (565)..(565): n is a, c, g, or t
  misc_feature (568)..(568): n is a, c, g, or t
ggtcgcgatggaggagagcgggtacgagtcggtgctctgtgtcaagcctgacgtccacgtctaccgcatccctccgcgggctaccaaccgtggctacagcgctaaccggtggccttgaagggatcctcgaaaagccttaagcggggaggtgccctatcacagacggaaatccccgagaggaggggagggagcccagagccggctgaaaggaccggtcccggggagctttaaggtgacggtcgaagcccagggaccccttcctacccagatcccttcgcacgaatttcacccttgatcacagcctggagcagttgggaggaccccttctatatttctctggtctctacctgagacgaataaacacacacgcttgtaaacatactgagtatctctgcaaaggaacacaggaaactgccctaggggaggggaaccgcccttggaaggaaacttcctttcccttttgtgctgtttgcgttttactactctttgtatgcgttatctatcaaaacgacgaaaaatattaaaagaaaaaagatacacttcatacagacaacctggcctatgntanttttgtgccactgaagtggtggtggggagtgctcgtatttgcgggggcctgggtggctcttgaaggcgatggttgtccaagtttttcggaaatacaggattggtctgcaccccaagaatgatggaacgtccacat

SEQ ID NO: 361613 - DNA, 461 bp, Homo Sapiens
  misc_feature (11)..(11): n is a, c, g, or t
  misc_feature (26)..(26): n is a, c, g, or t
aaaacccaagncgggtgcctggaaancccaaacggaaacaatgttggggccaggaaaggtggatgcctgttgtccagggaactgtgggagttggcactctgtcctgcctggtgggccctctcggcctcacatgttccacagtgccagcccccggcagacttgggttttcctctttggtggtttcctaaagtgcccttatctgcaaacaacttcttttctccttcaggaactgtgaatggcctagaagaaggagctcagtaaactagaagtcccagggttgcttggtttactggtttataagaaatctgaaagcacctctgacattccttttattaactcacctctcagttgaaagatttcttctttgaaaggtcaagaccgtgaactgaaaaaagtgttggcctttttgcgggaccagatttttaagataaaataaatatttttacttctgtcaaaaaaaa

SEQ ID NO: 361614 - DNA, 428 bp, Homo Sapiens
  misc_feature (23)..(23): n is a, c, g, or t
  misc_feature (31)..(31): n is a, c, g, or t
  misc_feature (42)..(42): n is a, c, g, or t
  misc_feature (125)..(125): n is a, c, g, or t
  misc_feature (403)..(403): n is a, c, g, or t
  misc_feature (412)..(412): n is a, c, g, or t
cacaggctgggttccagttctgnacctgagncacggtttttncctcatgtgcactttctgggcaaggcgcttcccttcattctggggccaaaggcaaggcaggcacgtaagacccttccttcagnctggacctgtgtttggggacatgaattctcttccttcttcctccttgtctgggctctgttgacaaaccgggacatgtttgggcagtaaattgggcaccgtgttcacactgtttcctgggattcaagtatggcaaccagaacacaggagaagaaaagctccagggatccctgtccccatctgtcctcttgatgtgagagagactctgagacttcttccatcgcaatgacctgtattaaacacaagccccccaagcaaaagaaggaggttgagttttctnccagggttnagattagccctttcca

SEQ ID NO: 361615 - DNA, 1428 bp, Homo Sapiens
  misc_feature (35)..(35): n is a, c, g, or t
tgcgcattggccttatgatggaagagatgatcttnaaccttgcagatacacatcttttcttcaatgacctggaggattgtaaccagatccacgttgatgacgtctcatcagatgacaatggccaagatttaagcacatacaacttctccgctgacggcttccacagttcggccccaggagccaacctgtgcctgggctctggcgtgcacggcggcgtggactggatgaggaagctggccttccgctaccggcgggtgaaggagatgtacaatacctacaagaacaacgttggtgggttgataggcactcccaaaagggagacctggctacagctccgagctgagctggaagctctcacagacctctggctgacccactccctgaaggcactaaacctcatcaactcccggcccaactgtgtcaatgtgctggtcaccaccactcaactaattcctgccctggccaaagtcctgctatatggcctggggtctgtgtttcctattgagaacatctacagtgcaaccaagacagggaaggagagctgcttcgagaggataatgcagagattcggcagaaaagctgtctacgtggtgatcggtgatggtgtggaagaggagcaaggagcgaaaaagcacaacatgcctttctggcggatatcctgccacgcagacctggaggcactgaggcacgccctggagctggagtatttatagcaggatcagcagcatctccacctgccatctcaccctcagaccccctcgccttccccacctccccaccgagaactccagagacccagatgttggacaccagggaaggggccccacagccgagacgacgtgtccagtgaccatctcagaagccgtccatcagtccaaatgggggttctgaaaagggaaagtacccaacattggcttcggagtatttgactttggggaaaagggctggctcggagtctagactcttctgtaagactcacagaacaaaagcaaggaattgccaatttggggggtgcctggtgatgaggaggggatgggtttgtcttgtcttctttttaatttatggactagtctcattactccagaattatgctcttgtacctgtgtggctgggtttcttagtcgttggtttggtttggttttttgaactggtatgtagggtggttcacagttctaatgtaagcactctcttctccaagttgtgctttgtggggacaatcattctttgaacattagagaggaaggcagttcaagctgttgaaaagactattgcttatttttgtttttaaagacctacttgacgtcatgtggacagtgcacgtgccttacgctacatcttgttttctaggaagagggggatgctgggaaggaatgggtgctttgtgatggataaaaggcattaaataaaaccacgtttacattaaaaaaa

SEQ ID NO: 361616 - DNA, 911 bp, Homo Sapiens; identical to SEQ ID NO: 262603
  misc_feature (848)..(848): n is a, c, g, or t
  misc_feature (850)..(850): n is a, c, g, or t

SEQ ID NO: 361617 - DNA, 1092 bp, Homo Sapiens
tatcgtcgacccaggcgtcgcggacgcgtgggcgctggctagtgtgtacgcggcgagcttctcccggcgccgcccgctcggctcccatagcgcccgcgacagcggtccggacgccgcccgaacatggactccgccggccaagatatcaacctgaattctcctaacaaaggtctgctgtctgactccatgacggatgttcctgtcgacacaggtgtggctgcccggactcctgctgttgagggtctgacagaggctgaggaggaggagctcagggctgagcttaccaaggtggaagaggaaattgtcactctgcgccaggtcctggcagccaaggagaggcactgtggagagctcaagaggaggctgggcctctccaccctgggggagctgaaacagaacctgtccaggagctggcatgacgtgcaggtctctagcgcctacaagaagactcaggaaactctttcacaggcaggacagaagacttcagctgccctgtccacagtgggctctgccatcagcaggaagcttggagacatgaggaactctgcgaccttcaagtcgtttgaggaccgagttgggaccataaagtctaaggttgtgggtgacagagagaacggcagtgacaacctcccttcctcagcggggagtggtgacaagcccctgtcggatcccgcacctttctaagcctgtggttgcttcacccgctgcagagcacacgcaacccagcctcagcatcacagccgcagctctgttcagcggagcagccagccagggcggatgagcagagccggccctgaggacagtcctgcccatccacgcggagatgtggctgccgcgtttgcatgaatttgaagaacacaggcttgtacacagatgttttacactcacgtttgtaaatgaaacacgatcactgtggctgtccctttcctaggggtgccaggaaatgggacaaggccgcgagggtttgaaaagaaaatttgagcccaagacccacggttcccttttgggaaaaccatgtttacccccctccaaaatgtgttttaaaggatttgaaaaaaattccctaagccataaaaaataagtggggcgatt

SEQ ID NO: 361618 - DNA, 1365 bp, Homo Sapiens
gtgtgtacgcggcgagcttctcccggcgccggccgctcgtgctccatagcgcccgcgacagcggtccggatgccgatcgagcattactccgtgcggccaagatatcaacctgaattctcctaacaaaggtctgctgtctgactccatgacggatgttcctgtcgacacaggtgtggctgcccggactcctgctgttgagggtctgacagaggctgaggaggaggagctcagggctgagcttaccaaggtggaagaggaaattgtcactctgcgccaggtcctggcagccaaggagaggcactgtggagagctcaagaggaggctgggcctctccaccctgggggagctgaaacagaacctgtccaggagctggcatgacgtgcaggtctctagcgcctatgtgaaaacttctgagaaacttggagagtggaatgagaaagtgacccagtcagacctctacaagaagactcaggaaactctttcacaggcaggacagaagacttcagctgccctgtccacagtgggctctgccatcagcaggaagcttggagacatgaggaactctgcgaccttcaagtcgtttgaggaccgagttgggaccataaagtctaaggttgtgggtgacagagagaacggcagtgacaacctcccttcctcagcggggagtggtgacaagcccctgtcggatcccgcacctttctaagcctgtggttgcttcacccgctgcagagcacacgcaacccagcctcagcatcacagccgcagctctgttcagcggagcagccagccagggcggatgagcagagccggccctgaggacagtcctgcccatccacgcggagatgtggctgccgcgtttgcatgaatttgaagaacacaggcttgtacacagatgttttacactcacgtttgtagatgaaacagatcactgtgctgtccttcctaggggtgcaggaagtggacagggcggagggtttgaaagaatattgagccaaagcccaggctccctttgggaatcatgttagcccatcagaatgttgaaggattgaagagttctaagcataaaataagtggcattttctgacttcttcctcctcctccttccctgactcacagaaggaatgcaatcacccagcaagtcctacctgttacgcaattttttatctcaaaatgccgaacgagaaaactgtccattttctgagacccccagaaaggaaactgaccctcagcagctgcctgattcgtcacgcgaatctagctttaacggaagcaaattcattattttttaaatgcagtggacttttcaaaaagtttaaattaggcaaagcagctttagccttcattaggaatattatttctttggga

SEQ ID NO: 361619 - DNA, 859 bp, Homo Sapiens
ggggaagtgaatctagctctgaaggcatggcgcgtacgaagcagactgctcgcaagtccaccggcggcaaggctccgcgcaagcagctggccaccaaggcggctcggaagagcgctccggccaccggcggtgtcaagaagccccatcgctatcggcctggtacagtggctctccgcgagattcgccgctaccagaagtccaccgagctgctgatcagaaagctgccttttcagcgtctggtgcgtgagatcgcgcaggacttcaagaccgacttgcgcttccagagctccgcggtgatggcgctgcaagaggcatgcgaggcctacctggtggggctctttgaggacaccaacctgtgcgccatccacgccaagcgggtgactatcatgcccaaggacatccagctcgcacgtcgtatccgcggcgagagggcttgagtctcaaggactcactgattacataccccaaaggctcttttcagagccacccacatgcgcgctgaaaagatctggtttccccccagaatttcttcccgggtacttggtttggccctggaataaataagggccccatttccccgacctttaatacatcctggttcccgaagaaattcacccttattcccttttttgaaaggctaaattttgggggaagtctttaacatcccaaataaatgggccggggaatttttttcccctaaaagccattttgaaggggtaaacccaaaaaagggtccccttccggggaaattggggttctccccaatttttccggaaagaccccgggtttttttaaccccgaaaaggggggcccttcccaaaaatttttccgggggaaaaccctgggaaacctttggggg

SEQ ID NO: 361620 - DNA, 741 bp, Homo Sapiens
tgttgagtgtggaagcgaaaaccaagttaagaagtcctgttatttgggtcatggtctacggtgaaacatcaaagaaacctgtaacggaaaacgacttgtttgaaagagccagttctctatccaaatttaccaatcagaatcttgcactgaaaaaataaaccaatcgtgaatctctacggccacttccggaatttagcaaccgatcactaacagggatcgtccacaatccaatcagagtgattctgttcctatatagaggggcaaaccaatcttcctaactcatttactttgcagatgaactatggcgcgtactaagcagacggctcgtaaatccacaggcggcaaagcaccgcgcaaacagctggccaccaaggcagctcgcaagagcgctccggccaccggcggcgtcaagaagccccaccgctaccgccccggcaccgtggccctgcgcgagatccgccgctaccagaagtcgaccgagctgctaatccggaagctaccttttcagcgcttggtacgggagatcgcacaggactttaagaccgatctgcgcttccagagctcggcggtgatggcgctgcaggaggcttgcgaggcctacctggtggggctatttgaggataccaacctgtgcgccattcacgccaaacgcgtcactattatgcctaaagacatccagcttgcgcgccgcatccgaggggagagggcataaatattcctatcagcccaagaaaaaaagaa

SEQ ID NO: 361621 - DNA, 1385 bp, Homo Sapiens
  misc_feature (812)..(812): n is a, c, g, or t
ggtccggaattcccgggattgacgagaattctgcgagatggtgaagtccaaccggctgtgcgaacggaagctcttcattcagttctgctgccgcacgtgcctcctggccgggtaagggtgcctagctgcccacagagggcaggcactcccatccatccatccgtccaccttcctccagactgtcggccagagtctgtttcaggagcggcgccctgcacctcacagctttatctccccaggagcagcatctctgagcacccaagccaggtgggtggtggctcttaaggaggtgttcctaaaatggtgatatcctctcaaatgctgcttgttggctccagtcttccgacaaactaacaggaacaaaatgaattctgggaatccacagctctggctttggagcagcttctgggaccataagtttactgaatcttcaagaccaaagcagaaaagaaaggcgcttggcatcacacatcactcttctccccgtgcttttctgcggctgtgtagtaaatctccccggcccagctggcgaaccctgggccatcctcacatgtgacaaagggccagcagtctacctgctcgttgcctgccactgagcagtctgggggacggtttggtcagactataaataagataggtttgagggcataaaatgtatgaccactgggggccggagtatctatttctacatagtcagctacttctgaaactgcagcagtggcttagaaagtccaattccaaagccagaccagaagattctatcccccgcagcgctctcctttgagcaagccgagctctccttgttaccgggnttctgtctgggtcttcagggagtctcatggcctgaacgaccacctcgacctgatgcagagccttctgaggagaggcaacaggaggcattctgtggccagccaaaaggtaccccgatggccaagcaattcctctgaacaaaatgtaaagccagccatgcattgttaatcatccatcacttcccattttatggaattgcttttaaaatacatttggcctctgcccttcagaagactcgtttttaaggtggaaactcctgtgtctgtgtatattacaagcctacatgacacagttggatttattctgccaaacctgtgtaggcattttataagctacatgttctaatttttaccgatgttaattatctttgacaaatatttcatatatttcattgaaatgcacagatctgcttgatcaattcccttgaatagggaagtaaccattgggcttaaatttttccaacctcggtctttctccattatgtcctgctcccctgtttgacgacagtgcattgtgctgttccctgtgacttggagagaaccagatgtgtcattgaatctacactctgaaagaga

SEQ ID NO: 361622 - DNA, 1082 bp, Homo Sapiens
  misc_feature (1001)..(1037): n is a, c, g, or t
cggccgcgcaatggccacccagagcctgtaggaggagccatacagggctcagcccagccccaggccacccgcaccctgtgcctccctgcctcacccgtaactccatgggcatatagctgccccttccttggccataatggggaagacctccttctcaatggacgtaggctgcagctggatgcgccgcagcactgcagggctcaggatgtacatgcctgcgttgatcttattggacacaaacaccctgtggcttctccacgaaccggtgaatgcggcctgtgtcagcctcacacaccaccacaccgtacttggagggttcctccaccttggtcaccaggatggagccctcctggccatggtgccggtggaactgcaccatggcttggaaggggaaatcgcagatcacgtcactgttgaggacgaagaaagggtctgcagtctcagagagtaggtcacgggccagcgccaggggcccagctgtccccaaaggctcctcttcatgggacatggagattcggattcccagcctctgctcctgtgccttcatttccttctccagcacctgcgacatgtagctcacggccaggatcacgtggtccacgcctgccgcggctagcgcctccacttggtgcagcaagatgggcttattgcagaagtccaccagtggcttcggggtgctcagcgtcagcggccgtagccgcgtcccatagccccccactaagatcagtgccttcatcgcgcctgcggacgttgagggggtgtcccgggctctgaggtgcctgcagcccgcctggccggtccctgccgcgcactcccaacgccgtgcccggccccgcgcccttcaccaacccgcctgacagactctggctccacctcgtccgcccggtcgccctgacgccggatccagggccgccacaacacagaacgcgacaccgggtagacggctgctggccccgaactccgctctcgacgaattcgagctcggccgatttggcctgatnnnnnnnnnnnnnnnnnnnnnnnnnnnnnnnnnnnnncgccgccaccgcgtaagcctccgttcccctatagatctatacatc

SEQ ID NO: 361623 - DNA, 1363 bp, Homo Sapiens; identical to SEQ ID NO: 262605
  misc_feature (1128)..(1128): n is a, c, g, or t
  misc_feature (1155)..(1155): n is a, c, g, or t

SEQ ID NO: 361624 - DNA, 1535 bp, Homo Sapiens
  misc_feature (1458)..(1467): n is a, c, g, or t
cgacggcagtactctcggcgtactaaggtagcgaggcctgggtggcgaattcgggcacgagggtgggccccaacttccgcgtcggcaagaagatcggctgcggcaacttcggggagctccgcctaggaaagaatctctatacaaatgaatacgtggctatcaaattggagccgatcaagtcccgggccccgcagctgcacctggagtaccggttctacaagcagctcagcgccacagagggcgtccctcaggtctactacttcggtccgtgcgggaagtacaacgccatggtgctggagctgctggggcccagcctggaggacctgttcgacctgtgcgaccggaccttcacgctcaagacggtgctgatgatcgccatccagctgatcacgcgcatggagtatgtgcacaccaagagcctaatctaccgggacgtgaagcccgagaacttcctggtgggccgcccggggaccaagcggcagcatgccatccacatcatcgacttcgggctggccaaggagtacatcgaccccgagaccaagaagcacatcccgtaccgcgagcacaagagcctgacgggcacggcgcgctacatgagcatcaacacgcacctgggcaaggagcagagccgccgcgacgacctggaggcgctgggccacatgttcatgtacttcctgcgcggcagcctcccctggcaggggctcaaggccgacacgctcaaggagcggtaccagaagatcggggacaccaaacgcgccacgcccatcgaggtgctctgcgagaacttcccagaggagatggccacgtacctgcgctatgtgcggcgcctggacttcttcgagaagcccgactatgactacctgcggaagctcttcaccgacctcttcgaccgcagtggcttcgtgttcgactatgagtacgactgggccgggaagcccctgccgacccccatcggcaccgtccacaccgacctgccctcccagcctcagctccgggacaaaacccagccgcacagcaaaaaccaggcgttgaactccaccaacggggagctgaatgcggacgaccccacggccggccactccaacgccccgatcacagcgcctgcagaggtggaggtggccgatgaaaccaaatgctgctgtttcttcaagaggagaaagagaaaatcgctgcagcgacacaagtgaccctgggcgcgtgcagccccctgaatcttctccgtgcagccccttggggcgcgaccttgtgcgaggccctcggggcccacccacagcggcccagggccagaccctggctggaagccagaacgcagactgcaggggccgcgcctggctcaggcggccccacccccgggacgtggggtcacttccttcatgtaagactttggccgaaatttctacacctgtgtctagtcctcccctccaagagcattaactatttaaaacaaggaaaagaggnnnnnnnnnncagaggcccgccctaccccactcctgcccctccgtgtctttgctgaagtgagtagtgtgatcctggag

SEQ ID NO: 361625 - DNA, 1243 bp, Homo Sapiens
  misc_feature (499)..(499): n is a, c, g, or t
tgatgccgcctggtctcccgcatcagtcccgttggggattcacgcctggttttctgttcggctggttttgtcccggactgaggctggaggccagtcggtgtggacggtccgatggggttcgcaggggcattcccggcccacgtcgtacttattagtcgaacccgaagccacttgcggtcgaagagtcggtgaagagcttccgcaggtagtcatagtcgggcttctcgaagaagttccaggcgccgcacatagcgcaggtacgtggccatctcctctgggaagtttctcgcagagcacctcgatgggcgtggcgcgtttggtgtccccgatcttctggtaccgctccgttgagcgtgtcggccttgagcccctgccaggggaggctgccgcgcaggaagtacatgaacatgtggcccagcgcctccaggtcgtcgcggcggctctgctctgcggggacaggggcgcagcctcagcggggtccgggcgcccgccccccgcncgcgcgcgcgcagctcacccttgcccaggtgcgtgttgatgctcatgtagcgcgccgtgcccgtcaggctcttgtgctcgcggtacgggatgtgcttcttggtctcggggtcgatgtactccttggccagcccgaagtcgatgatgtggatggcatgctgccgcttggtccccgggcggcccaccaggaagttctcgggcttcacgtcccggtagattaggctcttggtgtgcacatactccatgcgcgtgatcagctggatggcgatcatcagcaccgtcttgagcgtgaaggtccggtcgcacaggtcgaacaggtcctccaggctgggccccagcagctccagcaccatggcgttgtacttcccgcacggaccgaagtagtagacctgagggacgccctctgtggcgctgagctgcttgtagaaccggtactccaggtgcagctgcggggcccgggacttgatcggctccaatttgatagccacgtattcatttgtatagagattctttcctaggcggagctccccgaagttgccgcagccgatcttcttgccgacgcggaagttggggcccaccatcaggacccccgagctggtccccgagctccggatgccgtggctgctccggcccccgccggccttggacattctccggccctcctccgtctcccctttccctcctttcttgtcaaaatccataagtttgtgatcctcgtgcttgtatcgccacccaggcctcgctc

SEQ ID NO: 361626 - DNA, 525 bp, Homo Sapiens
  misc_feature (48)..(48): n is a, c, g, or t
aaattatggacgcctttcatacacaaagtttcgtttggtccagacctnccaggaggcccaatttttggaccagtcccaaagttccgtggagccttgatgtgcccccatgggatgtaattaggagggttgtcagggcttgaggttcacggtgcacgatgccatagttgtgtaagtactccagggccagcacagtttccgcaaagtatagacgcaccatgtccacaggcagggccccaatattcttcaggtacgtggccatctcctctgggaagttctcgcagagcacctcgatgggcgtggcgcgtttggtgtccccgatcttctggtaccgctccttgagcgtgtcggccttgagcccctgccaggggaggctgccgcgcaggaagtacatgaacatgtggcccagcgcctccaggtcgtcgcggcggctctgctccttgcccaggtgcgtgttgatgctcatgtagcgcgccgtgcccgtcaggctcttgtgctcgcggtacgggatgtgcttcttggtctcgg

SEQ ID NO: 361627 - DNA, 1604 bp, Homo Sapiens
  misc_feature (1313)..(1468): n is a, c, g, or t
  misc_feature (1477)..(1491): n is a, c, g, or t
  misc_feature (1518)..(1526): n is a, c, g, or t
tccgagtacccagaattctgttctaaaaccaaggccctggcagccatcccacccccggttccccccagcgccacagagcccttggacctgggctgcagctcctgtgggaccccactacacgaccaggggggtcctgtggagatccttcccttcctctacctcggcagtgcctaccatgctgcccggagagacatgctggacgccctgggcatcacggctctgttgaatgtctcctcggactgcccaaaccactttgaaggacactatcagtacaagtgcatcccagtggaagataaccacaaggccgacatcagctcctggttcatggaagccatagagtacatcgatgccgtgaaggactgccgtgggcgcgtgctggtgcactgccaggcgggcatctcgcggtcggccaccatctgcctggcctacctgatgatgaagaaacgggtgaggctggaggaggccttcgagttcgttaagcagcgccgcagcatcatctcgcccaacttcagcttcatggggcagctgctgcagttcgagtcccaggtgctggccacgtcctgtgctgcggaggctgctagcccctcgggacccttgcggggagcggggcaagacccccgccacccccacctcgcagttcgtcttcagctttccggtctccgtgggcgtgcactcggcccccagcagcctgccctacctgcacagccccatcaccacctctcccagctgttagagccgccctgggggccccagaaccagagctggctcccagcaagggtaggacgggccgcatgcgggcagaaaggttgggactgagcagctgggagcaggcgaccgagctccttccccatcatttctccttggccaacgacgaggccagccagaatggcaataaggactccgaatacataataaaagcaaacagaacactccaacttagagcaataacggctgccgcagcagccagggaagaccttggtttggtttatgtgtcagtttcacttttccgatagaaatttcttacctcatttttttaagcagtaaggcttgaagtgatgaaacccacagatcctagcaaatgtgcccaaccagctttaataaagggggaggaagggagggcaaagggatgagaagacaagtttcccagaagtgcctggttctgtgtacttgtccctttgttgtcgttgttgtagttaaaggaattgcattttttaaaagaaatcttcgaaggtgtggttttcatttctcaatcaccaacagatgaataattatgcttaataataaagtatttattaagactttcttcagagtannnnnnnnnnnnnnnnnnnnnnnnnnnnnnnnnnnnnnnnnnnnnnnnnnnnnnnnnnnnnnnnnnnnnnnnnnnnnnnnnnnnnnnnnnnnnnnnnnnnnnnnnnnnnnnnnnnnnnnnnnnnnnnnnnnnnnnnnnnnnnnnnnnnnnnnnnnntttgtgggnnnnnnnnnnnnnnnaaaaatttttttaaacccttttgtttnnnnnnnnncccccaaagggaagggaaccgggccaaaatttgtcccaaagaaaaaccggggaagaaaaaagggtgttgtttcccccc

SEQ ID NO: 361628 - DNA, 1080 bp, Homo Sapiens
ggtccggaattcttgcgatgccgctaccagatggcggcgcccatcttgcggtccttttcctggggccggtggtctggtaccctaaatctctcagtattgttgcccttggggctgcgtaaggcccactcgggcgctcaggggttactggcagcgcagaaggctcgaggtctgttcaaggacttcttcccggagacggggacgaaaatagagctcccagagctcttcgaccgtggcacggcgagttttccccaaaccatttactgtggcttcgaccccacggcagactcgcttcatgtgggtcatctacttgcgctgctgggcctgtttcatttgcagcgagcgggccacaacgtgatcgcgctggtgggaggcgccacggcgcgcctgggagacccgagcggccgtaccaaggaacgcgaggcgctggagacagagcgcgtgcgagccaacgcgcgagctctgcgcctagggcttgaggccctggcggctaatcaccagcagcttttcactgatgggcgctcctggggcagcttcactgtgctggacaactcggcctggtaccagaagcagcacctggtggacttcctggcggcagtggggggtcacttccgcatggggacgctgctgagccggcagagcgtgcagctgcggctcaagagccccgagggcatgagcttggccgagttcttttaccaggtgctccaggcctatgacttctattacctcttccagcgttatggatgcagggtccagctgggcggatctgatcaactaggcaacatcatgtccggatatgagttcatcaacaagttgactgggagaagatgtattttggaatcaccggttccctctaataacagtaccactgggaccaaagctggggaaaatctgctggcaaaccttgtttggccttaccggaaataagacatctccatttgaaattggaccaattcctttggtccgggcaccccggacaatttcatggggaaaggtaccctgaaacttggtccacttttccgggcccctttccaggagattgggtcattttttggcgacttgcgttgccaaaaagccccaaaa

SEQ ID NO: 361629 - DNA, 1197 bp, Homo Sapiens
ccccgggggccgtttgggccattccccggggtttctttttttgcaagaaagcggggacccccatgatgttcccttccagggaagggaaattttgttttcgcttcaggggagtcgaatacggccaaagcatgcctgaaaaggaggtccacccaggagggttgccgggggttcagggaggccccaagctccaagtgcctggcgaggcccaggctgtgcaagtgggcccagccaccagcggcggtttttcctccgggcgggtccaccctggacggcagcttttgcacttcttaccttaattgcactgtccactcctgtcgggttggggggccaccctggggggccctcccttgggcacacagagtgtaccgtctgcagacaggctgtgcccctcccaacactggcaccagtaactgccggcggtgttgacgcagcgctggggacagccgcccctcctagcactgcattcatccacatctgactggcaagtgtcaccccgccatcctgcagggcagcggcagcggccaggctggacacagctccctccgttccggcatggcggctggcatattgctgctccacaggccccaggaagcccgctggtcctcttccagccggggcagcacgcgtagcgaggcctggcaggggccagcccagggctgcggcggtaggcggtcctatagatggttcggtaggtgctgcaggcccggtgcccgtcgcaggtggtgaggaagggctggtacacacgctgcacgaacgactcggagacagggtccccgtgagcccggacagcacacaccctacggccgggccggtaggcgtgctctgtgccgcccactgccaacaccagaagccacatcagcagcacctcctgagagcccctcatggcctgtgcctccaggcggggtggccttctcctctgggtggcctggcggaggagaatcagtcatcccccggacaggggcaggagctgctcctccgggtggtgggggccacctgtgcctccccggtcctgggggctgctgatgctgctggagcccaggcgtggccatggtggccgctgctgtgtcctgggactggagatggaccctagcccttgctggggcctcaggcccactggccgcctggaggcacctcctgaggcccacctgcctggcctgtccacaggagcctcccttgcagccgtgcagggccagcttg

SEQ ID NO: 361630 - DNA, 1306 bp, Homo Sapiens
  misc_feature (34)..(34): n is a, c, g, or t
gtatttacagataagactggaccactcactgaanacagcatggaattcattgaatgctgcatagatggccacaaatataaaggtgtaactcaagaggttgatggattatctcaaactgatggaactttaacatattttgacaaagtagataagaatcgagaagagctgtttctacgtgccttgtgtttatgtcatactgtagaaatcaaaacaaacgatgctgttgatggagctacagaatcagctgaattaacctatatctcctcttcaccagatgaaatagctttggtgaaaggagctaaaaggtacgggttcacatttttaggaaatcgaaatggatatatgagagtagagaaccaaagaaaagaaatagaagaatatgaacttcttcacaccttaaactttgatgctgtccggcgacgtatgagtgtaattgtgaagactcaagaaggagacatacttctcttttgtaaaggagcagactcggcagtttttcccagagtgcaaaatcatgaaattgagttaactaaagtccatgtggaacgtaatgcaatggatgggtatcggacactctgtgtagccttcaaagaaattgctccagatgattatgaaagaattaacagacagctcatagaggcaaaaatggccttacaagacagagaagaaaaaatggaaaaagttttcgatgatattgagacaaacatgaatttaattggagccactgcagttgaagacaagctacaagatcaagctgcagagaccattgaagctctgcatgcagcaggcctgaaagtctgggtgctcactggggacaagatggagacagctaaatccacatgctatgcctgccgccttttccagaccaacactgagctcttagaactaaccacaaaaaccattgaagaaagtgaaaggaaagaagatcgattacatgaattattgatagaatatcgcaagaaattgctgcatgagtttcctaaaagtactagaagctttaaaaaagcatggacagaacatcaggaatatggattaatcatagatggctccacattgtcactcatactaaaattctagtcaagactctagttcaaacaattacaaaagcattttcctacaaatatgtatgaagtgtactgcagtgctctgctgtcggatggcaccattaccgaaaagcccaaattgtccgaatggggaaggaaattaaaagggcagcccaataactctggccaataagtgatggtggccattgatgtttagaatgatctttggaaatccccatgtggggaataaggtatttaaagggcaa

SEQ ID NO: 361631 - DNA, 1155 bp, Homo Sapiens
gggacttccggcagcaggtggtggggccatggctgcccttctccgagctgtgcgtaggtttcggggaaaagctgtgtgggaaaggcctctccatgggctgtggtgctgcagtgggcaggaggatcctaagaggtgggtgggcagcagttcacccatctcgaaggagaaactaccaaacgcagagactgagaaattctggatgttttaccgttttgatgccatcagaaccttcgggttcctgtcacgactgaagttggcacagactgccctgacagtggtagctttgccaccaggctattacttgtactcccagggcctcctcactctcaacaccgtgtgcctcatgagtgggatatcgggctttgccctgaccatgctgtgctggatgagctatttcttacggagactggttggtatcctgtatctgaatgagtctggcaccatgctgcgggtggcccatctgaacttctggggctggcggcaggacacatactgtcccatggcagatgtgattcccctgacagaaaccaaggaccggcctcaggagatgtttgtgcgtatccagcggtacagtgggaaacagaccttctacgtcaccctgcgctatggacgcatcctggacagagagcgtttcacacaggtgtttggggtacatcagatgctcaagtgaacaactgggacctggacctctgggtaaccctgggtcgcctggattaacaggaaggctgagggtgtgggcaaggctgaagaaaggggactgggtacttggagactttgcctgggcccctgggaacatgtgttttgtggtgaataaattcacaaggcaagagctggtgtacaggtttaggaaaaaggctctaagcaagttcttacagcacttgtttgtgacattcagtcagataatggccagaagtttttgttaagagccagttcttagaagaacctatgccaaggtcacccatagagtccattggtgtgaaagagaaaggcaaagaggtgtggcgggggagcgtaagatttggagtcagaagtctcagttctgtcatttgtcctggagcaggttattgagtctctttgaatcttggttttcacatctgtaaaatggaaagtcctgcttgtttcatgggatgggtgtgggaataaacaataaatgtc

SEQ ID NO: 361632 - DNA, 1469 bp, Homo Sapiens
gctcctcctctcggggccccagtgatacctcctcccggttcagcaaggagcaacgaggagtagcccagcccctggcccagcttcgaagctgcccccaggaggagggccccagggggggggcttggctgctaggccccttgaaaacagagcaggggggcctgtggcacgttcagaggagcctggtgccccgctgcccgtggccgtcggcactgccgagccagggggcagtatgaagaccacattcaccatcgagatcaaggacggccgtggccaggcctccacaggccgggtgctgctgcccacaggcaaccagagggcagaactgacactggggctgcgggcgcccccgaccctactcagcaccagtagtgggggcaagagcaccatcacccgtgtcaacagccctgggaccctggctcggctgggcagtgtcactcatgtcaccagcttcagccatgccccccccagtagccgaggaggctgcagcatcaagatggaaccaagagccagcagagcctctcgctgcagcagtggaagcggccaatggggctgagcaggacccgagtgaacaaaggcaccagaagggcggagccctctgagcgctgaggagctgatgactattgaggatgaaggagtcttggacaagatgctggatcagagcacggactttgaagagcggaagctcatccgggctgcacttcgtgagctccgacaaaggaagagagaccagcgggacaaggagcgggaacggcggctgcaaggaggcacggggccggccaggggaggggcgcggcaacacagccactgagaccaccacgaggcacagccagcgggcagctgatggctctgctgtcagcactgttaccaagactgagcggctcgtccactccaatgatggcacacggacggcccgcaccaccacagtggagtcgagtttcgtgaggcgctcggagaatggcagtggcagcaccatgatgcaaaccaagaccttctcctcttcctcctcatccaagaagatgggcagcatcttcaaccgcgaggaccaggccagcccacgggccggcagcctggcggcgctcgagaaacggcaggccgagaagaagaaagagctgatgaaggcgcagagtctgcccaagacctcagcctcccaggcgcgcaaggccatgattgagaagctggagaaggagggcgcggcccggcagccctggcggaccccgcgcagccgtgcagcgatccaccagcttccggggtccccaacgcccacagcatcaagcagatgctgctgggactgggtgtcgagccaagactcgcgggtaccaaccacgtcggacatccagaaccttctcctccaactgggagtgatgggaatggcccttctgtgcccccggtggacaaaacttctttccctgaagggccttcccactaatggggcaggtttaagccctctcagaaaccgaacgcccaaaaac

SEQ ID NO: 361633 - DNA, 981 bp, Homo Sapiens
ggagtcttggacaagatggtatacccagatccggtggcctgggggttgccagagcccagcaggcaccaggtaggcaatgatgggctctatatgcagctggatcagagcacggactttgaagagcggaagctcatccgggctgcacttcgatgagctccgacaaaggaagagaggtagagagccagttgccctaccctagatccagctgccccattccccagctgctcccctcatactctggggtcaatttgtggacaaccccagcttaataactgccctacccagcttctccttctctagacccagcagttcccttggctattccctgctggatccagctgctccttccctagctccttctctcccgctggtgaccccagttattctccccaaccagcttctcttctccttcctagacccaagatactccctcccgcagctactctctccattggatccagttgcctctcaaagtactgtcaacgactccttccctgaatccagatactccttctccctgctgctcctctctccctgaagtccattgatggccatcttagcctctggcccatccagcttcccttttcctggacacaactacttcctcccccagatagttcttccctggacacatctattcattcccttgagattctgggttcaattgcttctcctctcaaacactctcaagttactcctctgaatctagctgcttctgccagggcccactgatggccaccccaggtctctatcgtctacccagcgctacttctagttttaagcccagttaacccccttcactagcttctctcccagctactcttcccctggatcagattgcttctcagatcccatcaattgctcccttcctggatctaaatattcctgcctccagctgctcttctcctccaaccaaagacctgctgatggcccacccagctacttcctcactcagcttctccttccttggactcagctacc

SEQ ID NO: 361634 - DNA, 1249 bp, Homo Sapiens
atttgggggccctggatttcgggccgccaggggcccgggtttccaacacccccaccttttttgggtggggccccccccttgggacccccagcctaagggcagccttggggtccctaggtgggaattttgcatgctgtcccaggtcctggatcccagaatctgcaggacatcatccagggatgaaggcccccaggtcccacgtgcagggacagcagggaggctggcattggacaggaagggctcctcggcccctgactccggggtcagtccactgttgggggagccagtctctggaatcctccagatgtccacaatccctccctcctgtggggaagcctgaggggtctccaggtgcaggcgaggggccttgggtggagcctgggctgtgggcacgggtgagagcctgggggtccaccgataaccgggagggagatggcgttcttgagcagaggggatgggccgtccgggagctcccgcccacacacggtggcggtgcgggtgaactggaaggggaggtcgaaggtgccatcttcttcaggcccctccaccatggtccccggcaggaggtggaacttgccctgcaggaaggagatgtcgccaaacatgtcactgccgccgccactgccaatatgaatggtgtggcggaagtcccccagcggtgggctgatcatgtccgaggacagcaggtcccgaagcttctccttcttgcccttgcgactgccacgcttcagatagatgggcaccttggtggacatggtgacctcaccaccaggcctggctgtgaggctacgggccgcctgctgagaccacacctcctctccaaccctcagccagaggaaacactcgttccacggggtggtttgcaggtgccagagctcgccaacgggcttctggctacagtgtgggggcacgaacaaagttggcccaaggaattaaaaaagattagagatcaatgaagtcagtgggctgagataacaaaaatcacgttctccccaaaggacggcaaactcttctgaagaattgaagccagaaaggtaggaactgtgtgggcagcagtgcactttggtcttgtcaccgagggttacttgtccccggtccagggctgaggagcgtgaggcgcgcagacggcagaccggcggacagcaaggtctcaggagctggacagcgcggcggccggacccgaccggcggtgaacttacagagtgcaccgcggaccccgcagccccgccatcccgggaattccggacgc

SEQ ID NO: 361635 - DNA, 1577 bp, Homo Sapiens
gggggggtcttaagcccattacaggaagcccctttttccgttttcccttccttttgcccttggttttgttcccaggccccagttcaatccagggaccccctggggcagcctccccggagatgggattcggtttggggttaagggcatcggggtcctgtcgcagccaggggttgcaggaggatgcctgtggctgtgagccgttcagctggctcccgacgaaggaggcagcgaaccagacagcgggcaggggccgagaggcctgcaggcaaggcgtaggccccgcggcggatcttgccgaagagcaggacaggctccgagtcctggaaggggtagtggccggccagcatggtgaagagcgccacgcccaggctccagacatcggctgccttgcccgagtatgaggcccgtgagctgagtatctcaggtcccacgtaggctgggcacgcgtgcttgtcccacagggaatcatctggcccaagtcagcacgcagggagtcctccaggtttctccaagcaccaagcttcgtcctctcacggtcagcgaagacaaagcgacacagcttgagatcacgcaggaccagaccgtgctggtgacagtgcgccagggcggtggccatctggcggaagagcacggcagcctcaggctcagggatacggtggcggcttcgcaccaggctgtgcatgtccccatgggtccgagtgaaaaaggcgtagaggagctgggtaccagccaggacctcagtgggccgagccacatgcttgtgcgggggcagccgcgcgtagggctccagcacggccagggcttcctggacggggtacaccttgcaggtatactcagtgcctgtagggcagtgcagggcctggtaggcccgcccgccctcctcgggctccaggaggacatagggcccaagacgggaggcagtggccacagcagttgcacgatctggagcagtaggtgggctcaggggcaacaggcaggggggcagtctgggctggggcccacttcgagctcgtttctggacgggacgctcggtatctaagttgtcatccaactccaaccgcttcttcctggacagggaacccgcaggagcagccagaggggtggctcgcatctcgccccgtcgttccgcgtgggcccgggcgccgccggggctcagagcctccagggcaccagcaggtgggccggcccgctgcgctgctgccgagctcgggatcccagcccagctccagccctgcccgggtcctagcagcggacgcgcgcggagccgcctccacttccgctgcgagtctcgtgcgcgcccggcccccggtccgggtgatgcaaaccggagctaatcccccggtccgggtgatgcaaaccggagctaatcccccggtccgggtgatgcaaaccggagctaatcagccgccgtctgatgccctcgggcccgggatcgcaccatcccccgcgccgcgcccgggcctctctcctctgcatccgctgcacctgggacccgccctcgctggccccctaggggcgtctggtcagtgcagacatcagccacggactctccctatcaccttggaaaaaaaatttgc

SEQ ID NO: 361636 - DNA, 902 bp, Homo Sapiens
  misc_feature (275)..(275): n is a, c, g, or t
ctttaagcatttccatttgggtttttcccttgcgggcaattcctttcaatagcgtaacaggagggaaattttggtggaaaaagtaattattcctccggcaataaagcaatttttagggattcccaggccagccaattcagggaggtatagtttccaagagatttgaattacaatccaaatgtttcacccttttcattctatttatttcggcagccaaactcttcagttcattactagaaagattgagtcgcaccagactggacagagaagaaaanctagcaggaacagttgtaagatgattgtttgaaagatctaaatcttctaaattggaaaagttgttcaaattccctctgatatgcagggttaatccattatgctggagatacaggcactccaggtttcttaggttggtaattccttcagggagtattttcagtttattatggctgacattaagtttctgaagattttctagctctctaatagcagaaggaagggatgtcaactgattatcatgtatatcaagaacagtcagtgcaggcaagagtcgcaggtcatctgtaagtgactgaagtttattgttggatattattagtttggtcaaatctgtctgctcccaccatctttcagtagcaccaaacgaaagattctgattagcttcctcagggatatccacatttattctccagacacactgcggcacttcactgaggtttctacccgacaggtttaactggccgctcttcctcgctgccttcaacagcccttggggtaccgaggtaccgcagtctcttccacctgctttgaaaccagcgcggagatcctgccccgctatccgcttcaggcgcgacatgttcaaagtcctaggtccagaagctgcagccccacccgtgacgcttccc

SEQ ID NO: 361637 - DNA, 1206 bp, Homo Sapiens
cgcgctcctcccaccacccgttctccccgcagtccttcccctccactcccttccccttctctgctcatgcaggtagcccagtgaatgcctccgcctcagagatgctaccgcgtgctgctgcccctgctgtgggcaggggccctggctcaggagcggagattccagctggaggggccagagtcactgacggtgcaggagggtctgtgcgtcctcgtaccctgcagatagcccactacccttccagcctcgtactatggttatggctactggttcctggaagggggctgatgttccagtggccacaaacgacccagacgaagaagtgcaggaggagacccggggccgattccacctcctctgggatcccagaaggaagaactgctccctgagcatcagagatgcccggaggagggacaatgctgcatacttcttatcggttgaagtccaaatggatgaaatacggttatacatcttccaagctctctgtgcgtgtgatggccctgaaccacaggcccaacatctccatcccagggaccctggagtctggcccatcccagcaatctgacctgctctgtgccctgggtctgtgagcaggggacgccccccatcttctcctggatgtcagctgcccccacctccctgggccccaggaccacccagtcctcggtgctcacaatcaccccacggccccaggaccacagcaccaacctcacctgtcaggtgacgttccctggagccggtgtgaccatggagagaaccatccagctcaatgtctcctccttcaaaatcctgcaaaacacctcgtccctccctgtcctggagggccaggctctgcggctgctctgtgatgctgacggcaacccccctgcacacctgagctggttccagggcttccccgccctgaacgccacccccatctccaataccggggtcctggagctgcctcaagtagggtctgcagaaaaaggagatttcacctgccgtgctcagcatcctctgggctccctgcaaatctctctgagtctctttgtgcattggaaaccagaaagcagggctggtggtggtcctggggagcagtctgggggagctaacatcacaaccccgggcttttcctctgggttttgcttcatctttaaaaagggagaactagaagggaagaaaaacagccccgcccagtggcaaaacaacggaatgaatgtgaaaccc

SEQ ID NO: 361638 - DNA, 1240 bp, Homo Sapiens
cccccgtggaggatcagggactgttgcccaggcccagctgagctggagttgaccttgaatgagacctggctgctgttcccctccagcggcttctcctcaagccgccagcacagggagggggccggccgggctcgaaaggagcatctgcagtgcagaccctcagcctcccaggagcaggaggggcccagcaactgtgggagggagtaaactgagagattcagaaaaatttgcaggaagcccagcgggtgctgagcgcggcaggtgaagcctccttcttctgcagaccttactcgacgaagctccaagatcccggtattggagatgggggtggcgttcagggcaggggagccctggaaccagctcaggtgtgcaggggggttgctgggagcatcacagagcagccgcagagcctggccctccaggaccggaaggtatgaggtgttttgcaggatctctagggctatgccgttcctgaagatggtgatggtctgtggtgcataggagacattgagctggacagttctctccgtggtcacctgagctccttggcgtttcatctgacaggtgaggttggtgccatggtcctcgggcctgggggtgagggtgagctccgaggagcgggtggtctcggggtccagggggctgagggcattccccgtccaggagaatgtgagaggtggtcccgcttcacaggatcctggaaggctgcagctcagccttgtggggcggccggactccagaggctccagaaagtggatgtcgggtttctctatcagggctgtcacctccaagttcagcttattctgttggtagctatattttacatcccttcctctctccacgcggaagaaatagcttcccgtgtcctccattctggcatctccgatgctcagggagcagttcttcttctggacatccccaaggaggcggaatcggccctgggtctctggcttcactcttctgtctgggttgtttgtggccacaacctcagcgtagtatgggatctccccgtcccggaaccagtagacgtagagtgggggagaggaataccaggatctccaggggtaagagaaggagcagggcacaaggacgcacaggccctcctgcaccgtcaccgacttctgcacttgcagctcgtacactggcttctcctgcagggaccccccccacagcaggggcacgcagcagcaggggcagcatgtctccatccgccagggccccagcccagtcccagtccggc

SEQ ID NO: 361639 - DNA, 765 bp, Homo Sapiens; identical to SEQ ID NO: 264759

SEQ ID NO: 361640 - DNA, 900 bp, Homo Sapiens
tgccagtaactctcggggttataggtagcgaggcctgggtggcgaattcggcacgagggaacgtgttcccgttccgcgacgcccgtgccgcaccggacccagtgctggaggccggcccggtggcacacgggccactgccggtaccgctggtgctggacaacgggtcgttccaagtccgcgctggctgggcgtgtcccgggcaggacccaggtcccgagccgcgcctgcagttccgcgcggtgtgcgcccgcggtcgtggcggggcacggggcgcgtcgggcccgcaggtggggaacgctctgggcagcctggagccactgcgctggatgctgcgctcgcccttcgaccgcaacgtgccggtcaacctggagcttcaggagttgctgctggactacagcttccagcacctgggtgtctcctcacagggctgtgttgatcatcccatagttttgacagaagctgtgtgcaacccactgtattcacggcaaatgatgtctgagcttctttttgagtgctacgggattcccaaggttgcctatggaatagacagcctcttcagcttctaccacaataagccaaagaactcgatgtgcagtgggctaatcatttcatctggataccagtgtacgcatgttttacccatcttagaagggagattagatgctaaaaactgcaagcgcatcaatcttggaggaagccaagcagctggttacctccagcgtctcctccagctgaagtaccctgggcacctggcaggcatcaccctcagccgcatggaggagattctgcatgagcacagctacatcgctgaaggattatgtggaagacattacacaaaatggcggtgtcctgatcattcatgagactaatgtccaacaagatgcagctcccattctccag

SEQ ID NO: 361641 - DNA, 1151 bp, Homo Sapiens
ttgtaggaaggtgtgtttcctggactgatcccaattctgaactcttaccttgaaaacatggaagtggatgtggacaccagatgtagtattctgaactacctaaagctaattaagaagagagcatctggtatgatatctatttttcttaatctcataatatagacagcatggtataatcttagaatgttcaatttcttaaagtagtcttttaaaataatgctgtattcatgcacagtttcacatttttatatttctgcaattgtattcaccttataatctttgacactcataatttagattagtagtgctttttttcttatcagttcataaaataggggtgcatctgaaaatcactggcatcttagatgatgaaatggcatctggattgcttacttatcatttacgtccaactgtgttgatcttacatcatcatgggcccttttatagggctaaggaactctgtaagttaaataagctgaacagttctttagcctgcctttgtacatacagtgaggctcctgagaatcccctttctttgttagttttgaggaggttacatttacaatacagtacagtaaccaagtactgctaacacagtacttggcacaagggagctgtcagctgttaataaagtgacagcaataatggtaatggcatctgtatttaactcaaggcttctgtaaactttctggagtcacaaaggatagccgtagaaacctacctcacccctcaaatggtatactgccaatttcccacttcattcactctacttactggtctttatttctctccacctctttgatcaaagatcgctcaaggaccctacagtcctctgaggcagtctcatgacactggcatttgtagtcctagccctctggccaaatgggagggcacatgttcttgtacacatgtgctggctcctgttccttaagagctggcagtgtcagcatatgggtggcatctaacaggtaccatagaaactggatgtatgtgttctcattgcctgcctgcaacctagaattcctgcccaggaggagttcttcaaacgctatgaaagatgttcccaccccctgccatgcagctacactaaaaggacatattgatttctctccagaattgtgtttatgctgaccactaaatatcaacttatt

SEQ ID NO: 361642 - DNA, 244 bp, Homo Sapiens
tatacggctgcgagaagacgacagaagggcatttggcagtatgttaccaaaaacttaatatttgaaccctcttcattctgtcaacgtcatttctaaagatttattctgaggaaaacttactcgacatctaggaatatggtcaatttttattcttctgcctttacactttttgataaattccaaagttccttacaatgaatttatgtcatttctaccattggaaaaaaacctctcattgtttgtg

SEQ ID NO: 361643 - DNA, 332 bp, Homo Sapiens
tatacggctgcgagaagacgacagaagggatgcaagggcagaatgaagtcaagagactgtaaaggccaatgtcagtgttggcaaaaagcaaaaggagtaaagattttgcaatgactttatttgcagtgactgtacaaattttgcatgagatgatcaatcagctgtaaagacttttacatatatataaaacatcttaatatttttcatcatctttgatttcctagatgttctagaaactgatttttagtgagaaaaaaactacatttatctgagttgaccagttccttcagtttcatttccatttctttttcttctgataaatttacacggca

SEQ ID NO: 361644 - DNA, 137 bp, Homo Sapiens
cggctgcgagaagacgacagaagggctaaagaaaagtatttggctgagaaaacgccccaaagctgtgtagctaagtatttggaagacctacacgagaactgtaaattatgtcttagacacaaccttgaggtcctagg

SEQ ID NO: 361645 - DNA, 157 bp, Homo Sapiens
cggctgcgagaagacgacagaagggagagcttttctgtttttgagctaaagacataacagggtgcagaggctgagaaaaggagagttctaagcaacatgtcacgagctatgtagcctcttcacactgcttctgaaataaaatctaacagtaggagtg

SEQ ID NO: 361646 - DNA, 306 bp, Homo Sapiens
cggctgcgagaagacgacagaagggaatatataaaacttctcaaaatcagaagaaaaggggatgctattaataattatgctaggtcagtgggaacaaaccaagctgtcccaggaaaaccagaacacagactcaccctgacactgtgtagcatgaccctgctgacatgggacagctactgctcagctccagctgacgtgggaacactaacctactcttgacaaatcttcctatttttcaagaaaatgcagaaatttagacttttatgtaaaatttttttgatttgaaatgtcagcaagtgatttttc

SEQ ID NO: 361647 - DNA, 585 bp, Homo Sapiens
gcggccgcctgagtaaggacttctgcgcgcgggagttcgaggccctgcggagctgcttcgccgctgcggtaggtgggcgcgggccccttccccccttcccagcccttcccctccaagagccagcgggccccggctttcctttgctttcccgttggttcaaggtttgagcgcctgccgcgtgctttagacgccggctgacaaaatcaccgagccatcgacgagcccgcgaaacctcggccgtcctgggcttgtccctgcatgtttgtaaagcgggactggcaccaacctcagaaaggatgggagatgtgtgcaaaaaagcgccttgtaaaacgcgtaagctttcgtgttagcactgccgccggggggtgtcatgccaggattgacccaacacaggactcccggaaagtgcccagcaccttccgggtcttcacctccctggcacttgcagcccctgtgcacctgcagtggtggattccttcagcacgtgtcctgcggggaacccccagccaccctcacaactggcacgatagggcttcttgcccgtggggctttaagtcattctgaggctggttccctaagtgtcag

SEQ ID NO: 361648 - DNA, 735 bp, Homo Sapiens
  misc_feature (499)..(591): n is a, c, g, or t
agcggggttcatgtcggctaacggagcggtgtggggccgcgtgcgaagccgcctccgcgccttccccgagcggctggccgcctgcggggccgaggccgcggcgtacggcaggtgcgtgcaggcctccacggccccgggcggccgcctgagtaaggacttctgcgcgcgggagttcgaggccctgcggagctgcttcgccgctgcggccaagaagacgctggagggaggctgttaggagggactctgagcttcacacctgtctgctgccatgggtgcagagccctagtcctgatggcccctggtggcacatatcgaatgcctagggcagaaaggaagtgggaatggcgaagatgtgacattcctcggtgttagatcctgttttttcttaacaagttgaggcgtgggtagagcaggaattggttttccagcattgtgtccgtaaacctgagttagaataagatgtaacggaagccacgataaagactcggtcaaatcctgnnnnnnnnnnnnnnnnnnnnnnnnnnnnnnnnnnnnnnnnnnnnnnnnnnnnnnnnnnnnnnnnnnnnnnnnnnnnnnnnnnnnnnnnnnnnncttggggcccgccctaagccctaaaaaaatttttttaaacctttcttttgaaaacgggggccccgagaagggaaagggaaccggtggcctatactgtgttcccttaagaaatacccggggcctggaaaataggcgcttggaatc

SEQ ID NO: 361649 - DNA, 1089 bp, Homo Sapiens
  misc_feature (304)..(358): n is a, c, g, or t
  misc_feature (487)..(507): n is a, c, g, or t
  misc_feature (512)..(612): n is a, c, g, or t
  misc_feature (631)..(649): n is a, c, g, or t
ctgtgccttatgcagagccgactcctggcagtttgcacaggctggaggtggagctgcagactccctctccctctcggccttgcctctgtaaatgggaaagccgttgacattcacaaaagaggggcagggaactgctacacaagagcagctacacaagagggtcctttggtccacacaggaaacaagccatagtgatgacatattttgaagctgttagatgttttgtttccctagctggctattatttttgtatggcttgtctttctcttttgagtatgtgtgagaacaggatgggttaacattnnnnnnnnnnnnnnnnnnnnnnnnnnnnnnnnnnnnnnnnnnnnnnnnnnnnnnngagagaatagggatgagaagctcagcttgtagaattggcaggtgatgtttgcagtcattaatcatttgagaagtagagagagaagccaagcaggaaatcttcagactggaaaagaagtgctcaccattnnnnnnnnnnnnnnnnnnnnntccgnnnnnnnnnnnnnnnnnnnnnnnnnnnnnnnnnnnnnnnnnnnnnnnnnnnnnnnnnnnnnnnnnnnnnnnnnnnnnnnnnnnnnnnnnnnnnnnnnnnnncacattctctacaaagagnnnnnnnnnnnnnnnnnnngaagctttaaacctaagacggcagaattcaagactgttgtccttgagaaacttcctgggctctgggaaaaagctcagtgagtaagtctcatcctgtcgtaagctctgtttttaaggggctcacttggtcttcacgacagtaccttgcaccattctcatgggtatcccacggtggtgcaacggcagttttctgcacttcccagaagtgccctgtcagctggcttcggggataggtcctgcaaatgggaggcccctgtgaaagatcgctgtggggtgggaggaagaagctttatctgcctgctggctgcagggtacaggactgcagtggggtcatagggatcacccacctgccacttgtggagcttgaggcggttcactctaagttctgctcaacagtggcagcctggagtccttcggggcgaattgtgggccctgggctcc

SEQ ID NO: 361650 - DNA, 497 bp, Homo Sapiens
cgtgatcacagtcctacaccaagtgttttcaacagcgatgaagaacgatacagatacagggaatatgcagaaagaggttatgagcgtcacagagcaagtcgagaaaaagaagaacgacatagagaaagacgacacagggagaaagaggaaaccagacataagtcttctcgaagtaatagtagacgtcgccatgaaagtgaagaaggagatagtcacaggagacacaaacacaaaaaatctaaaagaagcaaagaaggaaaagaagcgggcagtgagcctgcccctgaacaggagagcaccgaagctacacctgcagaataggcatggttttggccttttgtgtatattagtaccagaagtagatactataaatcttgttatttttctggataatgtttaagaaatttaccttaaatcttgttctgtttgttagtatgaaaagttaactttttttccaaaataaaagagtgaatttttcatgttaagttacaaaacac

SEQ ID NO: 361651 - DNA, 491 bp, Homo Sapiens
  misc_feature (16)..(16): n is a, c, g, or t
gttgcaatgaatgtanagtatttgggatcagtgcttataaaccttccttcctttgtgcacagaatgtaactagcaagcccattagcacccagataattctatcatgttagtttcccatcctggaaaatctttgtacagtgggaagttccccgatgtgtttttctttcttaggtgaagggttggctatatcactttattgaattttgcattccttagacttttaaaatatactaatgtattctagtcttactctaaagacctttgatgttaaaggaatccttcatttatttcatattccctatctcatagggccacaattattttaatacagagatgattttcaaaatattttaacaactggtacaggacagatgccagccactcagaagggatgcctgctgtaaacaagcagtatgtatggttgtaccaatgcctattggctgaacattatgctactttcagatattaaaatggtgttcctttgaatcgac

SEQ ID NO: 361652 - DNA, 344 bp, Homo Sapiens
ggtggggtagttgaataaaattgggcagctaaatttttcagttccatgtgcctcccaaataaaaaacagaaaataagtagtttttgtgaattgacttgcagacaaagtagaaactgtgctgcatgatgttattttgtaaacagatgacattttctgaccaggcacatgccatccaattttctgtcaatcacactgttgtataaagcagcagaactgaaggggaaaaatgattgttgtatacactgaattgctttgcatggtctcatttgagataattgatgtaagaatcctgacttttttatatttggaaacatcaaataaaaatggaaaaaatgaaataaatg

SEQ ID NO: 361653 - DNA, 661 bp, Homo Sapiens
  misc_feature (38)..(38): n is a, c, g, or t
  misc_feature (76)..(76): n is a, c, g, or t
  misc_feature (86)..(86): n is a, c, g, or t
  misc_feature (91)..(91): n is a, c, g, or t
  misc_feature (114)..(114): n is a, c, g, or t
  misc_feature (127)..(127): n is a, c, g, or t
  misc_feature (134)..(134): n is a, c, g, or t
  misc_feature (555)..(576): n is a, c, g, or t
cccagggaccaaaagacttgggcttaaaaaacggcccngttaaaagcggccagaatcacaactccagcccagaccnctcccgaaancccancctgggtcctaaccttgggccgnttccactagctgntgcagangccctaaacccttaccctcctcatctttggctcaaatggtggccttccttactgaagccctatcctgtccatactatttaatactgcagctgtctaccttccagatcgagaaatctcatacccctttcacctgctctatgtttttcatattacctatcaccctagatacttcacatatttgtgtttattgtttactgttgtttcccctggctataatgtaagctccatgtgggcaggggcctttgtttttttcactgatatatcacaagtgcctaaaacagtgcctgacacgcagaagggactcagtaaatatgtattgaatggttttgatttgaactgaattgaactatgtatccatgatgcaagtaaagaaatgtaatccatatactttcctacctacattttatatgtgaggaaatannnnnnnnnnnnnnnnnnnnnnctgtgcaagtggaccaatatttgagaatcgtatacctttgagaatcatagctgatatactttaagataaaagggtatttctgtgc

SEQ ID NO: 361654 - DNA, 567 bp, Homo Sapiens
  misc_feature (50)..(50): n is a, c, g, or t
atagaaatgcgatagagtgctggcaggctagtgtagataagtggtctganaaggtgtctctgagccgagggcatgtgagctggggcctaaacaactagaaggagagagccacgtgaacatcgggcgaaggggacccaggcagagagaaaaggaaatccaagccctgaggtaggaatgagcaggtcagattcaaggcagtgaggtcaggccgcatgaacctggaggggaatcggggacttcatgcgaaactccagcctaggctttcaaagtcaaagggtgatacagtgggtaccaagctcctctgctccccactttgtagagcctagcatgaggtggcatgtactagaattggatcctaggtgcttagccctgcaatatcagggcctcactggtgggagctgcctcgggctgggttgcttggtcatagagccatagaaggaagctgtcagcccggagtgcctgccacctagacactgatgccattgtgtgctgcctcaagactgctggagtcaggacattttatagagccttttccagttttactaaaaaatttttccattgcaaaaa

SEQ ID NO: 361655 - DNA, 506 bp, Homo Sapiens
atcccaaagggatgaaaacttggtagggcttcaccttgaagggttcattgtgggcattaaaaggggaaacagtgacaggaaacacccccaaagccacaagaatgtttgaatgagggaacccatttaatgtcatttgttaggagaaaagaaaccaaataataaaggacaaggaccacggctcattccgtggagaagaggtgaactccccctgctgactatttggaatggactgaatgaggaggtctctccagccagaaggagtattgaggtcatcaggcctcagaaaacaatgtacacataatctcgggctgtgaacaagagaaaggagggggggaaacatgaaagtcaatcttaacaatttttgcaatacctcttatttgcagaccattggatttatgttattgcactctcggtgtgatttatcgtatgtatctgataggttttatgaattgttttgagttgtaaactcctataccctttattaaaatggacctaattaagtgaaa

SEQ ID NO: 361656 - DNA, 187 bp, Homo Sapiens
gcctactactactatacggctgcgagaagacgacagaaggacagaacatagaaccagaggaaaatgcattcaaatgcattccatcagtgtttctggacagtctacaatgtgccctggccggtgatcgctgctggagatatcgaagtcattaaaacatggtctctgtcctcaaaaaaagtcgtatcga

SEQ ID NO: 361657 - DNA, 514 bp, Homo Sapiens
  misc_feature (60)..(60): n is a, c, g, or t
  misc_feature (67)..(67): n is a, c, g, or t
  misc_feature (111)..(111): n is a, c, g, or t
aagccaaagaaaggggctggaaccccaaagcctcaacctggcgctgcaaagcaactcacncagtgcntcctgggcaacctgggcccctgaatgaggccaggtgcaggcctncagtggtgaaggtcctgactgagctgctggaacaggaaagaaagaaggtggtggacaccaccaaggagagcagcaggaagggctgggagagccgcaagcggaagctatcgggagaccagccagctgccaggacccccaggagcaagaagaagaagaagctgggggccggggaaggtggggaggcctctgtttccccagaaaagacctccacgacttccaaggggaaagtaaagagagacaaagcaagtggtgatgtcaaggagaagaaagggaaggggtctcttggctcccaaggggccaaggacgagccagaagaggagcttcagaaggggatggggacggttgaaggtggagatcaaagcaacccaaagagcaagaaggagaagaagaaatccgacaagag

SEQ ID NO: 361658 - DNA, 233 bp, Homo Sapiens
gcctactactactatacggctgcgagaagacgacagaagggtcattcggggcgggagaccctgagcctgctgagaaatccttttagcgccagcaagccccacccagggccctgtcctgtgtctgccaccacctttgtctgatacttgtttccagggaagctgggggaactgccacatctgaggaactggaataaagatgagggggcttcgggggcccccagactgtgaaaaaa

SEQ ID NO: 361659 - DNA, 796 bp, Homo Sapiens
cccctcttccagagcttccacggtgctggcaaagtcctgcagcttcttcttcgagtcggagagctacaaggacagcgtccagggtagggtgagagggggaccatgagtggcccctgtccctggccccacagactctgagaagcgaagaccatgtctcctcgttggagaaacccaatagcaggggaagctggggggtcaagcaccatcgcaccaacactccaccgcgatctgcctgcgggggatctcagcgcagagaagttgagaggacccatgaaggaagcaaggacacggggcaggcacctggatgttgagagtggagatgtggcgctccaggttctgcttggcctccatctcctcgtccagctggtcttgcaggactgttccgctcctcctccagctggcgcacttacgtagacacgttgagcttctgccgggtttcttcttgaagcaactcctgcaaaagggatgcaaagaggtcccagggacctgccccgaggaaggccaccccccaggtcccctggatgatgtggcaggacactcacctgggtgtcctggagctgggaactgagggacgccacgtccttggccagcttaatggccttcccctcggcctcgttaagcatccctgtgacgctctcaacttcattctaagggtgccaagagactggttagtcaaagcctctagaaggggatcctcgttgaaaggagccctttttactcaaaacacatgggctagtacttgaggtgttcactgattgagaaaatacccgtgaggtatgggactctgataaaaaaa

SEQ ID NO: 361660 - DNA, 723 bp, Homo Sapiens
agcgggcccggtcgccccagcaaccaagtcgcacctggagctgtcctagcgcctagttctctcccggccgcagagctggccgcccagggggagtcgcagagtttggaagatctctctaacacctctcggccaacttcagaagtgtataagatcagctttatctttccaaatggagacaagtatgatggtgactgtacaagaacatcttctggaatctacgagagaaatggaataggtattcataccactcctaatgggattgtctacacaggaagctggaaagatgacaagatgaatggttttggaagacttgagcatttttcaggagcagtatatgaaggacaatttaaggataatatgtttcatggactggggacttacacattcccaaatggggcaaagtatactggaaatttcaatgaaaatagggtggaaggtgaaggggaatatactgatatccaaggactagaatggagtggtaactttcattttacagctgctccagacctgaaattaaagcttcacatgtagatgtgatgttaaattaaagttgaaatgtagtaattgaagcttttagttgtaaggaaagcaacttaatctgttatttgaaatgacttcatacactacccctataagtttgccaataaaaccatcacctgcttacacctttttgaactttatattcattgtcttacaattagtttaaaataaatgacatgattc

SEQ ID NO: 361661 - DNA, 104 bp, Homo Sapiens
gcctactactactatacggctgcgagaagacgacagaagggggactatgagaatcgaacccatccctgagaatccaaaattctccgtgccacctagcacactcc

SEQ ID NO: 361662 - DNA, 130 bp, Homo Sapiens
gagaagacgacagaagggatatttcatcatgactgttaagaaaaggtaactgggttgtttaatgttttaattgataattgtcactgatcgtatttctacttgttaaataattaaaaatcatcttaaaatc

SEQ ID NO: 361663 - DNA, 931 bp, Homo Sapiens
  misc_feature (623)..(623): n is a, c, g, or t
  misc_feature (872)..(872): n is a, c, g, or t
ggaccagcatactggacttctgcttactggccagaaagctggcgggtgacatttgtaacatttcctctttgagactctgagtcacctagagaagtctaagcataacagctttctttcccagcacgagcctttatagctctctttagctcaaccactctgtccatccagccaatggatgtcccttcccctgtaccccaatttcaagcttattttaggaagccttgaactaccatgtatcctggctcctagctgagtttattagaggtatggagcagtgcaacttaaactcaagttgcacttacattttgaattttaaaatgatggttttatctgttgtgtgaagtggttcacccttgaggaccaggagcctccatatcctgactgaaaaccttttctgagacttagagtaacagtgcttttggttccttgagttctcctgtctccagataccaaatgaccttgacttttctgccttgtgaattcgtagtccaatcagctgaaattaaatcacttgggagggacgcatagaaggagctctaggaacacagtgccagtgcagaagtttctccaggtggcctccctttccaacaatgtacataataaagtgtatgcactttcacccngggaaaccaatcacaccgagattgtataaatgtggggccgcctgcggccttcgagaagcttcctagaccctttgttttggccgcggtgggcccagtaaggtaaatggaacatggtttataaccttgtttcccaaagagaaatcctgggcacaggattaaggggtttggaattcccccccaaataaaaaaagcgccccgggcggttcatcccgagccgttcttgtaaaaacaattcccgagatgggcggntttcttggaggtgcactctcaccggggcattctctttcacccgcgagaatttccccgga

SEQ ID NO: 361664 - DNA, 268 bp, Homo Sapiens
gcggcgactactactactatacggctgcgagaagacgacagaaggggaacacaaggtggtcggaaaggccttaaactcctccttgacatacaaaaccggtttttacaaagatccaagcagtttggtcccaaactgaggtgaacacttcaaagtttattcacatgcttttgttttctctttcaagaatcaaagtttcccaaattaaatgtttctaatattactacatatgcctaaaaaaagaataaatcaaaaataacagtcggatcga

SEQ ID NO: 361665 - DNA, 682 bp, Homo Sapiens
  misc_feature (521)..(559): n is a, c, g, or t
aggcatatgtagtaatattagaaacatttaatttgggaaactttgattcttgaaagagaaaacaaaagcatgtgaataaactttgaagtgttcacctcagtttgggaccaaactgcttggatctttgtaaaaaccggttttgtatgtcaaggaggagtttaaggcctttccgaccaccttgtgttccccttttctgcgcagccatgtatcacgtggagtttgctccttaccacacctcacgtgcccctgagccctatttcctgatttcttctgggctggacttccccgttctccaccagcagctccagtatcccaaactttctagtcctgctgatcctcccagcaacggggtggaaactggagggcagtgtctggtctgttttctaagaaacttatgaattctattatctttacaaatatgagaaaattttttcaatattttttattaatctttttataaaatgaaaagaaactcctatgatcgattaaggaaagtggttatggctgggtgggttcagggnnnnnnnnnnnnnnnnnnnnnnnnnnnnnnnnnnnnnnnaaccttaagctgttttagtttgaacccttttcaaatgtttggggggaaacattccccttaaaaagggtcctttggtgctttccttttgggggaaggtgtccttgaccagtgaattctttaagg

SEQ ID NO: 361666 - DNA, 535 bp, Homo Sapiens
gtgcgtaatatatagccttcaccaatcaaaattactaccatgatgcacagtagaattatttggtctatgtgattggagtcctgacagcaagtatttcttcactgggagtcgagacaaaaaggtggttgtctggcactgagtgtgactccactagatgactgtatcgagcacaccattggcccctgctcctcagtcctggacgtgggtcgggctgtgacagctgtcagcgtctgcccagtgctccacccttctcaacgatacgtggttacagtaggattggagtgtggaaagatttgcttatatacctggaaaaagactgatcaagttccagaaataaatgactggacccactgtgtagaaacaagtcaaagccaaagtcatacactggctatcagaaaattatgctggaagaattgcagtggaaaaactgaacagaaggaagcagaaggtgctgagtggttacactttgcaagctgtggtgaagatcacactgtgaagatacacagagtcaataaatgtgcactgtaatggactt

SEQ ID NO: 361667 - DNA, 552 bp, Homo Sapiens
tattttcagtagagatggggcttcatcatgttggccaggtggtcctgaactcctgacctcaagtaatctgcctgccttggccttccaaaatgcttgggattacaggcgtgacacctggcgcctggtccctattttctttttacaacagaccttgggaaatattttcttcccccaagaggttgaggcccatggaatgcattaggggcaggtggggtggtggtgctctgtagcctttaggacttctagaatcaggcttctgggccaccttcttagcaggtgtatacctctttgttccagactgactttctgtctcacaatatcttcactatttccacagttgcagccaagacaggaaactgaaagctgaggcccagaagggtggtgtactggggggaggggaaaattgagtgtcactttggaaaactggggcccccatctaaggattgctgcctctgtagattcaaaagcaataaaacagcagctcattaactcttattttgtattttattttctgtctttttcatgtctaaataaagatttttgctttgctgt

SEQ ID NO: 361668 - DNA, 370 bp, Homo Sapiens
  misc_feature (174)..(286): n is a, c, g, or t
gggaggaagcggaagactaatgaccgaagcttcaagactttgacatgtgtgaaaacatgaaatgacccttggctcttattgttcttgctggtgtggtatgttcacggctgaaaagatggtcagaaggggaaaggaggaagtgagaagaaagaaacagggaaatgacagagtgtnnnnnnnnnnnnnnnnnnnnnnnnnnnnnnnnnnnnnnnnnnnnnnnnnnnnnnnnnnnnnnnnnnnnnnnnnnnnnnnnnnnnnnnnnnnnnnnnnnnnnnnnnnnnnnnnncaggctgaggaattaccaaggaggcaggaggtggagcaaaacacaccaagcctggtgccaatcattgacaatattatgaccctg

SEQ ID NO: 361669 - DNA, 1650 bp, Homo Sapiens
tggaaacccccaacccaggggggggcccgttatgtggggggaaggtaaaggggtgggggaccagaggtaaagggccccggtgatttctgttgggcctggggcgggccctttggactctcggggccaggttttttcttcctgaatccactcgcccacggggtgccgggtggggcagctccacaccccaggcgtcggccacgtgggccagcagcagctgggagaggcaggttctccctcgcgtggcggaagtggaaatgcaagtccagtacatcgaagttatgtttacgtgcctcggtggcgctgtggaagttggctttgaccacttcgtttttcaggaaggtggccttctgccgccggagcttgggcggaagaaaacccccggtgacttcctcgcccacaggcatggccgtgttccacaccaggaggcaagactcgggcagcacctggcccaggcactggaacaggttctccaggttctccaggtagcttctccaggagttcggaccatacctggagatgtcccagaggcaggaattcatgatgaccaggtcgggggcgtgctcgcccgactgcagctctttcaagatggtctggaggtaatcggagtacacgcgggtgaggaagtaaaaacgtaccagatggtggtcggagcggaactcgcggacctcacggtagttaaggccgttgtgcatgtggccccgctggcctccgtccaccagctcatcttgttcgaagttcagctccccccttgctctaagctgcccgggagtgagcaggcggtccttctgcagcagaagcaccaggtccttgtatactgccctatgcacagagtcccccaggatgaccacgaacttattgtgaagcagctgccgcacttcggaggcccgcagaaggatcatgacgcccagggcgcacagcctagctccttcctttgcacaggatggctctgcggatggtcattaaagtaactggtgatttttaagcatctctctcagttgattctagatctcgtccctagatagctttcttcctctcctgtagatcattgtgaccagacgggagatctcagagcttgggctataggggaaataggttagcctctgggtgctgctgtgcttgcaagccagcgtctggggagaagatgacatttccggtggcatctggggcaaacgacacaagtcagcatttagtttcttgctttaggaagcggaagactaatgaccgaagcttcaagactttgacatgtgtgaaaacatgaaatggtaagtcaatacaaagacagcatcttcctggaatttggttttgagcttgttttcatttcacctttctcagtaatctgggtgtagcttattttgactcttcctttgattaaacaattcagacccttggctcttattgttcttgctggtgtggtatgttcacggatatttgtaggaggcagtcttcaacactcccctgacttttcctcttatggcatcctctgggatcttagggcctctcattaccttcagcctgcaatgagaggaacccgggagagcccccgggagccagcgaagagcttggctgctgcgtccagggctgctgctgccgccgcggctgcttgaactcctcaaagtgagagccggcatcccgggaattccggaccggtcc

SEQ ID NO: 361670 - DNA, 159 bp, Homo Sapiens
gcctactactactatacggctgcgagaagacgacagaagggggcctctgatttaaagaaataaaaaggacttttctaaaatggatgtgtagtttattttgccttttgtaaagctcttttggctattgtaacttaacaaataaaatcataattgtgtgct

SEQ ID NO: 361671 - DNA, 1141 bp, Homo Sapiens
  misc_feature (710)..(710): n is a, c, g, or t
aacaaagcaagatcagtgcagagaagccacatgacatgttgggtgacagattggtcatttatttaaataaagttaatacagattaaatttgtttcaagagctattgaattttcaaattttcagtgtatttataacttttaagaacatgaagtattagcttaatatagttttctctgttggtttcttcctcaagtttgcattgttttcttttgttaaaattagagatttctttttattttccagttatagtaatactaggctgtcagcttaaaccctctgtaatagaacatggaaacagacacataaagacattagctgaaaaaatagagtgaaaatcaactattttttactcccgctaatttcaatcaatcgttttcaaaagcgcacgagattcactcattggatttatgcagtgccctgtctgtataaaaactcttaagcgttcctttatatcatattcttcagagccaacatttgtcctcaaagcaacgtttcccacctccttttactgagtactgaaaaagttttagcaaagtcacagattaggttgaatttccaaaatatatgtactttaaaaagttctgatttccaaatataataaagttaaaattaagtatatactttaggaagttaccaataacttccatcaaagcagagtaggatatatggtaacattaattttcggtcatttcaaatgaggtatatttccntattagggaaattaaagtccctatatttattatatattttttccttattaacagaggtatttaatcctagtaaaaaataaccccagccagtaaaataataaagaaattactgaatgagaggataatgaatctgaatcatagcaggaatttgcaatattaattatggttagctatttttctctcattgatttttgtgccacttgaatggaacagaagcaagccttatgttttggaaggtctgcggtaaaatgctgtgactgtttactttcaattgcattgtgtgttgcctgtgactgctttcaaacgctagagggggcctctgatttaaagaaataaaaaggacttttctaaaatggatgtgtagtttattttgccttttgtaaagctcttttggctattgtaacttaacaaataaaatcataattgtgtgc

SEQ ID NO: 361672 - DNA, 146 bp, Homo Sapiens
gtgcataacttggatgggctgaaggaggtgaggacagattggggaagggtggctttcattccaagatccagggatttggggaaaaggaaggaatttgatgttttttggggtgggaggggagggtgtgttttttacaccaaaaaaaa

SEQ ID NO: 361673 - DNA, 729 bp, Homo Sapiens
ggaagcagtgctatcaacccagagggcccattacggccggggggacccgctctgctctgcctctgaaaggaggagaaaaggctgagggttcaaagacagaaaagtcaatgtagcagaaatttgatttccttcagatggacatagtctgaaagaaatctatccagctgttctctatggtgcttatatgatgggtgacagctgtccccatctacctgtccctggcactgtgccttcacactggtcactgtgaaaagcagatcacactggactcagaggccagaatccaggacaagatcccccttctcatcttgagcccatcacatctttgtatagctgttaatgtagcatttacttctctatgggaaactcttgggtttttaacccaagaagaaattgtaaagcatttaaactagtcagaaaataagattctgatggtagcgatcaaataaaggaaaatttcacttcctctcagttgatattgattgatagcaaggatcaactatgcccacctcttcctaagtttctaaaggctaccataatatttgtaaacaacaaatttatctaatattttttacaacttgctaatcaaggaggattcacattaaaacagacaatcagtttctaaaatgttatcccctgaaaaggaaatggaatagagtatttttagctgtaagaacctaccagtctgttttttccctttgaaaaaaactaatgtttgagatttgtgtc

SEQ ID NO: 361674 - DNA, 165 bp, Homo Sapiens
gcggccctactactactatacggctgcgagaagacgacagaagggtgccccgtctgacacccctggggttgctgagggaacggttggagtggggatcggcctgcgaaaggatactgtgaaatcactaattaactaataaacctgtctcaagttgaggatttgaac

SEQ ID NO: 361675 - DNA, 861 bp, Homo Sapiens
tggcttgccacgaggaagatcacaggtaagagtcttttaatccaaggcccagtcaggcccatacttcatctggacaaactgagggattactcctaagaaagttgaagaagcaacggctcccgccattagtaatgatctttctagtggcttacaagtgtaacttctgtttccattgatgctgttgaacgctgccatgtaggcacagaggaaaacctgaggtaaaatcacggacttgatccctttcagtggcgtcattgacaaaaataccgtgggcgccatgaaaggcaggaacgctgcaggtcgaaaaagcttggggatcaggttgctgctgtcgggatgcactgttgcaagactccgcttccaagcttcctgtatcctttggtccgccgaggcagggctggaaacatcttcatttgtgcacaatagttgcctcgagttttctatactttcaactgaaatgaacacatttgtaggatctaataattctgtccattgaagaaatcgtcgaataaaggacaaggtgcgagagcctgtttctccccaatctgctgctcagccacagctcaggcagtagggagcagccacctgcgcggactgggcccctccgagagggcaatctggagggtgacgttgtggtcgtgggcatctggcagcttcgatttcccctgcgtcccctcccgcgccctaaggggtgaaggccggtggtgcgcgttcccggcacaactccgagaggaggaaacggagacagggggcgcccacgtggcctggccaaggtcacccgggtcagcccgactccacgcggcccggcccgccccctcactgcccctagtcgcgccgggcccgggccgtacttggcgctcg

SEQ ID NO: 361676 - DNA, 977 bp, Homo Sapiens
ttgaaaaattaaaagaaatgccaccatcagttccatgccaggacagttacaagacagtttcaaatccacatgacctgggtttttcctgaaatactgggtccttttaaaaagttaggttgaagaacttcaggaatcaagaactgagggtcccaaacatgcactatttctggatggctagcgttttctctaacagcctttgtcccagcaattctgggaatgacccaggacaatgccttccttgtccatgaccgcaatccccttaatggatccaagacttcggggacatgtagacattcattcccacgggcttgcacgaggaagatcacaggtaagagtcttttaatccaagggccagtcaggccatacttcatctggacaaactgagggattactcctaagaaagttgaagaagcaacggctcccgccattagtaatgatctttctagtggcttacaagtgtaacttctgtttccattgatgctgttgaacgctgccatgtaggcacagaggaaaacctgaggtaaaatcacggacttgatccctttcagtggcgtcattgacaaaaataccgtgggcgccatgaaaggcaggaacgctgcaggtcgaaaaagcttggggatcaggttgctgctgtcgggatgcactgttgcaagactccgcttccaagcttcctgtatcctttggtccgccgaggcagggctggaaacatcttcatttgtgcacaatagttgcctcgagttttctatactttcaactgaaatgaacacatttgtaggatctaataattctgtccattgaagaaatcgtcgaataaaggattggcgctcggtgatccagaagcgcacgttgggctcaatgaaggcggggacggcgtctctgcgtcctaggagccgcccaggttgcgtttcctcctcctgttccagggacattttgcgctggttagagtggccgccgccgccaggccgcgcgtggagccc

SEQ ID NO: 361677 - DNA, 1385 bp, Homo Sapiens
cggtccggaattcctgggatgcgcaaaatgtccctggaaaggaggaggaaacgcaacctgggcggctcctaggacgcagagacgccgtccccgccttcattgagcccaacgtgcgcttctggatcaccgagcgccaatcctttattcgacgatttcttcaatggacagaattattagatcctacaaatgtgttcatttcagttgaaagtatagaaaactcgaggcaactattgtgcacaaatgaagatgtttccagccctgcctcggcggaccaaaggaggaccagctttgcaaaactggatacaggaagcttggaagcggagtcttgcaacagtgcatcccgacagcagcaacctgatccccaagctttttcgacctgcagcgttcctgcctttcatggcgcccacggtatttttgtcaatgacgccactgaaagggatcaagtccgtgattttacctcaggttttcctctgtgcctacatggcagcgttcaacagcatcaatggaaacagaagttacacttgtaagccactagaaagatcattactaatggcgggagccgttgcttcttcaactttcttaggagtaatccctcagtttgtccagatgaagtatggcctgactggcccttggattaaaagactcttacctgtgatcttcctcgtgcaagccagtggaatgaatgtctacatgtcccgaagtcttgaatccattaaggggattgcggtcatggacaaggaaggcaatgtcctgggtcattccagaattgctgggacaaaggctgttagagaaacgctagcatccagaatagtgctgtttgggacctcagctctgaatcctgaagtcttcacctacttttttaaaaggacccagtatttcaggaaaaacccagggtcattgtggattttgaaactgtcttgtactgtcctggcaatgggactgatggtgccattttcttttagtatatttccacagattggacagaatacagtactggtagtcttgaagaagaaaattcagtctccaacagaagaaacagaaatcttttatcacagaggggtgtaggcgtgagttttaggtgaatttatgtggttcctgcttgaaaaccttcccctctccaggttcggtttagagaactttgccacaggtcttctggggaccccagaggtgtctgtgctgacaaggcgacttcagattccatactgagatcgttcccaggctggcgtctctggggtttttaaggctggctggagaagacagtgggagggtgccccgtctgacacccctggggttgctgagggaacggttggagtggggatcggcctgcgaaaggatactgtgaaatcactaattaactaataaacctgtctcaagttgaggatttg

SEQ ID NO: 361678 - DNA, 828 bp, Homo Sapiens; identical to SEQ ID NO: 69020
  misc_feature (747)..(747): n is a, c, g, or t

SEQ ID NO: 361679 - DNA, 292 bp, Homo Sapiens
gctgggttccaagagcagttatcccaagagaacaaggcagaagtgcatgacttttagaatcttgtctcacaagtcacacagagtcacttcccaccatcccctgttggtcaaggaggacatgaaggtcttcctaggagcacggggagaagacagacttctaccacctgttggaaggagtgtcagtgttacatagcaagagaagcacatggaatgggatgtattgtgatgcccatctttggaacagacaatttggcatatctgtgaaaattaaaagtctgatttggatataacc

SEQ ID NO: 361680 - DNA, 660 bp, Homo Sapiens
tcagtgggtagaatggggccagggcccagctttggccttagcttgacggcagggcccctgccattgcaggagggtttggttcccactcagcttctgccggtcggcagcctgggccaggcccttttcctgcatgtgccacctccagtgggaaacaaaactaaagagaccactctgtgccaagtcgactatgccttagacacatcctcctaccgtccccaatgccccctgggcaggaggcagtggagaaccaagccccatggcctcagaatttccccccagttccccaagtgtctctggggacctgaagccctggggcttacgttctctcttgcccagggtgggcctggtcctgagggcaggacagggggtttggagatgtgggcctttgatagacccacttgggccttcatgccatggcctgtggatggagaatgtgcagttatttattatgcgtattcagtttgtaaacgtatcctctgtattcagtaaacaggctgcctctccagggagggctgccattcattccaacagttctggcttcttgctgtaggaccaaggggttgccctggaggaggggtgggggccccggcctcggcatggctactctaggaagagccactgctactcaaggagtcactcagccccttctgtcgtcttctc

SEQ ID NO: 361681 - DNA, 357 bp, Homo Sapiens
tgagccgcctggctgtgcacacatgcagcacgacccagcctggccacacactgtggtgccatctgggtccgatgccctctctggagataggcctatgtggcccacagtaggtgaagaatgtctggctccagccctttctctgtgccttcagcagcccctgtcctcaccatgggcctggtcctgagggcaggacagggggtttggagatgtgggcctttgatagacccacttgggccttcatgccatggcctgtggatggagaatgtgcagttatttattatgcgtattcagtttgtaaacgtatcctctgtattcagtaaacaggctgcctctccagggagggctgccattcattcc

SEQ ID NO: 361682 - DNA, 149 bp, Homo Sapiens
gcctactactactatacggctgcgagaagacgacagaaggggtgagagtatgcatgttttaccaaggtagactgttcttaaaaacttttttccacaggttttgagatttttaatttgtaatatctattaaaaaacaaacatcaaattgc

SEQ ID NO: 361683 - DNA, 587 bp, Homo Sapiens
  misc_feature (370)..(370): n is a, c, g, or t
  misc_feature (402)..(402): n is a, c, g, or t
  misc_feature (409)..(409): n is a, c, g, or t
  misc_feature (422)..(422): n is a, c, g, or t
  misc_feature (432)..(432): n is a, c, g, or t
  misc_feature (454)..(454): n is a, c, g, or t
  misc_feature (482)..(483): n is a, c, g, or t
  misc_feature (495)..(496): n is a, c, g, or t
  misc_feature (521)..(522): n is a, c, g, or t
  misc_feature (528)..(528): n is a, c, g, or t
  misc_feature (550)..(550): n is a, c, g, or t
gcctactactactatacggctgcgagaagacgacagaagggaggagatgggcagcattgttgagagattggtaacactgagcaaataaatatgttgagaatgatgacagcaagatttctccattagagaaggtatttataaaaataggaatgaggagagctagaaaacctggagtgtggcattagaatagaactcatatcttttaaatatataggaacaaataaataaattgttgtgtgtgcacatatgcatatattttgtgttcattctactgagaggacctaaacacaatgacacctcagtaacagtaagcacaccaactgccaagttattagttcctaaatactatccacaaaaaaggggaacaggngatgattcctagtcaaagagattgggagaaantacaagnatgagccctgaantcatctcatngtacctgaccagtaaagaaaantactctggctggttctcagtggctcatnngtctgtaattcnntagcatgttagaaggtcaaggtggnngtgggnttgcttgagctcaggagtttgnagaccagcctgggcaacatggcacaattgtctctaca

SEQ ID NO: 361684 - DNA, 271 bp, Homo Sapiens
  misc_feature (51)..(107): n is a, c, g, or t
agagtgcttgccgggttataccaaaccctactattactgcctgcaggaatnnnnnnnnnnnnnnnnnnnnnnnnnnnnnnnnnnnnnnnnnnnnnnnnnnnnnnnnngattgagaaaagaggcatttttttctgacatttggtcctgcttgaaacaacaaaagaagaagaaaaacccaccatcaccaccgattcctttgcttcttttttccttttttcctaccttgtttgaaaaccgtgggcttgggactgtgaattattgcatgacattc

SEQ ID NO: 361685 - DNA, 214 bp, Homo Sapiens
gcggcgcctactactactatacggctgcgagaagacgacagaaggggagacgctctattttttcacagttaaatgacagttgtagattgatacgcagttgtgcatgggaaggggaaacgcacagctttatttactgtaaagtggaatttcaggaaggcttgtgtgaaccgttgcgcataaataaaccctttctaccgggcgaaaaagagaaaga

SEQ ID NO: 361686 - DNA, 1018 bp, Homo Sapiens
  misc_feature (29)..(29): n is a, c, g, or t
  misc_feature (71)..(71): n is a, c, g, or t
  misc_feature (468)..(618): n is a, c, g, or t
  misc_feature (627)..(640): n is a, c, g, or t
  misc_feature (654)..(777): n is a, c, g, or t
  misc_feature (782)..(844): n is a, c, g, or t
  misc_feature (861)..(869): n is a, c, g, or t
gaaacccgtacggacgggacggtgcctangggtaacttgcagctgtgtccccatgtggcaacccccaaaantgcgccctgactggtcctctgtgaagcgcccacgcctgctgtgctggaaatgcccgcctttaaaaagggataccgtgggactctgcccgtctctttcataacgcaatatttatttgtattgggtgacgattgattctttcgacctaacattttgggttttaaccaaataaccggtcccaggagtgagcagctccgttctgtcagatgctactccaaatgttaccagaacgatgacaaaaggggagacgctctattttttcacagttaaatgacagttgtagattgatacgcagttgtgcatgggaaggggaaacgcacagctttatttactgtaaagtggaatttcaggaaggcttgtgtgaaccgttgcgcataaataaaccctttctaccgggcnnnnnnnnnnnnnnnnnnnnnnnnnnnnnnnnnnnnnnnnnnnnnnnnnnnnnnnnnnnnnnnnnnnnnnnnnnnnnnnnnnnnnnnnnnnnnnnnnnnnnnnnnnnnnnnnnnnnnnnnnnnnnnnnnnnnnnnnnnnnnnnnnnnnnnnttttggggnnnnnnnnnnnnnnaaaaaatttttaannnnnnnnnnnnnnnnnnnnnnnnnnnnnnnnnnnnnnnnnnnnnnnnnnnnnnnnnnnnnnnnnnnnnnnnnnnnnnnnnnnnnnnnnnnnnnnnnnnnnnnnnnnnnnnnnnnnnnnnnnnnggttnnnnnnnnnnnnnnnnnnnnnnnnnnnnnnnnnnnnnnnnnnnnnnnnnnnnnnnnnnnnnnnttttaaataaaatttannnnnnnnngggccttttttgaagaaagggggaaaatcaataaaaattccccccaaatggaaacccttccaaaggggggttgataaccttaatcccccagggaattcacaccttgggccccttgggaaaaaaatttccccccggggaaaaaagggggg

SEQ ID NO: 361687 - DNA, 1223 bp, Homo Sapiens
  misc_feature (888)..(888): n is a, c, g, or t
cggacctccggaaaccgtagattccgggcggtcggagccgccgggagctgtagttctcccgcggctcagagaagtaggcagagagcggacctggcggccgggcagcatggcggggctggagctcttgtcggaccagggctaccgggtggacgggcggcgcgccggggagctgcgcaagatccaggcgcggatgggcgtgttcgcgcaggctgacggctcggcctacattgagcagggcaacaccaaggcactggctgtggtctacggcccgcacgagatccggggctcccgggctcgagccctgccggacagggccctagtgaactgtcaatatagttcagcgaccttcagcacaggtgagcgcaagcgacggccacatggggaccgtaagtcctgtgagatgggcctgcagctccgccagactttcgaagcagccatcctcacacagctgcacccacgctcccagattgatatctatgtgcaggtgctacaggcagatggtgggacctatgcagcttgtgtgaatgcagccacgctggcagtgctggatgccgggatacccatgagagactttgtgtgtgcgtgctcagctggcttcgtggacggcacagccctggcggacctcagccatgtggaggaagcagctggtggcccccagctggccctggccctgctgccagcctcaggacagattgcgctgcttgagatggatgcccggctgcacgaggaccacctggagcgggtgttggaggctgctgcccaggctgcccgagatgtgcacaccctcttagatcgagtggtccggcagcatgtgcgtgaggcctctatcttgctgggggactgaccacccagccacccatgtccagaataaaaccctcctctgccccnagaacccacgaaagagagacccatttcgcctaaatcgtcctgcagacaaagagcacaaggggcgccgcccttatgaataattccctcaggggctccaattctataccagccccctggtccggggaaaaaggggggcccacaaagtgaggcccatcctattacttaaagaaacggggcggttctatattaacctctccgcctgggggcacaccttgtttatacccgggcatattgttttgagagaaacaaaatctcttcgggtgtggggagcaaaattcatacaactataccccccccgcgcggtgttcatcgccgccctcggggagatgacaagc

SEQ ID NO: 361688 - DNA, 489 bp, Homo Sapiens
  misc_feature (380)..(380): n is a, c, g, or t
  misc_feature (428)..(428): n is a, c, g, or t
  misc_feature (463)..(463): n is a, c, g, or t
  misc_feature (475)..(475): n is a, c, g, or t
tttgactggaaagtataccaatttcactttattagcctaatttaggaataggatgaggagagcggggttgaggtcaggcatgaaggaagagggtaaaaacttgtgatggttaagatcccttcagaactctggtgcagtcctcaatcactgcagctttactgtcagtcagtggagctgcaatccaaaagacggaaaatcgactcctgttttccatttctgtgtccagtgactcttcagttacagtgtgatgaggtctaccagggttgcctttagggaggagtcatgctgtcagggaaagaaatttacttaagggtgttcaaagagctgagttctttgaggcatagggtgtgattccacattcaggaaaaggccccaggagnctgttaaaattctggaacccagtttttggaataggaggcttgatgccngggggggcttgaaacctctttttgttctctttctnggggtcctggantgttcccccagttt

SEQ ID NO: 361689 - DNA, 357 bp, Homo Sapiens
  misc_feature (33)..(33): n is a, c, g, or t
aaaacccctctgtccccccaaatgagatttcanccctgagcagctgggggttagggccttcaatatatgaatttgacagggagggtagaaggagagaacagaattcaaccccacagcagcaacaatctaatagcttcctgtgagcaagcaaagagaatgttcattgtcagtctcataggcgccattccctattcatacgttacttgtgctctctcatattccttgagtgttttaaattgtaaacattcaagtacaaacaaacttcgcttgattaccagagataaaaaagaaatgccttgtaatttggtgtcatgtgaatgttttaagtggatacctgaaaaattgtgcttaagaatg

SEQ ID NO: 361690 - DNA, 464 bp, Homo Sapiens
taaaatagttgctgtataatttattttcataaactataaaaaaatactaaatggttaaaatagacttgcaggccaatcttaaatggggtgggaggggtctgagggtgggatggggaaagggaaagaggttttgatataaacaaaacaaatgcactttgggtgtgttttggtatttttctggggatagagggggtggggttagggatgtccctgtagattagttccagaatggggtgtctgtatatactgtattaataggcatgtttgactctcgtaaagggacgttagtagctgctgcaggtcctgtttggaaaccccatgtacaattcccagttttttgtaagtgtcagtgcgagagacatttgactcttgtgtttgtatctcctttttatgattgctgtacctacccatgtctttttggggaggggtgaaaagagatttgaaataaaaatgttttagaaatc

SEQ ID NO: 361691 - DNA, 952 bp, Homo Sapiens
  misc_feature (45)..(81): n is a, c, g, or t
gaacaactaatacatggggaactggagttcacgcggtggcggcgnnnnnnnnnnnnnnnnnnnnnnnnnnnnnnnnnnnnnatcaggccaaatcggccgagctcgaattcgtcgagagcgggagcggcgggcggagtctgcaggatggcaccggacccctggttctccacatacgattctacttgtcaaattgcccaagaaattgctgagaaaattcaacaacgaaatcaatatgaacgaaaaggtgaaaaggcaccaaagcttaccgtgacaatcagagctttgttgcagaacctgaaggaaaagatcgcccttttgaaggacttattgctaagagctgtgtcaacacatcagataacacagcttgaaggggaccgaagacagaacctcttggatgatcttgtaactcgagagagactacttctggcatcctttaagaatgagggtgccgaaccagatctaatcaggtccagcctgatgagtgaagaggctaagcgaggagcacccaacccttggctctttgaggagccagaggagaccagaggcttgggttttgatgaaatccggcaacagcagcagaaaattatccaagaacaggatgcaggccttgatgccctttcctctatcataagtcgccaaaaacaaatggggcaggaaattgggaatgaattggatgaacaaaatgagataattgacgaccttgccaacctagtggagaacacagatgaaaaacttcgcaatgaaaccaggcgggtaaacatggtggacagaaagtcagcctcttgtgggatgatcatggtgattttactgctgcttggggctatcgtggttgttgcagtcttggccgaccaactgatggcagtaaagagaccaccagcagtgacacctgccaatgacagatgcaagcccaacacccttttggtacgcaaaaactgctctcaataaaatcccc

SEQ ID NO: 361692 - DNA, 643 bp, Homo Sapiens
gggccgaggggggggcggagtctgcaggatggcaccggacccctggttctccacatacgattctacttgtcaaattgcccaagaaattgctgagaaaattcaacaacgaaatcaatatgaacgaaaaggtgaaaaggcaccaaaggtccagcctgatgagtgaagaggctaagcgaggagcacccaacccttggctctttgaggagccagaggagaccagaggcttgggttttgatgaaatccggcaacagcagcagaaaattatccaagaacaggacgcaggccttgatgccctttcctctatcataagtcgccaaaaacaaatggggcaggaaattgggaatgaattggatgaacaaaatgagataattgacgaccttgccaacctagtggagaacacagatgaaaaacttcgcaatgaaaccaggcgggtaaacatggtggacagaaagtcagcctcttgtgggatgatcatggtgattttactgctgcttgtggctatcgtggttgttgcagtctggccgaccaactgatggcagtaaagagaccaccagcagtgacacctgccaatgacagatgcaagcccaacacccttttggtacgcaaaacctgctctcaataaattcccccaaagctctgaaaa

SEQ ID NO: 361693 - DNA, 616 bp, Homo Sapiens
  misc_feature (18)..(18): n is a, c, g, or t
  misc_feature (44)..(44): n is a, c, g, or t
  misc_feature (75)..(75): n is a, c, g, or t
  misc_feature (86)..(86): n is a, c, g, or t
  misc_feature (94)..(94): n is a, c, g, or t
  misc_feature (234)..(234): n is a, c, g, or t
caaagcctgccattgacnggccaatgtaaaccgccttaaatganaaacccctcactgacccccctatgttgaacncctcctaaatnctgaaccnctgaaggggaaggggaagggaacacggggtgaatcaacccgggactcggtcctcaaggatatccctaccaatagcgggtaccgtaaggcatgtaccccaaacataacggatgtaaggcagaaagtgatcggagaaggaantgaagaaagtgtgccgtgatgttaatgaaaagtcatatgcagctagagcagaccccaggaaagctttctggaagagattgcatctgaggaaattcaggaaggatctttgtagattggggggagattctaaattgaaggggtgatagggtgaggggccagagggaagtctgctgtgttctcatgtaggatgtcagccctccctgcaacttctctttttggccaatgtcttttcactttcctgaccctttagaatcatccccagccagacgcaatcatggaagttgccttattgtcactggttaagaacttggcgagattgaagggcttttgttattgttgttggatatttttgtttcccataaaagcacatcatttcccccct

SEQ ID NO: 361694 - DNA, 394 bp, Homo Sapiens
  misc_feature (61)..(61): n is a, c, g, or t
  misc_feature (114)..(227): n is a, c, g, or t
aattaatttaattcattccatttttttgggatggagtccttgcctttgtcaccccaagatncaggccactgcactcccagcctcggggtcaagagcgaaactctgtctcaaacnnnnnnnnnnnnnnnnnnnnnnnnnnnnnnnnnnnnnnnnnnnnnnnnnnnnnnnnnnnnnnnnnnnnnnnnnnnnnnnnnnnnnnnnnnnnnnnnnnnnnnnnnnnnnnnnnntatctttgctatttgtataaaaatggaaattttaacagcttagcctctagagagttactgaacgtggttaccttgggaatgtaaatagaactgcaaattaaaatgactggccacttcaactgggtaagggaaacagctgcaataaagcttcgtgaatatatatctcc

SEQ ID NO: 361695 - DNA, 694 bp, Homo Sapiens
  misc_feature (471)..(609): n is a, c, g, or t
agaaactcagggcggcccccttagctcctatgactggaacccattgaaaaggtgtttgtcaaagctggagacaaagtgaaagcgggagattccctcatggttatgatcgccatgaagatggagcataccataaagtctccaaaggatggcacagtaaagaaagtgttctacagagaaggtgctcaggccaacagacacactcctttagtcgagtttgaggaggaagaatcagacaaaagggaatcggaataaactccagcaaggaaatggccagttaagtagtgtcttctctctccaccaaaaagaggaagtgcctccagcttttctgggggtctcataaagagcagttttactaaatgattgtatgcttatgctgaacacctttcatattggagaatcatgcatttgggtcactaattatctcaaaatatttcatactaataaagttgaattattttttattggaagccnnnnnnnnnnnnnnnnnnnnnnnnnnnnnnnnnnnnnnnnnnnnnnnnnnnnnnnnnnnnnnnnnnnnnnnnnnnnnnnnnnnnnnnnnnnnnnnnnnnnnnnnnnnnnnnnnnnnnnnnnnnnnnnnnnnnnnnnnnngggcgcggggccccaagaggaaagagaacggggccatagttgtccccaaaaaaaccggggccaagactagggttggaatccccac

SEQ ID NO: 361696 - DNA, 575 bp, Homo Sapiens
ggcacgaggcctgcagacagaggcctccagcttggaggaaaagctttcggactgctgaaggcccagcaggaagagaggctggatgagatcaacaagcaattcctagacgatcccaaatatagcagtgatgaggatctgccctccaaactggaaggcttcaaagagaaatacatggagtttgaccttaatggaaatggcgatattgatatcatgtccctgaaacgaatgctggagaaacttggagtccccaagactcacctagagctaaagaaattaattggagaggtgtccagtggctccggggagacgttcagctaccctgactttctcaggatgatgctgggcaagagatctgccatcctaaaaatgatcctgatgtatgaggaaaaagcgagagaaaaggaaaagccaacaggccccccagccaagaaagctatctctgagttgccctgatttgaagggaaaagggatgatgggattgaaggggcttctaatgacccagatatggaaacagaagacaaaattgtaagccagagtcaacaaattaaataaattaccccctcctccagatcaaa

SEQ ID NO: 361697 - DNA, 646 bp, Homo Sapiens
  misc_feature (566)..(566): n is a, c, g, or t
  misc_feature (574)..(575): n is a, c, g, or t
ggggagaagactggtgggagagaaggagagcctgcagacagaggcctccagcttggtctgtctccccacctctaccagcatctgctgagctatgagccaaaccagggatttacagggaggaaaagctttcggactgctgaaggcccagcaggaagagaggctggatgagatcaacaagcaattcctagacgatcccaaatatagcagtgatgaggatctgccctccaaactggaaggcttcaaagagaaatacatggagtttgaccttaatggaaatggcgatattgatatcatgtccctgaaacgaatgctggagaaacttggagtccccaagactcacctagagctaaagaaattaattggagaggtgtccagtggctccggggagacgttcagctaccctgactttctcaggatgatgctgggcaagagatctgccatcctaaaaatgatcctgatgtatgaggaaaaagcgagagaaaaggaaaagccaacaggccccccagccaagaaagctatctctgagttgccctgatttgaagggaaaagggatgatgggattgaangggcttcnntatgaccagatatggaaacagaagacaaattgtaagccagagtcacaaattaataaataccccctccccga

SEQ ID NO: 361698 - DNA, 859 bp, Homo Sapiens
  misc_feature (490)..(530): n is a, c, g, or t
atcaggccaaatcggccgagctcgaattcgtcgagagcggggggaagtttgggaggaaggcttctgagcaagactggtgggagagaaggagagcctgcaaacagaggcctccagcttggaggaaaagctttcggactgctgaaggcccagcaggaagagaggctggatgagatcaacaagcaattcctagacgatcccaaatatagcagtgatgaggatctgccctccaaactggaaggcttcaaaggtgagggggaaactgtaggcggtggagacagggctgggcggtaggagggttaggatttccacaagaacaaggcaggaacagcagagatacaaaagtttacttttgtggtagcaaaaggggaacctgcctttattgccctcctgccacactgcggtcccttatcccgggcctgcctctctcagcatcccttctagctccttacaccctagcggggcccctcaactcaccaaacccacttcctcnnnnnnnnnnnnnnnnnnnnnnnnnnnnnnnnnnnnnnnnnagcagttggttggcaaccccttcctcagtcccctgctgaaaaccctccagccagcgcttatcccttctgctctctcccctcacccagagaaatacatggagtttgaccttaatggaaatggcgatattggtgagaaacgggtgatttgcgggggcagggtggtgtgcaggcctaagaagacagaggtctctccctacatgctccattcctcatgatttcgggagggggcccacctaccacagtgggaggaaggagaatggggatgcggaaggtgggagaggagagagagggttctccccaacttctcccaatcccatcctcctgccccg

SEQ ID NO: 361699 - DNA, 714 bp, Homo Sapiens
agcggagtcctgtgtccgggccccgaggcacagccaggcaccaggtggagcaccagctacgcgtcggcgcagcgcagcgtcccatagcaccgagcctcccgcagccgccgagatgctgcgaacagagagctgccgccccaggtcgcccgccggacaggtggccgcggcgtccccgctccagctgctgctgctgctgctcgcctggtgcgcgggcgcccgccgaggtgctccaattattacctcaaggattacagcctgaacaacagctacagttgtggaatgagatagatgatacttgttccgtcttttctgtccattgattctcagcctcaggaatccaacgcactggaggagctttgctttatgattatgggaatgctaccaaagcctcaggaacaagatgaaaaagataatactaaaaggttcttatttcattattcgaagacacagaagttgggcaagtcaaatgttgtgtcgtcagttgtgcatccgttgctgcagctcgttcctcacctgcatgagagaagaatgaagagattcagtgtggacgaagaattccaaaagtccctttgcaagtcaaagtcgaggatattttttattcaggccacggaatggaagaagggtcagcagggttcatttacaatggatgccagctaattttccacagagcaatgctatggaatacaaaatgtactgacattttgttttcttctg

SEQ ID NO: 361700 - DNA, 158 bp, Homo Sapiens
tgacgcagccgattaatcatttttatatgcctaagccttagtcctattatataaatcagagccctgtagcttcacttttataaaatccttttattgcatattccccattcccttctttaatctatcagtctcagaagttcgtcaaagtattgggcatt

SEQ ID NO: 361701 - DNA, 187 bp, Homo Sapiens
acctgccgcagccctcccaaagggatgagccaccgcgcctggcccatttcttctttttttgacccatacttaatgttgcagaaactattcttgtcataacattatctctcatgtacagtaattatatgtaaattaattgaagcaaatatggaaactttacaatagaaataaagataggcagccagcg

SEQ ID NO: 361702 - DNA, 145 bp, Homo Sapiens
cggctgcgagaagacgacagaagggacagaaaaaaaggggtttcttgattccgggaaaaatctccgttctttcccaaggaaagcacgaatattcccccccgtgctcttaatgcccagccccttcattaaagacaccctacctctc

SEQ ID NO: 361703 - DNA, 238 bp, Homo Sapiens
cggctgcgagaagacgacagaaggggtttttttctttgtaatgtttttctttggcgtaatcctaatccaagtgattacatctcattactggatactgcaaaagcctcctacatgttctttcttaccactgttcctcctaaatccttaatttttattttgttaatctcctgtgaactttcactagctcttcatactctacaaaataaaaccaaattcttcaccctggcattacatatac

SEQ ID NO: 361704 - DNA, 674 bp, Homo Sapiens
gggggaatattctgtgatgctctgactcccctagtctgtagacggaattggcatacggtctaatttgtgtagtaagcacctttgttcatactagtagtgactgtattcttgattcagcctgatagctaccatgctgctgtcaaaaccaaccagaagggagcttgttcttctgctgtagtgtgcagtgactggcctcacccaggactttgatgtgagaatgagcactttcctctatcaggaaatttcaagtgtttcctgttattcgtagctcaatgtaatgcctcagttcattttcagttgtttgattatatgtgactaatatgtattttttattcaaacaagacttctgtacatgtttcttcaaaacagtttattaactgtcttcagtcttggattacatcaagtttataattttggcaaattgttaagacactgtgaagtcagcgttaaccatgtgcatacaacttaaggaattttttcctcctcatgtaaattttacttttcatgcttatatagtttcaacttttatcttcatagtaatttctcatctactcataataccaaaagttaagtcatgctgttttgtgtgctctcttgctaaagaccgcagagaccatacctgttgtcaaagagggtgtaataaactgtaataataatcatgaccacaaaaaaaa

SEQ ID NO: 361705 - DNA, 804 bp, Homo Sapiens
atgcctcatccagggctgggacacaggtttgttttccgctgactgctcggaaacccatggaggtatctgaaatgtgatgactccaaaggggttcatttcactatagggagaaattgattcgtctgacttcctatttatcaccactcaatattgggtgagttggtctgaacaaggtggggataaagtagagtggaaataatgtagagtcgtcagactgaaaggccaggttgtagtcccagctcttatctgccatcttggacaaagcttttcccatctccagtctcagtttcccatccataaaatgggggaagtggtaggtcttgctgattgcatccacattcattcctccatttcctttcccagcaaccccccatttctgtttgggaattcatatgatctgccagagcctctccaggggtggaatacatgtcctggactaagccaatgacaccttccatctttccagctatggtgactgggttaggtatgatcttgtgagttaagacaatgaagccagagggaatttcaagacttatgggaatgctgggtagaagctgttttaattcccctgttgaatgtgaaaaaggtagtagtattcctgggtctttatgatgaccaccttgggccttgggatcatgaccaggaatcacgtgaagctgacaccactgaagggagagttgagaggcagaaagagatcaagtccttggtgaaattgtttaagtacaggatcaagccttgcttgagattggccttacctctggactttttttgttatatgagctaataaattctgtttattgttta

SEQ ID NO: 361706 - DNA, 446 bp, Homo Sapiens
  misc_feature (60)..(60): n is a, c, g, or t
tctgtttgggaaattccatatgatctgcccagaccctctccccagggtggaaaaacatgncccccggactaagcccaatgacacccttcccatctttcccagctatggtgactgggttaggtatgatcttgtgagttaagacaatgaagcccagagggaatttcaagacttatgggaatgcctgggtagaagctgttttaattcccctgttgaatgtgaaaaaggtagtagtattccctgggtctttatgatgacccaccttgggccttgggatcatgcccaggaatcacgtgaagctgacaccactgaagggagagttgagaggcagaaagagatcaagtccttggtgaaattgtttaagtacaggatcaagccttgcttgagattggccttacctctggactttttttgttatatgagctaataaattctgtttattgtttaaa

SEQ ID NO: 361707 - DNA, 341 bp, Homo Sapiens
  misc_feature (16)..(16): n is a, c, g, or t
  misc_feature (21)..(21): n is a, c, g, or t
  misc_feature (38)..(38): n is a, c, g, or t
  misc_feature (81)..(81): n is a, c, g, or t
  misc_feature (90)..(90): n is a, c, g, or t
  misc_feature (100)..(100): n is a, c, g, or t
  misc_feature (125)..(125): n is a, c, g, or t
  misc_feature (188)..(188): n is a, c, g, or t
gtgtgtacctagtatntattncctaccttaaactgctnagcctctaaagaaattgtatgatcattttaaaggtacctaaanccctgaaantttgcttcancttacccacaccgctagtttacttnccttttttaatatttaagaatattataaatcagtgcatttgaggtccctagatttgtttttcncctatgaattttttacagactattttagagaggctgtggtttgaagacagaatactctttacatgctaacttttgaaggttggtaatgtaatttatactattttccttcagtgcaggagattttttaagtaaataagtaaattttagaacctc

SEQ ID NO: 361708 - DNA, 427 bp, Homo Sapiens
gagaagacgacagaagggaccagaccattgcccttgaagagtgtaaccaagaaggagaaccaggcacccctgccaattctccttcatcaacctcctcagagaatctctgtggaactgcccgttcccaatataataatctcctcctttacaagagctttccctctcctctctcttgctctcagagacctataaatccaaccagttaccctgcaagtcagccccatctgctgttccttggtctctaatcacctgagctgggtaaaggggattctgggagttgagagctctgccagggtgagatgtttcctgaagagaggttccccacccctgtaactcctcactgtactgatttactggcgcatgaaattctattaaaaatgcattcttctgaataaaaagagtattcactatttaacttcagaaaaaa

SEQ ID NO: 361709 - DNA, 1341 bp, Homo Sapiens
  misc_feature (677)..(677): n is a, c, g, or t
  misc_feature (679)..(681): n is a, c, g, or t
  misc_feature (683)..(683): n is a, c, g, or t
  misc_feature (686)..(686): n is a, c, g, or t
  misc_feature (688)..(703): n is a, c, g, or t
  misc_feature (1084)..(1104): n is a, c, g, or t
ccgcgctggaccctcttgcggccattgaaccccctgatccgggggcctcggaccccagggctcaggaggactgaaccaagacttaccctgaagttgccgcggggccttccgatcccctaggccattgcccaagtctggccaggcgtgatgggaccagcgaggagtctctgcaccttgacattcagaaactgaaggagaagagggacatgctggacaaggagatctcccagttcgtatctgaaggctacagtgtggatgaactggaggaccacattacccagcttcacgagtacaatgacatcaaggatgtggggcagatgctgatgggcaaactagctgtgatccgaggtgtcaccaccaaagagttgtatccagagtttgggctggacatgaatgactgagcaggctcatcgccccttgtccacagctcccagggacagaagggtgtggacatgataaacactgagagcccaaccagcacacctacagagtttccagcgagacaatgccagaagcacttttctagagagcccaagcccaatcaggaggaggctagagaagaggcgggcagggaggaaggggcgttcccagctccaaggttcctgaaatgtcgcagtgatacttgtgtaggggtacatgtactttatttgtcaataaacgtatctgtacactggaanannnanaangnnnnnnnnnnnnnnnnccttgtcgggcccgcctccggccctccgagaaagcttttctaggacacattcgtttttggcgcggcggggccccagttagggtaaagttgaaccatgggtccataggctggtttttccttaaggaagaatcctggggcccttggacataggtggccttgggaattccctcaccccaattaaaaaaaacacgcccccggggcggggccaaacaccgaaaggcgtttttctgtgaaacaaaaaatctccaaagtagggggaagttttcctttgaaagggctccaatattaaccccggggaagatctttatttccccaaccaggggaatagtttccccaaaggcggggaaagctctccggagaatagatctcaaaatattttannnnnnnnnnnnnnnnnnnnngttggcgccacctttctatttcggcgaaagtaaaactgggggttggggcaaaaattttccaattttataagggcgattttcctcttgcccggaaacaattgtgggaaaagccccctttcttccgcaaaaaaccggggtctattggagatgtgaaaaaccctttgaaaaattccgcccaccaagggggggatatatacaacgccacacaccttggggttcgcagcccttgtggggccg

SEQ ID NO: 361710 - DNA, 593 bp, Homo Sapiens
taaacctaaaaaagaccattggctgaattataacctagttagttatcacctcgtccccttaaagtcagtgacctcctgtgtttgatgtatattaccatagagtcttaagtccagtgtaccagttccactggaatttgacagttgtctctaccagtcatgcaactcgaagtagaaaagagtgctggacataggaagggggtgcttggtttgaggggttaatgtgaggcctttttgaaaaatgaatattttgataaaaagaattcttgttttagcacagttgatgcacataagtgattctcatatttgttgtataaactggtttaatacatttggaacatagttggattacattcatttcctgggaaagctagcttaccatacattcaagtttataaaacaatttgccataggcaaagccatttaaaaagttcattctgaaattatttcatttacctacagtgaaataattgtgaactaagtagtctttctgaaaactgttgggttctaggcattcctgagaaattgaaagtggctacctttcatgtcaaaaatgttgatctattataaataaaatgtttttgcatatgtttttg

SEQ ID NO: 361711 - DNA, 468 bp, Homo Sapiens
ccttctttcagaataatgtgaaatttcttttaaggacaagaaactttagtgtctagttggtaaatgacataggtttgaatctctttctaagagttgtaattgatgataagaatattctgtggttctttacagggataaattgtttagtttaatcagagtggtggctctcactatccataagtccatgggcaaaagtgttgactaatacgatcatacagtgtacaccagccaccttacaccatgcattgttgagagttcttgctctatatttgataacacttttcaaatatgccattttccgtgattataaaattgcttaaatatctatataatctttcaaaataattttcctacaaatgtctaaatttctctagaagtacaacatatacaatcagatttacttggaatggtcttccttagtcagtcgtgttttcctgcaaattaaaatggtttggacaacacaaaaaa

SEQ ID NO: 361712 - DNA, 407 bp, Homo Sapiens
ggcacgagggcaggagacactggaagtaaagcctggcctttggctctgccaaagaccacccaggggactggagaaaagagtggttggtggctggagctacaggcctgttgcgtgacaagggtgccctggacaggctggcagaaagtcaagccagagacctaaaagagaaggtcctggggaaagcaaagttaccttgattgcctttgacaacactcaagtacttcattggcccttctgctgcagaacttgaacacgtggttcttcaaatacagtactttcctcccaactcccaccactccactttcctactatgactatttcactcctctatcaactcagctgaatcatcatttccttgggtcagctttccttgtcccccctgactagcaataaatgtcctcctcaaa

SEQ ID NO: 361713 - DNA, 451 bp, Homo Sapiens
tctgctgagatcctctcccaaaccaatcttcccttacaaagcccttgttgcaggctatgctttctgaggggaacccaggccaagacactaaaatgacacaccaacatgaagacatgaacacaattgcaaagggattggttggattgcatatctctgtgaatgggactcaagagaagtttgggaaatgctggaccagatgacccttgcaatcatggtgcacagaattaaaaccgtcaagttccccatccatctctgagatggatgagaatctgagtcttccacaagatgcccaagacttgttaaacccgtggaatgtctttgggtatgtgtgacatcaacaagaagcagcagacaaaacaaaatattttcacaaacattcagaaatccctaaatcttgtgagttgtcgtatcatttgtagatataattataaaatggcacatgatgctgaaa

SEQ ID NO: 361714 - DNA, 491 bp, Homo Sapiens
ggaagccggccgggtggaaggggagagggccgttatcgtggtgcgaatccaactcgcagcctctgggagcacgttgctaataaaggtcaaattaaaacaactaagtggtgccggcagggacgcgccgcatggtcaggagaagcccggctattaatcatccataaggagcattgctcttctggtgtgggagaatggggctgtgcgacagccccccggagttgcgctctgctctgaaccctaagctcccccagagcaagtggattgcgcagcctattaccccacctccccacggccccctcttggggcggcaccaccctagatggcaggaattcggagaaaatgcggtgtcacgtccgccgctatgcccgcacacgcgtctgcgccaactccagcaacacgtggggaccgtgaatctgggcgtctgctctccacttaggtggttatgtgggtatacttatatgattactgattaaaaccaaattggacggaga

SEQ ID NO: 361715 - DNA, 955 bp, Homo Sapiens
  misc_feature (258)..(258): n is a, c, g, or t
tgtctaaccctcacaagaggctcccccaggggcttacccgcgtggaaattccgggaagtttccaataccagtgcataaagttacggaaacacctatacgctaataaaggcctttccggaccccagaacctgaagacagcccaaatagtgttaaagaaggaacatgccggagtgaatatgattcccggctgcccagatgtgtatgaatggccaggaatctgcatcaagccctcctgtgataaaagaatagaagcactcnccctgattaaatactttctgtgctccaggaaaccccttttttcagacaagaagagataatgtcttcagttttatggtgttttctgtgttttgttctccctgaccactttggttgatgtattttttccatgcgtctccacatctgttggggtagacgtgttgattgattgcattgcccaccagcaccctacaatcagatagttgtgatgctttaattctaacatacagcccgtaccacatccaggagatgtaaaaagtgtgtttgtgaatgtcttcacttgtactctaattcagacttgccaaagtatttgctatttactattatgggtaatactcttctctggcctagttcttacagagctactaaaatagaaatttacttttatggatagaagtacagaattttgagaagaaactaaattttcaccaaattttaaggaaaaattgtcattatctaaaaatgttcttatatatctgcttcatcttaccttcatactctgaaattccctatagcagacagagctagggaaatattaaaaatttaccctatttattttctggaactaaatcaagccttaactataacattatgagagtaatgggaactactgctggctttaagtaaataaaagtcattgttttcaacagtgtataaaaatcatagtgtaacctttttatttaataaatatcttacattt

SEQ ID NO: 361716 - DNA, 459 bp, Homo Sapiens
  misc_feature (59)..(59): n is a, c, g, or t
caccttgtacctcctaattccagaccttggcccaaagtatttggcctatttacctattnatggggtaatacctccttctctggccctagttccttaccagagcctacctaaaatagaaatttacttttatggatagaagtacagaattttgagaagaaactaaattttccacccaaattttaaaggaaaaattgtccattatcctaaaaatggtccttatatatcctgccttcatccttacccttcatactctgaaattccctatagcagacagagctagggaaatattaaaaatttaccctatttattttctggaactaaatcaagccttaactataacattatgagagtaatgggaactactgctggctttaagtaaataaaagtcattgttttcaacagtgtataaaaatcatagtgtaacctttttatttaataaatatcttacatttaaaaaaa

SEQ ID NO: 361717 - DNA, 1030 bp, Homo Sapiens
  misc_feature (42)..(78): n is a, c, g, or t
tgtatcgatatatgggcgaatggagctctcgcggggcggcgnnnnnnnnnnnnnnnnnnnnnnnnnnnnnnnnnnnnnatcaggccaaatcggccgagctcgaattcgtcgagagcgggccttgcgctgcgcgctcaccatggtgggccccgcgccgcggcggcggctgcggccgctggcagcgctggccctggtcctggcgctggccccggggctgcccacagcccgggccgggcagacaccgcgccctgccgagcgggggcccccagtgcggcttttcaccgaggaggagctggcccgctatggcggggaggaggaagatcagcccatctacttggcagtgaagggagtggtgtttgatgtcacctccggaaaggagttttatggacgaggagccccctacaatgccttgacggggaaggactccactagaggggtagccaagatgtccttggatcctgcagacctcacccatgacactacgggtctcacggccaaggaactggaggccctggatgaggtcttcaccaaagtgtacaaagccaaataccccatcgtcggctacactgcccggagaattctcaatgaggatggcagccctaacctggacttcaagcctgaagaccagccccattttgacatcaaggatgagttctgatgttccccctgcaggagcaggttcttgggagcgtgaggcaggaagacactaggtgctgaatctcctgcaaaactggctgcctggaggccctgagccacccagatctgaataaaacagatgcttaccctggaagagcaaatgcctcctgttgtccttggtcaggggttctgtctacctggggacccctgtctgcacaccagggatcaataagagccaaagtgggacacctcctagatgtcagtatcagctggctgggcagtggaattttgagcgacctttactttatacttttctgtgcttgacagattttcagccatgaccatgttcactttataatcaaaacaaaaataaaggtcccatttttacaaaagg

SEQ ID NO: 361718 - DNA, 738 bp, Homo Sapiens
  misc_feature (50)..(86): n is a, c, g, or t
ggatgtatagactcactatgggcgaattggagcttacgcggtggcggcgnnnnnnnnnnnnnnnnnnnnnnnnnnnnnnnnnnnnnatcaggccaaatcggccgagctcgaattcgtcgagagcggcttgtcttgcgctgcgcgctcaccatggtgggccccgcgccgcggcggtggctgcggccgctggcagcgctggccctggtcctggcgctggccccggggctgcccacagcccgggccgggcagacaccgcgccctgccgagcgggggcccccagtgcggcttttcaccgaggaggagctggcccgctatggcggggaggagagttttatggacgaggagccccctacaatgccttgacggggaaggactccactagaggggtagccaagatgtccttggatcctgcagacctcacccatgacactacgggtctcacggccaaggaactggaggccctggatgaggtcttcaccaaagtgtacaaagccaaataccccatcgtcggctacactgcccggagaattctcaatgaggatggcagccctaacctggacttcaagcctgaagaccagccccattttgacatcaaggatgagttctgatgttccccctgcaggagcaggttcttgggagcgtgaggcaggaagacactaggtgctgaatctcctgcaaaactggctgcctggaggccctgagccacccagatctgaataaaacagatgcttaccctag

SEQ ID NO: 361719 - DNA, 1684 bp, Homo Sapiens
gggtaggcgggcaaggcgggcgccgaggtttgcaaaggctcgcagcggccagaaacccggctccgagcggcggcggcccggcttccgctgcccgtgagctaaggacggtccgctccctctagccagctccgaatcctgatccaggcgggggccaggggcccctcgcctcccctctgaggaccgaagatgagcttcctcttcagcagccgctcttctaaaacattcaaaccaaagaagaatatccctgaaggatctcatcagtatgaactcttaaaacatgcagaagcaactctaggaagtgggaatctgagacaagctgttatgttgcctgagggagaggatctcaatgaatggattgctgtgaacactgtggatttctttaaccagatcaacatgttatatggaactattacagaattctgcactgaagcaagctgtccagtcatgtctgcaggtccgagatatgaatatcactgggcagatggtactaatattaaaaagccaatcaaatgttctgcaccaaaatacattgactatttgatgacttgggttcaagatcagcttgatgatgaaactctttttccttctaagattggtgtcccatttcccaaaaactttatgtctgtggcaaagactattctaaagcgtctgttcagggtttatgcccatatttatcaccagcactttgattctgtgatgcagctgcaagaggaggcccacctcaacacctcctttaagcactttattttctttgttcaggagtttaatctgattgataggcgtgagctggcacctcttcaagaattaatagagaaacttggatcaaaagacagataaatgtttcttctagaacacagttacccccttgcttcatctattgctagaactatctcattgctatctgttatagactagtgatacaaactttaagaaaacaggataaaaagatacccattgcctgtgtctactgataaaattatcccaaaggtaggttggtgtgatagtttccgagtaagaccttaaggacacagccaaatcttaagtactgtgtgaccactcttgttgttatcacatagtcatacttggttgtaatatgtgatggttaacctgtagcttataaatttacttattattcttttactcatttactcagtcatttctttacaagaaaatgattgaatctgttttaggtgacagcacaatggacattaagaatttccatcaataatttatgaataagtttccagaacaaatttcctaataacacaatcagattggttttattcttttattttacgaataaaaaatgtatttttcagtatccttgagatttagaacatctgtgtcacttcagataacattttagtttcaagtttgtatggtagtgtttttatagataagatacgtctattttttcaaaattcatgattgcagtttaaatcatcatatgacgtgtgggtgggagcaaccaaagttatttttacagggactttattttttgatctttatttgagattgttttcatatctatctaaattattaggagtgtgtgtatcagaagtaattttttaatgtcttctaaggatggtcttccaggcttttaaactgaaaagcttaattcagatagtagcttttggctgagaaaaggaatccaaaatattaataaatttagatctcaaaaaaa

SEQ ID NO: 361720 - DNA, 1085 bp, Homo Sapiens
  misc_feature (501)..(553): n is a, c, g, or t
tcccggaaggagaagctgagatttctgttccacatgtacgactcggacagcgacggccgcatcactctggaagaatatcgaaatgtggtcgaggagctgctgtcgggaaaccctcacatcgagaaggagtccgctcgctccatcgccgacggggccatgatggaggcggccagcgtgtgcatggggcagatggagcctgatcaggtgtacgaggggatcaccttcgaggacttcctgaagatctggcaggggatcgacattgagaccaagatgcacgtccgcttccttaacatggaaaccatggccctctgccactgacccaccgccacctccgcggagaaactgcactttgcaatggggccgcctccccgcgtagctggagcagcccaggcccggcggacagcctcttcctgcagcgccggtacatagccaaggctcgtctgcgcaccttgtgtcttgtagggtatggtatgtgggacttcgctgtttttatctccaatnnnnnnnnnnnnnnnnnnnnnnnnnnnnnnnnnnnnnnnnnnnnnnnnnnnnncaacaaaacaaagggggggcgcgccgactaaaagaataccccccagagggggcggcccaggttattacagggtagcaccacgagttttttatggaaaaaggggggccccataataggaggcggcgctaatatataaccgacgagggacactagggcgcggtgttttaaaaacgctgctaagatcggtggcaaaaaagacgtcgcataagcgtgaggaaacatcattgtggaaaaagaacggaccccctcaacttcagccgggcggagaggagacacaatatatggggggcacacaaaacaacctcccctcaccgggcgagaaatttattagacgcgccccaagcagggcaagacatattcaacaaacctttaacaacagggtgactcaataaggcgggtgtctcaacacaacaaagacgcggacaaaaatatgagccatggccccgcttcatagagaaaaagtatctggcgcatcaacgcggagcagcaaatctaatcttgatcgccaaaaacattttttattcccccggcg

SEQ ID NO: 361721 - DNA, 444 bp, Homo Sapiens
attttattagaagtgagtaagggcagtgtagaaaatacagtgctgcagatatttgagtgtgaatgaaggcctgaatgcttcattctttatttggttcaatttcccactggaagtctgcctcctatttcttgactctttcagccacgaagttaacataagccctataaatgttaaaaagtaaaatgtcacacaaggccgaagtccagcttctattctgaaggtccacagggaaagttacagaagaaaacaaacctttctatgggaaggcaaaagcaatttaaggctcagctcaaaactgaagagggctggagcctgggaatattctagaagctgaaagtcctagaacttgtaggcaactgcttatcctttcaatttcttcatctgtctgcccgggaaactaaaatggagcactttggaaattaaatgatgaagataacatagaaa

SEQ ID NO: 361722 - DNA, 406 bp, Homo Sapiens
  misc_feature (94)..(246): n is a, c, g, or t
agcccatgaacctccttgtgcctccaggcaagttcctccctgccctcaagccctcccttaagtaagctggaaacccacaggtaatgtgcccacnnnnnnnnnnnnnnnnnnnnnnnnnnnnnnnnnnnnnnnnnnnnnnnnnnnnnnnnnnnnnnnnnnnnnnnnnnnnnnnnnnnnnnnnnnnnnnnnnnnnnnnnnnnnnnnnnnnnnnnnnnnnnnnnnnnnnnnnnnnnnnnnnnnnnnnnntagctcctctacctgaacttatttttcattatcctaaagtgataaaatagatcaagaagatcagaacaggcttaaattgatgctataaaaccaattactctgtattatctttgcaactcttttgtaagtctaaaattgtttgaaaataaaagtttatttt

SEQ ID NO: 361723 - DNA, 574 bp, Homo Sapiens
agcggtcaaattcatgtggaaaaatgttctgtttgtagaactcatagtattcacttatagtgctcatgtcaggaatggcaagtgagtaagagcccctgataatctgcttttgttagaacgtaatgccaaagataataaaacatgtccacttcttttctagttctaatcagtttttagacatcaagatttatttactttgcatgagatttgtttcctattatttgaatatgtgctatacacttgaattagaaaaacctgcttgaatgtattgtcagttattaaagcacatgtgactaagtttgcatttgtcagtattgttctactgtttgtactgaaagtctcattttaaaattgctacttaacactgtactataccttgtaattttttagattctccacttgtattctttaaatgtttccagatgcctttagttttagctgctgtaaaatagctactttgcgttatttgatatagaattgttttttaaaaactccatttatttatacagagacatttataatattttacaaacattcttatattctgaataaatatttctaattccacagtgta

SEQ ID NO: 361724 - DNA, 1013 bp, Homo Sapiens
ggcatgccctccagccagaagaaggaagagtggaggtagaagcacacccatgcccatggtggacgcaactcagaagctgcacaggacttttccactcacttcccattggctggagtattgtcacatggctactgcaagctacaagggagactgggaaatgtagtttttattttgagtccagaggacatttggaattggacttccaaaggactcccaactgtgagctcatccctgagacttttgacattgttgggaatgccaccagcaggccatgttttgtctcagtgcccatctactgagggccagggtgtgcccctggccattctggttgtgggcttcctggaagaggtgatcactctcacactaagactgaggaaataaaaaaggtttggtgttttcctagggagagagcatgccaggcagtggagttgcctaagcagacatccttgtgccagatttggcccctgaaagaagagatgccctcattcccaccaccaccccccctacccccagggactgggtactaccttactggcacttacaagagtggagggcagacacagatgttgtcagcatccttattcctgctccagatgcatctctgttcatgactgtgtgagctcctgtccttttcctggagaccctgtgtcgggctgttaaagagaatgagttaccaagaaggaatgacgtgcccctgcgaatcagggaccaacaggagagagctcttgagtgggctagtgactccccctgcagcctggtggagatggtgtgaggagcgaagagccctctgctctaggatttgggttgaaaaacagagagagaagtggggagttgccacaggagctaacacgctgggaggcagttgggggccgggtgaactttgtgtagccgaggccgcaccctccctcattccaggctcattcattttcatgctccattgccagactcttgctgggagcccgtccagaatgtcctcccaataaaactccatcctatgacgcagaataaaaaaa

SEQ ID NO: 361725 - DNA, 901 bp, Homo Sapiens
  misc_feature (153)..(244): n is a, c, g, or t
  misc_feature (252)..(260): n is a, c, g, or t
  misc_feature (329)..(363): n is a, c, g, or t
aagtgatagaatcagagagtttttcctctaaccaaactgccaaagttggttttggctaagaatttcccaataatatttatgctgctgctcatttttttagttttctgagacaggggtctccctctgtcacccaggctggagtgcagtggtgannnnnnnnnnnnnnnnnnnnnnnnnnnnnnnnnnnnnnnnnnnnnnnnnnnnnnnnnnnnnnnnnnnnnnnnnnnnnnnnnnnnnnnnnnnncagttaannnnnnnnngagtagaggtgggggttttgctatgttgcctatctggtcgtgaactcctggcctcaagggatcctctgnnnnnnnnnnnnnnnnnnnnnnnnnnnnnnnnnnngcaaaagccaccgtgtgtttatttttcccattcccttcctttatctgcaatgcttttttctttaaggcagcctaatttacaagcttggccttgaattaaaagagaacccagaacccgctcttggagtttacgttctcaaaccaacatcagagcaactgtctatccccatataaataaagttatctacccctgctcctaactgggtacaagttatgacctacaactcagtgattttttaaattagtgtgccctatttggtgaaatcctgtgaacttaatccaaggacaacccacacatgtcaattactaaacatttaaaatatatttctaaacagaatgggccgactcagtcacagtaactgttgatctccatagtagagcaacccacaaagacagaactgatttttttcccataatcaggggtgaaaaatatacaacttgtttctgaaccaaaaccacaatttctgcagtttaaaatgtttcactgctaatatggccctggtagaaattatgtagttttttttcttctttaaaaaaaa

SEQ ID NO: 361726 - DNA, 790 bp, Homo Sapiens
  misc_feature (34)..(34): n is a, c, g, or t
cccacgactgaagttgtagttgagctgattaccntgggaagtgacccagccaaggacactcgattggagtcagttgaatatttgtaccctcagtggagcccttctggtctttcttccacttctgccagaatttcctctagccaaatacttctttctccttgcttgcctccaccatgatatttgaataagagatggccagaggataacacttgtctcttaaaaactaagctaaaaagaacctagaaccttcaattgagcagttgtgaaaattgctaatggtgccaaggccaagcaaagagtttcagaaaatgactgagaaggagcgataacccccagaatgcaaaatcaggggcatcattatccggtgcttgaacaagaagctccgctctacaactggtttttttaggacttgtgaggaacacagcaacggaaatccatccacaaaggatgcagtgccccaacttgtactgcgcctgaatagtcatgtgataatttactgaagaaatctagtgtactttaaatttttttcataaaagtttacattgtattgtaggttaacattaaatgttttatagcaaaaacttcataacaggctgtggatctttctgtgtgggaccgatgtggtagataattttctgtgtgtgaaggagaggttgaaaaacaccaggagggaacagcatggcatggcattgccaagaaggaaaggagagtcaaagagaaggatggagttaggtcttctctgttgtatccctgtggaaaaatagcaacttagtatgatggagagagagag

SEQ ID NO: 361727 - DNA, 716 bp, Homo Sapiens
  misc_feature (125)..(125): n is a, c, g, or t
aagatggtgaaaagtgactgattttaaataatgagataggtcacttaaaataacagtgcctttgaccttaaaacatggcactggccccatgtgacctttggccatttcccagtacttccctttanagtctgcagacctataaacagtggtgtctcaaagcaaaggaaacctcccacaagtgctgcaacagtgcattagtttttatgtagcaatttgtttataaaaattcccatcccataatgcatgacctccctaaaaatacccacagcctccataggcaaggtgagctttctgtgctacccactggttagattccagccacctcagggattctgatccatgtcattaacgaccatcccagggtgtgagggcctgattaaagcttatcgaactagacatttgtttattagatgagctcggcattattattttctcaataactggtagaagggaaattttaaacataacactcaacccaaacaaaactacttcgtgaggctttcagcaaaaaggctgcttaaaagcatgaacccgggatgcagagcagcttttgtgcacggttccacttactgtaattgtttctggttctttcctctaacaccttccatgtatgtcaactttttatcaccgtcaggcatagactcgtggagattagtcattatagctcagacctaagctaattatttaaaataaatacatgtaaaggccactgccac

SEQ ID NO: 361728 - DNA, 115 bp, Homo Sapiens
caagatttttccccccagtccgcttacaaagtaataccatgttcgctgtaaaaaatttggaaataatggaaatgtataaagaaggaaataaaattctgctgtatctccacccaaa

SEQ ID NO: 361729 - DNA, 486 bp, Homo Sapiens
  misc_feature (76)..(76): n is a, c, g, or t
  misc_feature (102)..(102): n is a, c, g, or t
  misc_feature (111)..(111): n is a, c, g, or t
attaggcaaagacgggcgagttcaagaagttgaagaagaagttcacttaccagttcagcggcgaaagtgttgggcngcgggggccttggccgaagcggtgcnacccgcccnactgagcccgcaagccccgccgggccccgccaggcctccccgctggccatagcattaagccctcgcccggcccggacacagggaggacgctcccggggcccagaggcaggacttgttgcgggccggcctcgcctcacccgccccctccccccactccaggccccctccacatcccgcttcgcctccctccaggactccaccccggctccctggacgccagctgggcgtcagaccccaccggggcaaccttgcagaggacgacccggggtactgccttgggagtctcaagtccgtatgtaaatcagatctcccctctcacccctcccacccattaatctcctcccaaaaaacaagtaaagttattctcaatccata

SEQ ID NO: 361730 - DNA, 845 bp, Homo Sapiens
  misc_feature (194)..(203): n is a, c, g, or t
ttcactagaaaaatgttgattattcattaataagtagataccagatcaagtaatcaaatacattaatgtaacttttctctgatactggtttgacaaatactatatttccttatttaactgacctgttttggaattcttctgaatacaggtcaaaattcaacattgtgaggaattttaagtagagcaagcacacnnnnnnnnnnacaacaattacattaaactcaattatgctttacaaagatagcttgtttttcctcatagtgcgccaaaattctacatttccaagaccctgttttctaatagattctgtatttgcaacagtcatagaaattggtgatggtaaaaactaaaaaccacatttaattcaggcttcacgttagccattccaggtgcaaattatattacagcattgatttgtaatttgtgacaacgtttggttaatacaccagtgaaccttaaaaagatcagaattgttacatgtatgatgtgaaccagtgttatcttttatgttaaccatgtgcactaccacaggctataaatatgaagcaatatttcagcaagatagaagctcctgtgtatctccacatttagagagaagtctgagcggtttccatcattattatattttctgctttcactgtgccataggaagtgtctgccatttcctcttcttttagttttttataagaaatatctgtatcttcatcttcatctagaggatctcgcttgtgcaacatttcacttccatacattttatagattaaaacaaaaatccccgcttctgcagactggaaaagtgcatacagcaaaggaaacatgtacatgcttcctatgaattgcggtcc

SEQ ID NO: 361731 - DNA, 753 bp, Homo Sapiens
  misc_feature (33)..(33): n is a, c, g, or t
ggttgtatcaggcggaagttgacacgggctccnccgtgttcccccgggaagaataaggtggagcagttggcctgcatcatggagattccaaaaggtttcctaaatatattaccaccaccaggggtataaaaagatacccaattccaaaggacctcacgatggtgctgaaaacctatgacaccagcttcctggactttctcagaaggtgtttggtatggaaccttctcttcgcatgaccccggaccaggccctcaagcatgcttggattcatcagtctcggaacctcaagccacagcccaggccccagaccctgaggaaatccaattcctttttcccctctgagacaaggaaggacaaggttcaaggctgtcatcactcgagcagaaaagatgagatcaccaaagagactacagagaaaacaaaagatagccccacgaagcatgttcagcattcaggtgatcagcaggactgtctccagcacggagctgacactgttcagctgcctcaactggtagacgctcccaagaagtcagaggcagctgtcggggcggaggtgtccatgacctccccaggacagagcaaaaacttctccctcaagaacacaaacgttttaccccctattgtatgacctttgctgagggtatgtcctgctcctttccaccagtgatttgtattaagacagcacttatattgtacaatacttcagactgttttttttaaatacataaaactttatgttaaaaaactagaaaa

SEQ ID NO: 361732 - DNA, 654 bp, Homo Sapiens
  misc_feature (71)..(71): n is a, c, g, or t
tttcctaaaaatataacaccaacaggggaaaaaaagataccagatttcaaggacctcacgatggtgctganaacctatgacacaggcttcctggactttctcagaaggtgtttggtatgggaacctctcttcgcatgacccgggaccaggccctcaagcatgcttggattcatcagtctcggaacctcaagccacagcccaggccccagaccctgaggaaatccaattcctttttcccctatgagacaaggaagcacaaggttcaaggctgtcatcactcgagcagaaaagcagatgagatcaccaaagagactacagagaaaacaaaagatagccccacgaagcatgttcagcattcaggtgatcagcaggactgtctccagcacggagctgacactgttcagctgcctcaactggtagacgctcccaagaagtcagaggcagctgtcggggcggaggtgtccatgacctccccaggacagagcaaaaacttctccctcaagaacacaaacgttttaccccctattgtatgacctttgctgagggtatgtcctgctcctttccaccagtgatttgtattaagacagcacttatattgtacaatacttcagactgttttttttaaatacataaaactttatgttaaaaaactct

SEQ ID NO: 361733 - DNA, 928 bp, Homo Sapiens
ggtcccaatttatagcaatcttctcaacagaagtaggcatggaaaagacttcttttcatactctcactataaagaaagctgcattgagaagaaaatggctgtcatttaaaggatggtttaactagtgagattcctattgtggttatacaaggtctcattgtttgtttgtttcttttaaattatttcagctttaaaaatacagaaatggaatctgtcaagagcaggtatttcatacggttaaaaaaatgaacatgcagactccttttcaatatgggtttatatatataagtattttttgtgtattatgactacgttaggagtttaatattgtcaaggacagtacaactgcaaagggatgctgtatagcaacacatcagaagtcggaaaggaactgacacattctctcagagctcaaggtcttaaagagcttgagttaaatctaggtacagttacaggcatgtatagacttaaatggatgcaatggaagctaactaaaataaggcttagttgtcctttctatttaaataccccaagttgtcttcttacttcctctcccctctcccattttgcactgtgtgtcgatgcaatcttcgctagcacaaaatattgtcgctaatagtcatttctgttttcccattgtaaatgctgttgagctttattctattttatgttactttgttaatgaaatttaggaaagcagttgtttctttaaatttattgtgatattctatatctagcggcctttatatgcaaataaaattgcaagatttttaaattcgtgctgtttagagggttggatggtggaggatggtagtttcgtcctggggaaggagggatttattcatatgcaacatcagtaatgcctttcagaagaattagaataagtgatttttttccctaattttcaataaatttttattacccacca

SEQ ID NO: 361734 - DNA, 837 bp, Homo Sapiens
  misc_feature (71)..(72): n is a, c, g, or t
  misc_feature (113)..(113): n is a, c, g, or t
  misc_feature (116)..(116): n is a, c, g, or t
  misc_feature (182)..(182): n is a, c, g, or t
gaccaggtatcagggtgcatgcagaggtcagagagagagctggaagagaaaagagaagaatttctgggatnntgggcttttccgatcaagctcggcaacagactcttccatgnagnagatctttcagcacatgatggcctatcaccagaggcccagcaagcgcatctcagccaacatccctntgatcatccagttcttcatgctccagacgtacggccagcagcttcagaaggccatgctgcagctcctgcaggacaaggacacctacagctggctcctgaaggagcggagcgacaccagcgacaagcggaagttcctgaaggagcggcttgcacggctgacgcaggctcggcgccggcttgcccagttccccggttaaccacactctgtccagccccgtagacgtgcacgcacactgtctgcccccgttcccgggtagccactggactgacgacttgagtgctcagtagtcagactggatagtccgtctctgcttatccgttagccgtggtgatttagcaggaagctgtgagagcagtttggtttctagcatgaagacagagccccaccctcagatgcacatgagctggcgggattgaaggatgctgtcttcgtactgggaaagggattttcagccctcagaatcgctccaccttgcagctctccccttctctgtattcctagaaactgacacatgctgaacatcacagcttatttcctcatttttataatgtcccttcacaaacccagtgttttaggagcatgagtgccgtgtgtgtgcgtcctgtcggagccctgtctcctctctctgtaataaactcatttctagcagaaaaa

SEQ ID NO: 361735 - DNA, 482 bp, Homo Sapiens
  misc_feature (13)..(13): n is a, c, g, or t
ctttcttcttttntaagttgtcaaagaagcttccacaaaattagaaaggacaacagttctgagctgtaatttcgccttaaactctggacactctatatgtagtgcatttttaaacttgaaatatataatattcagccagcttaaacccatacaatgtatgtacaatacaatgtacaattatgtctcttgagcatcaatcttgttactgctgattcttgtaaatctttttgcttctactttcatcttaaactaatacgtgccagatataactgtcttgtttcagtgagagacgccctatttctatgtcatttttaatgtatctatttgtacaattttaaagttcttattttagtatacatataaatatcagtattctgacatgtaagaaaatgttacggcatcacacttatattttatgaacattgtactgttgctttaatatgagcttcaatataagaagcaatctttgaaataaaaaaaga

SEQ ID NO: 361736 - DNA, 536 bp, Homo Sapiens
  misc_feature (389)..(397): n is a, c, g, or t
ttgtagtggcaagtgatgtatttggcttaaagaagcttgtgttactgaagttaacgcagaagtctggcctccgtttgtgggattattaaatatatatcctacgggatcagagtcatctattagaaacagtgatagccctgggtataaataaacatttctttagagtttggcgtcagtttttcaatgtccatcctcaaatcagacagtctgtttgaggggtcagttttcagggtgcatctgcaccgagaggcttgaggcagcaatgacccctgggctgcagttcggttgcaggcgctggtggcgggcagtccaggttggagggtggagatgggccaaggtcacagatgctgcagggcttcctgtccttgctctgtgtaaccgtcatcgcnnnnnnnnnttgggcacttgtccaaagggacccggggatgcgcacgttccttctgtgtgtgggccaggcgcttcttatctcgcaggctgcccatctcctgctccttggtctgcaggtctgcctccagctccaccttctgttcgatcag

SEQ ID NO: 361737 - DNA, 1162 bp, Homo Sapiens
  misc_feature (972)..(972): n is a, c, g, or t
  misc_feature (1045)..(1045): n is a, c, g, or t
ggacaggccaggagggtggccatggaggaggagcgggggtcggcgctggcggccgagtcggcgctggagaagaacgtggccgagctgaccgtcatggacgtgtacgacatcgcgtcgcttgtgggccacgagttcgagcgggtcattgaccagcacggctgcgaggccatcgcgcgcctcatgcccaaggtcgtgcgcgtcctggagatcctggaggtgctggtcagccgccaccacgtcgcgcccgagctggacgagctgcgcctggagctggaccgcctgcgcctggagaggatggaccgcatcgagaaggagcgcaagcaccagaaggagctggagctggtggaggatgtgtggcgaggggaggcgcaggacctcctctcccagatcgcccagctgcaggaggagaacaagcagctcatgaccaacctctcccacaaggatgtcaatttctcagaggaggagttccagaagcatgaaggcatgtcagagcgggagcgacaggtgatgaagaagctgaaggaggtggtggacaaacaacgcgacgagatccgcgccaaggacagggagctgggcctgaaaaatgaggacgttgaggctttacagcagcagcagacacggctgatgaagatcaaccatgaccttcggcaccgggtcacggtggtggaggcccaggggaaagccctgatcgaacagaaggtggagctggaggcagacctgcagaccaaggagcaggagatgggcagcctgcgagcagagctggggaagttgcgagagaggctgcagggggagcacagccagaatggggaggaggagcctgagacggagccggtgggagaggagagcatctccgacgcagagaaggtggccatggatctcaaggaccccaaccgcccccggttcaccctgcaggagctgcgggacgtgctgcacgagaggaacgagctcaagtccaaggtgttcttgctgcangaggagctggcttactataagagtgaagaaatggaaagggaaaaaccgaatacccccaaccccacccatcggnccacccgaggacgtccccccagccgggagtcgggcatcaaagcgactggtttaagcttcttctccccgagaataagaaagcgcctggcccacacacaggagaaacgggcacattcca

SEQ ID NO: 361738 - DNA, 1059 bp, Homo Sapiens
  misc_feature (46)..(64): n is a, c, g, or t
  misc_feature (963)..(975): n is a, c, g, or t
aactttaaccatgataggcatctctgcaaggtaggttttaacatannnnnnnnnnnnnnnnnnnccctccattcagtaagaaggataagcttttagagtacccagtcaccgtggtaactgccaaaaaaattctcctgaagtttgaagaggtcagctagcagggtcaacaaccctggcctctctctgagctcggtctagcatgccccagcctgcggttggagtgtcaggccagatctgaccctgggaggtggaccattctggctctgatataaatttttcgagtcagttcatgggcctgggactctccagggtgggcctccaaaatcgattttgaccccctgaccctgtctcacggaggcatagcatccaccctaagtaaggatttagccaggaaggacagctttccacggagggtgatgggggacagtataaacagttgggaaagcaagtaaggaggggggagggctagcaatcattaaaagcacattaaaaaacaatttttaaaaatctttattagagaaagttgtaaatgcatatctgttacagaattcctgtgatttgtagagttttctagtcagttttgaatataaataggtcacatatctttatctttttgcatactttgttacaaatatgcaaataagataggcatacttgctacaaaataggtacagcaggaatgtaatatgttcagaaaaggcaaactggttattaaaacacattaacaggtaaggagtttctaatattttaaatactaaaattttacatgtgtattttgaagtttttaaaatggaaaaataaagaacctttaaaaaacccaacagtgtggaataaagataaacttgttgcactcaaggtacatttctactttgtaaagcaagaagccaatacactcagttggataaaaatgagagaaaaattgtaaatatagagagttacagcttatagagctgaagaggaatnnnnnnnnnnnnngtgtctctgaataactttatgtattttcaacagtttaagatatcagaaacttggaaaataaatatgatatatatataaatcatc

SEQ ID NO: 361739 - DNA, 1134 bp, Homo Sapiens
tcattgtgttactattatcttctccgctttgacccttctctctcccgccggcggcggtccggaattttccggatccggatcatggcctgtggataccaatgttccgactggagacggggagcccgcgagacccgggtctccagggtctgcccaaggaagttgctcatgggagcagacctctagagcaggatttgaggccaggccaaagagaaccccagagatgaaaggcctcctcccactggcttggttcctggcttgtagtgtgcctgctgtgcaaggaggcttgctggacctaaaatcaatgatcgagaaggtgacagggaagaacgccctgacaaactacggcttctacggctgttactgcggctggggcggccgaggaacccccaaggatggcaccgattggtgctgttgggcgcatgacccactgctatgggcggctggaggagaagggctgccaacattcgcacacagtcctacaaatacagattcgcgtggggcgtggtcacctgcgagcccgggcccttctgccatgtgaacctctgtgcctgtgaccggaagctcgtctactgcctcaagagaaacctacggagctacaacccacagtaccaatactttcccaacatcctctgctcctaggcctccccagcgagctcctcccagaccaagacttttgttctgtttttctacaacacagagtactgactctgcctggttcctgagagaggctcctaagtcacagacctcagtctttctcgaagcttggcggacccccagggccacactgtaccctccagcgagtcccaggagagtgactctggtcataggacttggtagggtcccagggtccctaggcctccacttctgagggcagcccctctggtgccaagagctctcctccaactcagggttggctgtgtctcttttcttctctgaagacagcgtcctggctccagttggaacactttcctgagatgcacttacttctcagcttctgcgatcagattatcatcaccaccaccctccagagaatttttacgcaagaagagccaaattgactctctaaatctggtgtatgggtattaaataaaattcattctcaaggctaataaaaaccacattggcattttaaaa

SEQ ID NO: 361740 - DNA, 1580 bp, Homo Sapiens
  misc_feature (1483)..(1487): n is a, c, g, or t
  misc_feature (1489)..(1492): n is a, c, g, or t
  misc_feature (1494)..(1494): n is a, c, g, or t
  misc_feature (1496)..(1497): n is a, c, g, or t
  misc_feature (1500)..(1500): n is a, c, g, or t
tggaccggtccggaattcccgggatctgctcgataaatcagacagaacagttaatcctcaatttaagcctgatctaacccctagaaacaggaattaaggataacctagacgacataaagaggacaattaaagccagagagcacagaaataggcttctagcagacatcagagactataggccctatgcagacttggtttcagaaattcgtattcttttggtgggtccagttgggtctggaaaatccagttttttcaattcagtcaagtctatttttcatggccatgtgactggccaagccgtagtggggtctgatatcaccagcataaccgagcggtataggatatattctgttaaagatggaaaaaatggaaaatctctgccatttatgttgtgtgacactatggggctagatggggcagaaggagcaggactgtgcatggatgacattccccacatcttaaaaggttgtatgccagacagatatcaggattcactgtgtggcttatgtcttagacatcaactctattgacaatctctactctaaaatgttggcaaaagtgaagcaagttcacaaagaagtattaaactgtgggatagcatatgtggccttgcttactaaagtggatgattgcagtgaggttcttcaagacaactttttaaacatgagtagatctatgacttctcaaagccgggtcatgaatgtccataaaatgctaggcattcctatttccaatattttgatgggtggaaattatgcttcagatttggaactggaccccatgaaggatattctcatcctctctgcactgaggcagatgctgcgggctgcagatgattttttagaagatttgcctcttgaggaaactggtgcaattgagagagcgttacagccctgcatttgagataagttgccttgattctgacatttggcccagcctgtactggtgtgccgcaatgagagtcaatctctattgacagcctgcttcagattttgcttttgttcgttttgccttctgtccttggaacagtcatatctcaagttcaaaggccaaaacctgagaagcggtgggctaagataggtcctactgcaaaccacccctccatatttccgtaccatttacaattcagtttctgtgacatctttttaaaccactggaggaaaaatgagatattctctaatttattcttctataacactctatatagagctatgtgagtactaatcacattgaataatagttataaaattattgtatagacatctgcttcttaaacagattgtgagttctttgagaaacagcgtggattttacttatctgtgtattcacagagcttagcacagtgcctggtaatgagcaagcatacttgccattacttttccttcccactctctccaacatcacattcactttaaatttttctgtatatagaaagggaaaactagccctgggcaacatgatgaaacccccatctccactggcnnnnnannnnanannaanaaattaggaaaggaccaaacccaaccccccaaaaaattacctggggtatgaagggccacgggccctgttaatccccagtt

SEQ ID NO: 361741 - DNA, 779 bp, Homo Sapiens
  misc_feature (435)..(435): n is a, c, g, or t
gggacagatctcttaagaactttctgtctccaaaccgtggctgctcgataaatcagacagaacagttaatcctcaatttaagcctgatctaacccctagaaacaggaattaaggataacctagacgacataaagaggataattaaagccagagagcacagaaataggcttctagcagacatcagagactataggccctatgcagacttggtttcagaaattcgtattcttttggtgggtccagttgggtctggaaagtccagttttttcaattcagtcaagtctatttttcatggccatgtgactggccaagccgtagtggggtctgatatcaccagcataaccgagcggtatagggatatattctgttaaagatgggaaaaaatgggaaaatctctgccatttatgttgtgtgacactatgggggctagatggnggcagaaggagcaggactgtgcatggatgacattccccacatcttaaaaggttgtatgccagacagatatcagtttaattcccgtaaaccaattacacctgagcattctacttttatcacctctccatctctgaaggacaggattcactgtgtggcttatgtcttagacatcaactctattgacaatctctactctaaaatgttggcaaaagtgaagcaagttcacaaagaagtattaaactgtggtatagcatatgtggccttgcttactaaagtggatgatttggcagtgaggttcttcaagacaacttttttaaacatggagtagatctatgactttctca

SEQ ID NO: 361742 - DNA, 398 bp, Homo Sapiens
ccacagatctcttaagaactttctgtctccaaaccgtggctgctcgataaatcagacagaacagttaatcctcaatttaagcctgatctaacccctagaaacagtataggatatattctgttaaagatggaaaaaatggaaaatctctgccatttatgttgtgtgacactatggggctagatggggcagaaggagcaggactgtgcatggatgacattccccacatcttaaaaggttgtatgccagacagatatcagtttaattcccgtaaaccaattacacctgagcattctacttttatcacctctccatctctgaaggacaggattcactgtgtggcttatgtcttagacatcaactctattgacaatctctactctgaaagtgggtaccgagcc

SEQ ID NO: 361743 - DNA, 615 bp, Homo Sapiens
ctgaaggctctacggtttctccagaagaattcctctaagtttcatttcagacgcaccaggatgttgccggttagtggcgcattccacacccgcctcatggagccagccgtggagcccctgacgcaagctttaaaggcagtcgacattaagaagcctctggtttctgtctactccaacgtccacgcgcatagatacaggcatcccgggcacatccacaagctgctggcccagcagctggtctccccagtgaagtgggagcagacgatgcatgccatatacgaaaggaaaaagggcagggggttcccccaaactttcgaagtaggccctggcaggcagctgggagccatcctgaagagctgtaacatgcaggcctggaagtcctacagcgccgtggatgtgctgcagaccctcgaacatgtggacctggaccctcaggagcccccgagatgactgcagggggctcaaatgcgatgaccccctctgtcctcctgaggagaggctgtaggctgtgcctgtcgccccctaccttcctaatggctcctcctctgaggagtgaaagggatttgtttgcaacgtgctttgaaggccacataaaaagccctaaaaatgaaaaaa

SEQ ID NO: 361744 - DNA, 1126 bp, Homo Sapiens
  misc_feature (45)..(81): n is a, c, g, or t
tgtatagactcctataggcgactggattcaccgcggtggcggcgnnnnnnnnnnnnnnnnnnnnnnnnnnnnnnnnnnnnnatcaggccaaatcggccgagctcgaattcgtcgagagcggtcggtcgccacggtaacgcgcgcgggcaggtgtccgaccatgagcgtccgggtcgcacgggtagcgtgggtcaggggcttgggcgccagctaccgccgcggcgcctcgagcttcccggtgcctccgccgggcgcccagggtgtagcggagctgctgcgagatgcgaccggggcggaggaggaggcgccctgggcggcgacggagcggcgaatgccgggccagtgctccgtgctgctcttcccgggccagggcagccaggtggtgggcatgggccgcggtctgctcaactacccgcgcgtccgcgaactctacgccgccgcccgccgcgtgctgggctacgacctgctggaactgagcctgcacgggccgcaggagaccctggaccgcaccgtgcactgtcagcccgcgatcttcgtggcatcgctggccgctgtcgagaaactacatcacctgcagccctcggtgattgagaactgtgttgctgctgctggattcagtgtgggagagtttgcagccctagtgtttgccggagccatggaatttgctgaaggtttgtatgcagtgaaaatccgagctgaggccatgcaggaagcttcagaagctgtccccagtgggatgctgtctgtcctcggccagcctcagtccaagttcaacttcgcctgtttggaagcccgggaacactgcaagtctttaggcatagagaaccccgtatgttgaagtgtccaactacctctttccagattgcagggtgatttcaggacaccaagaggctctacggtttctccaagaagaattcctctaagtctcaattcagacgcaccagatgtttgccggtaagtggcgcattccaaaacccagctcatggaagccaggccgtggaagcccctgaacgcaagcttaaaggcagtcgacattaagaagctctggttactgtctactccaacgtccagggcatagatcggcatccgggcaattcaaaagctgttggccagaagtggtttccat

SEQ ID NO: 361745 - DNA, 665 bp, Homo Sapiens
agcattgcgctcatgaggggctttgcattcttagccaagggcaataaactgggtgggtgatctggcccaaacttgcccctaggctctgctagccctgaatcagcaggcttcagagacgagggtgggtgttataaaagccagtctgtaaagggtaaattccaaatcttgtgccttgttataccaatccttcctgattcccgtttaaaccaactactctatttctgtgctgcctacattttcaatcctcccaagcattagcaaattcctgaaatttcctcatttggtaggccttccataggagtcagctatggacttccataggagttggcagctaaaaccagactgtgagcttctgtctccgttctgatttttgctgcacctcccaggggacagtccccacatgattacaaaagccaggtgccctcatcacccgttacccctgacctgtccacttgttttgaataaaccttcattctccaagcagatccccaaacttccttgtccttgttacacgtctacctcacaacctcacaattcaacaacaggtaaatacctggattcactgatttctttactgtccttctctgagggttgggaaggtgggggctagaaaaggctcataatttttaaactcttgggaattaaacttgggaatttctattcct

SEQ ID NO: 361746 - DNA, 571 bp, Homo Sapiens
  misc_feature (181)..(181): n is a, c, g, or t
gcgaagggctgggccctgtgcaagctggcccttggcccaaaatcccactcccttccctggctgtgtcaccccgagcagctcatcccaccatggaggtcattggcctgaggcaagttccccggagagtcgggatcccctgtggccccctcaggcctatgtctgtgaggaaagggccctgccnactcttccccaagagggcctccatgtttcgaggtgcctcaacatggagccttgcctggcctgggctaggggcactgtctgaactcctgactgtcaggataaactccgtgggggtacaggagcccagacaaagcccaggcctgtcaagagacgcagagggcccctgccagggttggccccagggaccctgggacgaggctgcagaagctctccctccctactccctgggagccacgtgctgccatgtggccagggacggcatgagcaggaggcggggacgtgggggccttctggtttggtgtcaacagctcacaggagcgtgaaccatgagggccctcaggaggggaacgtggtaaaacccaagacattaaatctgccatctcaggaaaaa

SEQ ID NO: 361747 - DNA, 464 bp, Homo Sapiens
caaaaaaattgaagaactcttctggcatttaaaaacaattactcagttcagcagagaagtcactgacaaacgagatcacactgactgctttgtcgttttggttttgtcttactcattaatgcaaataagaacattcactagcatctgtgtcgggcctaccctccctggtcaaatacagctacagtctccctgcagatacgagttttccagaaatgagccgatgttttctgcgagaatcaattggtcatatacaatttacaaaaatgagtactgtatactatatttgtaaactgtacactgcagatgctttatttcactgaaatttataatacacttatccatgtatatgcatgcatgcatttttgttcctgagatccagctgtgaaatgtttaccagcacataaattaccagcacatgctcttttttgttaacctactaggtaaaatcttcatttattacatca

SEQ ID NO: 361748 - DNA, 260 bp, Homo Sapiens
tggagccagagtggaggaatgagctctgaagacacagcacccagccttctcgcaccagccaagccttaactgcctgcctgaccctgaaccagaacccagctgaactgcccctccaagggacaggaaggctgggggagggagtttacaacccaagccattccaccccctcccctgctggggagaatgacacatcaagctgctaacaattgggggaaggggaaggaagaaaactctgaaaacaaaatcttgttctatgaaaa

SEQ ID NO: 361749 - DNA, 302 bp, Homo Sapiens
cctgagtaacttgtactcatccttcaatactccaactgaattttacttaccctgaaaagatttccatggctatccaccacccccctgcctgtgagactgagttaggtgccctttttcatgtctttcccccatcacggcacttaccatactgcgttgtaattgcctgtgtactcgtctgtataactactagactgtaagctccttgagggcagggactgtgtctatcttgttcacagttgtatccccagcacccagcacagtgcctggcatattgtaggtgcttaataaatatttgttgaatg

SEQ ID NO: 361750 - DNA, 357 bp, Homo Sapiens
  misc_feature (32)..(32): n is a, c, g, or t
tgagtgtctgaagttcatcatgccacatttcncagtgtaaagaagttcagaactaaatggaatgatttaaattcttgacttaaggagaccagcagctttgataatgctgccaaattatcctcacagtatcagaaagaaaaaattgacctaaagacttgcgctgtaagaattaaaacagcagaagcagaagctaccctcacctccccatcacttgtctgccctgaagcaggacataagaccctcatttgagaggtgcccttccttatctctgaagacaaaggaacattcttatctctgaagacataggaacatcgagaagaatggagtatgcttatctatgaagacatgagaacacag

SEQ ID NO: 361751 - DNA, 501 bp, Homo Sapiens
cttcagtggggtgaagttaaactaataagcaactgctctaagttttacggaaatcgtttctatgaaaaagaaatggaatgtgcaggtacatatgatggttccatcgatgcctgtaaaggggactctggaggccccttagtctgtatggatgccaacaatgtgacttatgtctggggtgttgtgagttggggggaaaactgtggaaaaccagagttcccaggtgtttacaccaaagtggccaattattttgactggattagctaccatgtaggaaggccttttatttctcagtacaatgtataaaattgtgatctctctcttcattctattctttttctctcaagagttccatttaatggaaataaaacggtataattaataattctctaggggggaaaaatgaagcaaatctcattggatatttttaaaggtctccacagagtttatgccatattggaattttgttgtataattctcaaataaatattttggtgaagcata

SEQ ID NO: 361752 - DNA, 1342 bp, Homo Sapiens
  misc_feature (1205)..(1205): n is a, c, g, or t
aaaatgcaatttgcagtggttagaaatgacaaaggatgggtggtaggatccagagaaaaaacagtgaaacccgatggaccttaaatagatctgagggcactgatttgattattttgggtgaaatcttttaagaaaatcttgtcagattcttcacagaaaatttggtaaagcctatatttcatcgccagcctagcaaaggcaagctggcaaacagggaaacaaggagaactgtgtgctcagcccctccaagagtggcacggattatgaggaggtgatggtccttccccgccaagatcctgagacactgtcactccggaatccaaaaagagattcagataccatgaaaggatttgagcgtttttttatgtgaatccaaagatgacatttacaaaaggtggagaagcagttccctactgagggacgtggatacaaaaagcagatgacacaacacatcccatagagttcccagggaagaatgaacccagattcttgacctgcagaggtggcgtactggctggagaaatctctggctggcgaccgtgctattctgtctgtccacctaactgtgggctcccagatcaccactgccatgggcagggggccgtggggtgggcctgcttggggtgacaggctagctgtgctcccatagcagaggtgggagaagggaatcacatctggtgagcagctatgtcgtgccaggcactgtgctgtgtattgcacacatctcaaaccttgtgacaaatgtgtaagatattttttatgtattacaaatgaaggaactgggctcagaaaagctccattatttgcccaaattgcagcagtaatgcaggaatttgaatccacattaatctgactccacaacccatgttctttcactgaattcccatatccttgttccccctactgtcctcactggtcaaggtgagcttggtcttccacaaacaggctagaaaagtatgcttacttatctttagctttatgcttttaaactaattcttaaaaatcttctctggataagtcaaagacaatgggaatgtgtatttctaatacattaattataatacattaccggtttacacaatgccatcaccttgtcattttctttgacacaacgtccccctcccctctagtttataaatgaggacattgaggcacaaagtgggtaagtgacttgcccaagggggagatttgtccaatcataaagntgggcctgaactttttctactttgcattcttacttgaaaggcaggaaacatatgctcaagagggagatctcacgaaatttcatgtcatatagtgctctcgctaatttaatcctggtcattcctggttatatcccttt

SEQ ID NO: 361753 - DNA, 511 bp, Homo Sapiens
agctgctccaggggctgccaggactgctcactctgcagagccaacgggcttgccaggccgactgcagcagctccagcttccagttgccttagggacagagacaaaggaaatgaagagacctcagacatcttttccctccctctctctttcagcagggagctagcaggacactaggaccagtctgtgggatagaatgaacttaatgggggacggaagggggaggagtgctcaacggggagggaaatgatctatgactccaaccgtatgattttcttgcctccccagttttcatcccagtggtaacgcctgatttttggtagctatgccatcttctgctgaggattaccattactgggtgtatcaccccagtacttccaaatgcctctcctctattgattcagttgttattgcagtgtctgcttcatccgtggaacttgaggctcagatgccccctgctctgtaaccctggggaatgtcagaggcaggtaataaaggttgtttaaccaataaa

SEQ ID NO: 361754 - DNA, 2019 bp, Homo Sapiens
  misc_feature (734)..(734): n is a, c, g, or t
  misc_feature (1176)..(1213): n is a, c, g, or t
  misc_feature (1332)..(1383): n is a, c, g, or t
  misc_feature (1510)..(1581): n is a, c, g, or t
  misc_feature (1620)..(1620): n is a, c, g, or t
  misc_feature (1814)..(1814): n is a, c, g, or t
  misc_feature (1846)..(1846): n is a, c, g, or t
gggaaattgggaatatatctttacaatgattgataccatggtatattgactcttagatgctattgatctgtagcaccattttttacaaacgactaaggaaaaaacctgccaattaaatcatgatatgccatcaattatgagacatcccaatttgagagatgttagattatagaaaagtatgcatttatgactgaaatggtagtggaattatttgaattctacaccaagcacttaccatgtgccaggccctttgcagagtgctctactgaccaagaaagttgttgctgccacattatagatgtggagcctaagggtcacagaaattgtgtgctatgccaaaaaacattgaactggtagatagaaaatgacagagctaggattcaaacctagatctggctgactccagagcctagttttacctgggattataggcataagccaccatgccctgccctaagtaactgttacttgagttaatgtactagttaattgacccttagaaaattatatttttctgcttgcaagtcttcattaaagaaggaaattttaaaatattttatagtataatgctatccaaactcatttttaaaaacattttattatggaaattttcacaaatgcacaaaaagaatagcagaatgaagctctgtgtacccatccctccaacagctgtcctggtggtcagtcttgtttacctgcatccccaccctatcccctgccccaacccacaaggnatcagttttgagtcccattaacaggcatagtattttcatgtttgtgtgatcagagacattcaaatataactccaaagatagggtacttttttgaacataaccacaataccattgtgtaagactgctaaaacattttttgatgccaagtaccagtcaatattcaaacttcctgattgtctcgtaagttttttttaacagttggtttattcgagtcaagatccaggcaagatctagatcttgcattttgttaatataatctatagatttaactttcctgtttttaatttttgaagaaactaagttgtttgtcctatagaattgtccttcagtggattttactgaatgtatcctaatgggatcatgtacaccttttctgtcccctatatgttctataaactgacagatctagagggcttctgttgttctgttttgctttttcacnnnnnnnnnnnnnnnnnnnnnnnnnnnnnnnnnnnnnncacatcacggcacataatgactctcatcttgcaccattacgattgataagtgggttcggaagataacaaaaaagcacaataccgcgcaaaatatactctaataactgaaacgcagaagnnnnnnnnnnnnnnnnnnnnnnnnnnnnnnnnnnnnnnnnnnnnnnnnnnnncttcgggccacggcacttctcgttgcctatctcagcgccacacacaccttgtgcgcacacccccagcacaaagattaatattaactacgactaacacatcagagctacgttataggggcggcaagtnnnnnnnnnnnnnnnnnnnnnnnnnnnnnnnnnnnnnnnnnnnnnnnnnnnnnnnnnnnnnnnnnnnnnnnnaaaaaaatccgggggcgggggtgacaaacaacaataccngagacaataaatcaaaactcagtacacaccaacacccgctctacgcttataatatattaatactcgaaatacttcttatagcactcataaaaactgagaggagagcaaatgaatatttgaccttttatcataccgtacctacaacgaaggaaactagagcaaacgtcgacaactccaaccaaagaaggacacanctattcaaacacaaaagacaccacacaaccanacaaatacttaaagcgaagtcaaatatacaataacaaagacgccacatatatacgagacgacaacaacagagagatacccattcactcgcaccgataatacgtataatacgacataaactagactcacatattaccgctagctatatcaaaccgacagcggacaaaggagaat

SEQ ID NO: 361755 - DNA, 567 bp, Homo Sapiens
ctctaatagagtcacagctttcccaggtataaaacctaaaattaagaagtacaataagcagaggtggaaaatgatctagttcctgatagctacccacagagcaagtgatttataaatttgaaatccaaactactttcttaatatcactttggtctccatttttcccaggacaggaaatatgtccccccctaactttcttgcttcaaaaattaaaatccagcatcccaagatcattctacaagtaattttgcacagacatctcctcaccccagtgcctgtctggagctcacccaaggtcacccaatgttggcctgtcagagcttgattagaagccaagacagtggcagcaaaggaagacttggcccaggaaaaacctgtgggttgtgctaatttctgtccagaaaatagggtggacagaagcttgtggggtgcatggaggaattgggacctggttatgttgttattctcggactgtgaattttggtgatgtaaaacagaatattctgtaaacctaatgtctgtataaataatgagcgttaacacagtaaaatattcaataagaagtca

SEQ ID NO: 361756 - DNA, 1662 bp, Homo Sapiens
  misc_feature (40)..(40): n is a, c, g, or t
  misc_feature (67)..(67): n is a, c, g, or t
  misc_feature (85)..(85): n is a, c, g, or t
  misc_feature (91)..(91): n is a, c, g, or t
actcactgcatttggggcctttcccattggtctgcatgtnttttatcattgcaggccagtggacagngggagaagggagaacagnggtcgncaacacttgtgttgctttctgactgatcctgaacaagaaagagtaacactgaggcgctcgctcccatgcacaactctccaaaacacttatcctcctgcaagagtgggctttccagggtctttactgggaagcagttaagccccctcctcaccccttccttttttctttctttactcctttggcttcaaaggattttggaaaagaaacaatatgctttacactcattttcaatttctaaatttgcaggggatactgaaaaatacggcaggtggcctaaggctgctgtaaagttgaggggagaggaaatcttaagattacaagataaaaaacgaatcccctaaacaaaaagaacaatagaactggtcttccattttgccacctttcctgttcatgacagctactaacctggagacagtaacatttcattaaccaaagaaagtgggtcacctgacctctgaagagctgagtactcaggccactccaatcaccctacaagatgccaaggaggtcccaggaagtccagctccttaaactgacgctagtcaataaacctgggcaagtgaggcaagagaaatgaggaagaatccatctgtgaggtgacaggcaaggatgaaagacaaagaaggaaaagagtatcaaaggcagaaaggagatcatttagttgggtctgaaaggaaaagtctttgctatccgacatgtactgctagtacctgtaagcattttaggtcccagaatggaaaacaaaaatcagctattggtaatataataatgtcctttccctggagtcagtttttttaaaaagttaactcttagtttttacttgtttaattctaaaagagaagggagctgaggccattccctgtaggagtaaagataaaaggataggaaaagattcaaagctctaatagagtcacagctttcccaggtataaaacctaaaattaagaagtacaataagcagaggtggaaaatgatctagttcctgatagctacccacagagcaagtgatttataaatttgaaatccaaactactttcttaatatcactttggtctccatttttcccaggacaggaaatatgtccccccctaactttcttgcttcaaaaattaaaatccagcatcccaagatcattctacaagtaattttgcacagacatctcctcaccccagtgcctgtctggagctcacccaaggtcaccaaacaacttggttgtgaaccaactgccttaaccttctgggggagggggattagctagactaggagaccagaagtgaatgggaaagggtgaggacttcacaatgttggcctgtcagagcttgattagaagccaagacagtggcagcaaaggaagacttggcccaggaaaaacctgtgggttgtgctaatttctgtccagaaaatagggtggacagaagcttgtggggtgcatggaggaattgggacctggttatgttgttattctcggactgtgaattttggtgatgtaaaacagaatattctgtaaacctaatgtctgtataaataatgagcgttaacacagtaaaatattcaataagaagtcaaaaaaaa

SEQ ID NO: 361757 - DNA, 433 bp, Homo Sapiens
  misc_feature (17)..(17): n is a, c, g, or t
ctcccctcaacccccantgccctgtcctggagcctccaccccaaggtccacccaaacaatttggttgtgaaacccaactgcccttaaacccttctgggggaagggggattaagcctagacctaggagacccagaagtgaatgggaaagggtgaggacctccacaatgttggccctgtccagagccttgattagaagcccaagacagtggcagcaaaggaagacttggccccaggaaaaacctgtgggttgtgcctaatttctgtccagaaaatagggtggacagaagcttgtggggtgcatggaggaattgggacctggttatgttgttattctcggactgtgaattttggtgatgtaaaacagaatattctgtaaacctaatgtctgtataaataatgagcgttaacacagtaaaatattcaataagaagtc

SEQ ID NO: 361758 - DNA, 283 bp, Homo Sapiens
ttttttaatcttaaaagaagttttatgggtatagatttaagaaaaacaaatggcaacttccagcaactggtatcagattaaactatagcttacattctgtgtttaaagacataaatctgtctgttcatatgttggttatgacttttacattaaaatatcatttaaacgaatgagcaatcagtagtataaacagagttacaactaaatttggataaaaatgttcaataattaactctagcacgtatacaaaattagaaagcctatccaagcacttagtaaaaca

SEQ ID NO: 361759 - DNA, 674 bp, Homo Sapiens
catctgaaaatgctttactctgactatgtgctattgggttttatttccagaaaatatagttctccttttttctgcatgaaggatacatcgtggtgccacatgctttaagcaatttaaacaagagagataagaggaaaatgcaaccaccacatctgacttgcccaatgtagactttcctctattagattgaagtacacaacctaatatgatatattattttgtagtatctcagactttgtaaataaataccattatttttatatggaaattttatagaagagctatttctgtatacgtaattactcctgattttctgaaattgcttctggtagataacagacaagtcctaagcagtgttccactaagggtggttccaggcctgcctgccgtggagttgactgggggaattttacagttttgcgatcctaggatgcgtcccagacgctcagtcagaagtgctggaggtggggcctgggaagctgtatttgtaatgaactctggtgttttttgtccattaaagtgtatctttgtccatcctataagattaaaggaaagaaaaagcatctcaaatgagtgtaagttgttcttgagaaaaaaatgtatcagacttttatgatttgaatgaaatgtattatagaaaaaaataaacactttaaaataatgttagtctcatt

SEQ ID NO: 361760 - DNA, 1080 bp, Homo Sapiens
  misc_feature (524)..(588): n is a, c, g, or t
gcccagattttctgtttccaaggagcaggggtgagcaggcaggctcccctccgagtcctggagtccctggatttaggaagatctgatgggctctaccagtgcttactgcagccttgtgtccaccaccaacttctcaagcatgtttctctccttggaccttgggtttccaactctgcagccttcaggtctggggccaggagtgggacccaccatttgtggggaaagtagcattcctccacctcaggccttgggtagatttggcaaaagaacaggagcagcataggctgtttgagctttggggaaatgaactttgctttttatatttaactaggatacttttatatgatgggtgctttgagtgtgaatgcagcaggctctcttgtttccgaggtgctgcttttgcaggtgacctggttacttagctaggattggtgatttgtactgctttatggtcatttgaagggccctttagtttttatgataatttttaaaataggaacttttgataagaccttctagaagcnnnnnnnnnnnnnnnnnnnnnnnnnnnnnnnnnnnnnnnnnnnnnnnnnnnnnnnnnnnnnnnnnttttccaagccccaccccttttgccctcagaaagagtctcagccgttgttgtcccggaagaaagcgttccatatagaaatttttagtggggaaaaattaagggcccagagtggttcgcctcaattcccctcttttattaaaacactataaccgccgtggtcgatcagaatatacaagctgtggagaagagaagacccattcccatctctattggaaagggtgcgtggagaaattcattacaagagggacactttctctccagagagaccatataagccgctgttttgtgcgggaacacactttctctcagagagagaaaacaactctgtgtgccaaagactctttctctccaaatgtaaggggggcgctcacccagagtgtttggacaacatgttgggcgttgttttccccccctcttgagagagacacccctgtggcgtttaagagagagtggggctctcaccatttttcaaaggggcgcgacaaccctgt

SEQ ID NO: 361761 - DNA, 554 bp, Homo Sapiens
taaatgcacgtatgcaatcttttattcctcttgttttatggataagagatttgttcaggtcaaaagttgcaaaactgttctgaagcttaatattagagacccaagtaagattgtttttagtcttgcttgaggaatgcacactccatttaaaaaattgtgcgctctgtagatttggattttacagcagcaattacttggctaaattagagtactgcaatcttgtaagtagaaaacagccaccatgacaataaacaaaaacacttaaaaatatttttagcttgttttacctacatctagtttcatttcatcttgctttgctttgttgactctgctaccgctgatgtttgccttgtcaatatcagaataggggcatcagtgtcccgtgaaatacattttgttgtgctatgagcctctgtaatcaaatgcttgtactcagaagagagtgtaaaatcagcatttctatgtaacatatatctctaattatctgtgtaattttataacatactttgacaaccccagtgagttacttaataataaagatcttaaaataatgc

SEQ ID NO: 361762 - DNA, 441 bp, Homo Sapiens
ttttttatacttcccaaatattttaattttgaaatagatatacttaatggctgatgacccagtatctttggtgtcctctaaccacattagcattctataatttcaaatgaaatctatactttaaaaacaattaatgtcaaattttgtcataatatctgactttcaggccaacttttaatgttagtacaatttaaaataaaaagtcattaacattttaatgtaatactgaataattctctgtggaatttatcttttacatttttttccttttaagcaaaaagagatttacagtttataatggtaaagactctactacttcagaatcaaagccaaatcaatattacttaataattcagggaaaatttagataaaatcactagacaacggtaaactgatattcttatctactcataaaattatttttgaattgcaaacgaaccg

SEQ ID NO: 361763 - DNA, 1386 bp, Homo Sapiens
caacaaactgccgttgtcccgcgggccgtgggcccggcacactggggctttgtccggccccccgccgcgacccgaggcgggggccccacatgaccgaaggggtaggaggagcctgcggcggcggcggtggcagcggcggctccaccaccatttccctcccgggccgggggtcggcgggcggtggcggtggctgggcagggctgggcagggccgcggacgccaggccccccgttccccgccaggctgcaggcgtcgggcctgggccgtcagggcagctgtgaccggatcgcttcccgggcggcgagctgggggtgcacccggaccgccgcccccgggatcatgggcaatggcatgaccaaggtacttcctggactctacctcggaaacttcattgatgccaaagacctggatcagctgggccgaaataagatcacacacatcatctctatccatgagtcaccccagcctctgctgcaggatatcacctaccttcgcatcccggtcgctgatacccctgaggtacccatcaaaaagcacttcaaagaatgtatcaacttcatccactgctgccgccttaatggggggaactgccttgtgcactgctttgcaggcatctctcgcagcaccacgattgtgacagcgtatgtgatgactgtgacggggctaggctggcgggacgtgcttgaagccatcaaggccaccaggcccatcgccaacccaacccaggctttaggcagcagcttgaagagtttggctgggccagttcccagaagcttcgccggcagctggaggagcgcttcggcgagagccccttccgcgacgaggaggagttgcgcgcgctgctgccgctgtgcaagcgctgccggcagggctccgagacctcggcctcctccgccgggccgcactcagcagcctccgagggaaccgtgcagcgcctggtgccgcgcacgccccgggaagcccaccggccgctgccgctgctggcgcgcgtcaagcagactttctcttgcctcccccggtgtctgtcccgcaagggcggcaagtgaggatgcagtccagccgtggctccccacttccgactggctcccttcgggggctgtctgcgccttccacgccccccaggacgggcccagaggctgggggagccccgcggcggcctgaaccctgcctcccgcgcccgccctgctcgtccgcgtctgcagtcaacgtccccaacctgtgcgtctctgtggtccgggccggcctgctgcagccacctggggccttagtccttgggctgggggagggggcccacccttaaaggcggcgggaggggagggagggagagtggagggtttgacgggcctggagggtattaaagagacacagaagaagctgcctgtcaaa

SEQ ID NO: 361764 - DNA, 1169 bp, Homo Sapiens
  misc_feature (995)..(1012): n is a, c, g, or t
  misc_feature (1014)..(1014): n is a, c, g, or t
  misc_feature (1017)..(1017): n is a, c, g, or t
  misc_feature (1019)..(1019): n is a, c, g, or t
gggacagcctgcggcgcagcggaggcggaccgcagtcgagtctgcagagtgttgggtctgtagccagcaaattacttcatcatctagattatccattcagttgatcctaattagcaaggataacaagaatcgtccgcactaaagtcccctgcagcgtgaccatgtcgagaccccggaagaggctggctgggacttctggttcagacaagggactatcaggaaaacgcaccaaaactgagaactcaggtgaggcattagctaaagtggaggactccaaccctcagaagacttcagccactaaaaactgtttgaagaatctaagcagccactggctgatgaagtcagagccagagagccgcctagagaaaggtgtagatgtgaagttcagcattgaggatctcaaagcacagcccaaacagacaacatgctgggatggtgttcgtaactaccaggctcggaacttccttagagccatgaagctgggagaagaagccttcttctaccatagcaactgcaaagagccaggcatcgcaggactcatgaagatcgtgaaagaggcttacccagaccacacacagtttgagaaaaacaatccccattatgacccatctagcaaagaggacaaccctaagtggtccatggtggatgtacagtttgttcggatgatgaaacgtttcattcccctggctgagctcaaatcctatcatcaagctcacaaagctactggtggccccttaaaaaatatggttctcttcactcgccagagattatcaatccagcccctgacccaggaagagtttgattttgttttgagcctggaggaaaaggaaccaagttaactgagatactgctgctggaatgggcgagacattgctgcaaagaagtcaagcttttttcagacaaaaggtgtgagggggcttgcttggtatgcttacctgggcttgtgtacctcagtggtttttgtgtacttttttcaataaaatatcaaagttggnnnnnnnnnnnnnnnnnnanaananaagggccggccgcctctagagtatcccctcgaggggcccccaaggcttacgcgtaccccagcttttcctggtacaaagtgggcccctataatgaagccgaattattagcctaaggcactgggccgctcgtttttacaaccccccggaact

SEQ ID NO: 361765 - DNA, 869 bp, Homo Sapiens; identical to SEQ ID NO: 178069

SEQ ID NO: 361766 - DNA, 1043 bp, Homo Sapiens
attcggcacaggtgtagccagcaaattacttcatcatctagattatccattcagttgatcctaattagcaaggataacaaggtaacacaaggcttacttatattcacccaacaaaagtgtctctgtggagccacttcccagtgaactacatactgagataggggttcctggatgagaaggaccaaggacagaaccgagaagagtttaggggcaggttatgcgagatggaaatggcgcagataacggagggaaggatttgagggctcaaacgtaggcgtctgtgtttcgcaaaagttggagacgttctaggctgcctctcgttgcctccatctcgctctgcgcgggttttgggaggacattagcattctttcttgtatctccgttgattccagaatcgtccgcactaaagtcccctgcagcgtgaccatgtcgagaccccggaagaggctggctgggacttctggttcagacaagggactatcaggaaaacgcaccaaaactgagaactcaggtgaggcattagctaaagtggaggactccaaccctcagaagacttcagccactaaaaactgtttgaagaatctaagcagccactggctgatgaagtcagagccagagagccgcctagagaaaggtgtagatgtgaagttcagcattgaggatctcaaagcacagcccaaacagacaacatgctgggatggtgttcgtaactaccaggctcggaacttccttagagccatgaagctgggagaagaagccttcttctaccatagcaactgcaaagagccaggcatcgcaggactcatgaagatcgtgaaagaggcttacccagaccacacacagtttgagaaaaacaatccccattatgacccatctagcaaagaggacaaccctaagtggtccatgaagagtttgattttgttttgagcctggaagaaaaggaaccaagttaactgagatactgctgcttggaatgggcgaaacattgctgccaagaagtcagcttgtgtcagacaaaggtgtgaggggtttgtgtgacgtga

SEQ ID NO: 361767 - DNA, 501 bp, Homo Sapiens
ttttagaagacagaagaactgttgggatttggttttcagaaaggcgcaggccacaacttcaaaatgatgtaaatgccacagatggctgcctctgtccatgaagacagacggtttgatgtctcatccttgttccagctgtttgatggagcccaggaaagaactctctccccagtgcaactccatccaccacgttgaggccagaggcctctgaaatgtgccacagaagccagattccaaatgggctgcaatttgctaagcattacagctatttcattctgctgtacaagcttcagtacaagaagaaaaactatcaatcactaccataacaaacacatatttctaaaatagaccctcctgtctggaagctgtaggacagacacttgcactcaaagtaaatggagtttagggtcatcattgtggtttagtgctcctgtacctttatgatgcatgataaatgatcaactggaatctgctaaataaatatttttctatgtagatctc

SEQ ID NO: 361768 - DNA, 774 bp, Homo Sapiens
  misc_feature (229)..(267): n is a, c, g, or t
  misc_feature (756)..(756): n is a, c, g, or t
agtttctagatgcactatatttggggttgttcaaaatagtttttcttaaaactataattaaacatgaaaaaactttaaagtggtttaaaggtattaaaatataaacatttgaataatgctaaaaatgagaaaaatacagttaccattaattttttttaaaaccaagaataagtacttgataagcaactaaatgagtaaacagtacttatttgacagaaaatatggggannnnnnnnnnnnnnnnnnnnnnnnnnnnnnnnnnnnnnncacgataatgccatatggctggaagttaagggaatttcctaaccacaaggtccaagagtttggattaataatgggcaggaaaagcttcattaacaagagaacagagaacaaaaagcgcacaaggaagtaaaacaaacagatagttctatatagcaaacactccatgtctgccccatctactgtaactcaagttgatgacaggggctgacatgaccgaagaacttacaatcactgaaatgtccaaaagacaagagcaagaggcagaaaaaagaagcaaggggcattaatagttcttacactataaaatcagcccctacattgtcagaattgtcctgtattttcatgtcatccttgtcacaacccactgtgttttctttatacaggtagctttgctcactttagcacaaatattaaagtcaagtacaagcatatactcatttgcatagcaaattttaaagggtgcattgaaatagtaaccaatgataaagngtgtaagtcatttttata

SEQ ID NO: 361769 - DNA, 391 bp, Homo Sapiens
gggccagggccaaaggggaaggccctggattctcactcatgtgagatcttgaatctctttctttgttctgtttgtttagttagtatcatctggtaaaatagttaaaaaacaacaaaaaactctgtatctgtttctagcatgtgctgcattgactctattaatcacatttcaaattcaccctacattcctctcctcttcactagcctctctgaaggtgtcctggccagccctggagaagcactggtgtctgcagcacccctcagttcctgtgcctcagcccacaggccactgtgataatggtctgtttagcacttctgtatttattgtaagaatgattataatgaagatacacactgtaactacaagaaattataaatgtttttcacatcaa

SEQ ID NO: 361770 - DNA, 2294 bp, Homo Sapiens
  misc_feature (1099)..(1120): n is a, c, g, or t
  misc_feature (1369)..(1388): n is a, c, g, or t
  misc_feature (2143)..(2153): n is a, c, g, or t
aaattagcagcagtgatgtaatatcaccctgaaataccaggagcagaggtgccccagagtgcttcacagctatgatcaggaaacttgacctgccccattgctacagcaacggcataaggactaggaaggtccactagctggggaggtcttggaaccctccgagccagaaagaagcattccagcatgattcctcagatgcaatgaggaaggtttacagaattttcacagggcaacagagatcaagtggtatgaaaaggtaggagttttaagctcaagtctcaaagataacctacctttacattctcagtcagaatttgacccagaaagaggaagtttcttcaggaacagaccgtacgttgatgaagtagaagtcatttcagtaaaaacggagtacagaacttggtcataatatcttgcattttatagatttattaaagattagttttcaagttcacattcgctattcagttgtaaaccgaatggatgggaggggagaaaatacaagctctccacacaggtatgctcctctcttttctgagagagaaggcatgggattttcagcataaattccatgttatgtgagtgctgtttgagttctgaagttcctatcaatatctgttcctgcaagtgatctctgtaagaccaccttacatgctggtcttagttattgttaaaattgcaaggtttcttcacaccctctttgataagaagtgtttagctggcagagctttcccttgacttctgagtctagtgtgggttgggcccatgacagtgggaagaaatcccacatgttaccatggagaccttgtatgtaaacaaactctgtagcctttgaaagtggaactgcctttttacagttaaagggctgctaaatggcttgcagatgagatcttctggctcaccttgatcttcacatgaacccattgtgacctatctggatttcctaggacctgtagtttccatttgggttatattagtgcctcaggaatgtgtcactactggtcaagcaatactcagaaattcaggctgtgaggggttagattagaggaaagtaatttaggtgagctatccagagctttcaacctcagggtttataggnnnnnnnnnnnnnnnnnnnnnncccttaggacttctcatactctagccctgaccttgcagtctcctctgaggggcctcctaagacccttaaaataatattacaataggactttgagtgtgcatttcacagtggaaatagcctctggctagcattacttccaaatgctagttccagctaaaaacaagtactttttattagtttcttgtctttcaacattctgccatcaaaatatattcattttattaacttaccgattattgggaacctgcnnnnnnnnnnnnnnnnnnnncacacatgcgtgtctgcagccactgtttggttatttttgatagtttaagagaattataaatcaagttgttctgtctactagagtcagaaattctgtgctagaatgggacttctaaaattaggtggtcctgtcactttctagagaaagacccaaattcataggtttaagtggcttgtctgacatacacatacagccagttagtaacagaattcagaatagaatagagttcttttttttctgtcagtccgttgttctacttctctttccttttcttcatggttgagcagcttttggcaaaatgtgttccatatagcagtagttccaagagatgttaatagatgtaagaaaaaaagtgtgtgtgtgttgggggtgggggattgcatggtcaattaaaatgaaggaatgctgagtttgtttccttactgtaggacttctaagagttttgaacatgctattacacattgtgaatttataaaaggggaccaacactggtttgaccttaaactgcactcccccttctttattcctcagagcctctcaaaggactacagggtccttttggaaaacatggcccctggattaagtttacaacttctttgaagaaaaaatccctaagggaaaaacctgaatggcattctataactgggggaaccattggaatgggggtaataaaactctggaagtccccaaaaaccaggtatattttgctgtttacacgctatactttaaggggtataaaaattctttttcccccnnnnnnnnnnnaaaaaacccgcactctgggtctacaaatttgccaggtctttgtagacggcgcgatcataagtggcgcaaacacaacggcgggcaccgactcgtaacattgaacccgtctaatcacattcttgcgggcaagcccctctctaa

SEQ ID NO: 361771 - DNA, 914 bp, Homo Sapiens
  misc_feature (30)..(30): n is a, c, g, or t
  misc_feature (52)..(52): n is a, c, g, or t
  misc_feature (76)..(76): n is a, c, g, or t
  misc_feature (103)..(103): n is a, c, g, or t
  misc_feature (117)..(117): n is a, c, g, or t
  misc_feature (130)..(130): n is a, c, g, or t
  misc_feature (140)..(140): n is a, c, g, or t
gaacaataccgtgtggaaaaaccttgtatnttctccccctccccagccaatnggtttacgaactgaaatagcgaangtgaacctgaaaactaaacctttaaanaaacctataaaagncaaagaatattangacccaagtnctgtactccgtttttcactgaaaatgacttctacttcatcaacgtacggtctgttcctgaagaaacttcctctttctgggtcaaagtctgactgagaatgtaaaggtaggttatctttgagacttgagcttaaaactcctaccttttccataccacttgatctctgttgccctgtgaaaattctgtaaaccttcctcattgcatctgaggaatcatgctggaatgcttctttctggctcggagggttccaagacctccccagctagtggaccttcctagtccttatgccgttgctgtagcaatggggcaggtcaagtttcctgatcatagctgtgaagcactctggggcacctctgctcctggtatttcagggtgatattacatcactgctgctaattttggtagctctaaagtattctcttaaagacctctaagaacctgatatttatgctaataattacccagcaagaaacattagctgtagttttttgcaatatcactttatacagctaaaatcactttgtatatgtatagtaactcattgtatatatttgtctcttatgaatatgtgctaattacatctataaatcaaccagtatataattaacaaaaacaaatgattttttagccttttaatgcaaaaaatttaaatttagtattacatatgatctggctaagagcaagaggccttcttatgagtgatctccatcaccctgtacagtgcctggcacagaatctagagtttagccaactctcaacaaatgttttagtgcc

SEQ ID NO: 361772 - DNA, 312 bp, Homo Sapiens
  misc_feature (248)..(268): n is a, c, g, or t
gcaggttcccaataatcggtaagttaataaaatgaatatattttgatggcagaatgttgaaagacaagaaactaataaaaagtacttgtttttagctggaactagcatttggaagtaatgctagccagaggtatttccactgtgaaatgcacactcaaagtcctattgtaatattattttaagggtcttaggaggcccctcagaggagactgcaaggtcagggctagagtatgagaagtcctaagggnnnnnnnnnnnnnnnnnnnnncctataaaccctgaggttgaaagctctggatagctcacctaaat

SEQ ID NO: 361773 - DNA, 1864 bp, Homo Sapiens
  misc_feature (280)..(406): n is a, c, g, or t
tcttggccactgcactcttacctcccgggttcaatgattctcgagtggctgggattacaggcgcaaaccaccacgcccagctaattttgtatttttagtagagacagggtttctccatgttggtcagacttcatgtatgggaggagacaggggagggggagatgcaactcatcacatttttactgactgtcctctggctgtgcaagttatcttggaagggggactggaagaacagtaattcggagtctgggcttggcagttgggcaaatccaggtttacnnnnnnnnnnnnnnnnnnnnnnnnnnnnnnnnnnnnnnnnnnnnnnnnnnnnnnnnnnnnnnnnnnnnnnnnnnnnnnnnnnnnnnnnnnnnnnnnnnnnnnnnnnnnnnnnnnnnnnnnnnnnnnncgaaggtaattctatataaggtaaggcctccagcaagagctatggtggttgtgacactgactgaggctgggggaggccctcactcaccctccttccttcttggttttctcctaccaagatgtggcagtggatgggcagaactggacgtttgcttttgacttctccttcctgagccaacaagaggatctggcatgggctgagctccggctgcagctgtccagccctgtggacctccccactgagggctcacttgccattgagattttccaccagccaaagcccgacacagagcaggcttcagacagctgcttagagcggtttcagatggacctattcactgtcactttgtcccaggtcaccttttccttgggcagcatggtttaggaggtgaccaggcctctctccaagtggctgaagcgccctggggccctggagaagcagatgtccagggtagctggagagtgctggccgcgaccccccacaccgcctgccaccaatgtgctccttatgctctactccaacctctcgcaggagcagaggcagctgggtgggtccaccttgctgtgggaagccgagagctcctggcgggcccaggagggacagctgtccatgggagtggggcaagaggcaccgtcgaacatcacttgccagacagaagtcaactgtgtcgggaaggtcaagttccaggtggacttcaacctgatcggatggggctcctggatcatctaccccaagcagtacaacgcctatcgctgtgagggcgagtgtcctaatcctgttggggaggagtttcatccgaccaaccatgcatacatcaagagtctgctgaaacgttaccagccccaccgagtcccttccacttgttgtgccccagtgaaagaccaagccgctgagcatgctgtatgtggataatggcagagtgctcctagatcaccataaagacatgatcgtggaagaatgtggggtgcctctgatgacatcctggagggagactggatttgcctgcactctggaaggctgggaaactcctggaagacatgataaccatctaatccagtaaggagaaacagagaggggcaaagttgctctgcccaccagaactgaagaggaggggctgcccactctgtaaatgaagggctcagtggagtctggccaagcacagaggctgctgtcaggaagagggaggaagaagcctgtgcagggggctggctggatgttctctttactgaaaagacagtggcaaggaaaagcacaagtgcatgagttctttactggattttttaaaaacctgtgaaccccccgaaactgtatgtgaaagttgagacatatgtgcatgtattttggaggtgggatgaagtcacctatagctttcatgtattctccaaagtagtctgtgtgtgacctgtccccctccccaaagattaaggatcactgtatagattaaaaagagtccgtcaa

SEQ ID NO: 361774 - DNA, 616 bp, Homo Sapiens
caacatgaggctctctgctgccttttgttttcttaggttttgctgagaaacgggagtgcgttctgtgtcggtgtttgtgacgccctgagaccctgcttggcctagctaaagtccagaaggcctgggccccacagggcttggatgagggctcatgggcctgtacttcaggaggcctgagaggcccggtcagtcccatgaggctactcggcttggcccgcaggtcctccgaggcacagggcagagggacaccccagggacccatcagactcacgacacagagaaactcaagtggggtgccagggccggccacagaggccacgggcttcctgcctgtgaggagccgccctgtttgtctgagccctttggagatttaggttgagtcatgagaaccggtcattggaacatacactttattatgttacaaaaacaaaaatccccactgaaacacagctaaaaaaataacacattttcccaagattacattaccaaaaacagttgttatgtcattggagggcgtccattaatactgctcggagaagcacgatcttacacgaaaaacacggatgggatttcgttttcaccttaaagcattaaagtgctttaactggtaaaaaaa

SEQ ID NO: 361775 - DNA, 569 bp, Homo Sapiens
gtgaaagccacagagtttaaaaccatgaaagaagttgaaggcagcattcctcagctctgtgacttgtgaccctatttgaagtttcaggatttgggtgtcacaaaggattgtccctaatccttggccctggggtcttccgagtgagctggtttaatactctgagaatgagcagggagatccagagaatgaatccctgaccgcatcacctaaactgtcttccaaacatgagacaaagctgactgttcacactgattgcccagcacataccgtcttgccagtttcttcttttctcccagtctcctgttcatccattctgttctcccttggggtgggaatctatgatggaggttactggggaaacagctcagcagatttttggagaccaaaccaaaggtctcactaggaaatttatctgttttaaaacattgcttccttcctggctctgctaaattgaatgctcattgtttgttgttgttgttttttaattctaatgttcaaatcactgcgtgctgtatgaatctagaaagccttaatttactaccaagaaataaagcaatatgttcgtaatc

SEQ ID NO: 361776 - DNA, 616 bp, Homo Sapiens
tttgtcacctctttctttcttaggctttttcatctaaaaacagagggctctgaaatcatcactttccccaacctcattagccctgtctcactgtctgtcctgacttcagcctgcctccctctcccatgcgagacattgccaaccatcttcagggtgaccagtggcaaggccactgcagatgcctccccttgccccttggttgactaactccgcagaagtccctgcagtcggtggcagatgatttctaaaggctggggagcccaaaacatgagatctactgaaaactgagctatggcaccagtgggcctcctggagcaccctgctgggccgtggagccttaggcttccaaaggtactctggcccctggctgcgttgctgcacaccatggagcctggtgctgctgggggctctgcacagagcacgggatcagctccacgttgttaacctcaaatcgtaattgctgcctcataaaggggcaggtcctcccagccagctgcttctcacagcacaggactctccaggacgctgataactccttgtacttttttatatagacacatacatagagtttgaaaatgaaaatatgctgtgacttaataaatagaaactcctcaaa

SEQ ID NO: 361777 - DNA, 1359 bp, Homo Sapiens
  misc_feature (431)..(497): n is a, c, g, or t
atgcccagtgaccagtcactgaccctgtgcagaacctcctgaaagcgagctttgctgggagagggggtagctagcctgagagggaaccctctaagggacctcaaaggtgattgtgccaggctctgcgcctgccccacaccctcccttaccctcctccagaccattcaggacacagggaaatcagggttacaaatcttcttgatccacttctctcaggatcccctctcttcctacccttcctcaccacttccctcagtcccaactccttttccctatttccttctcctcctgtctttaaagcctgcctcttccaggaagacccccctattgctgctggggctccccatttgcttactttgcatttgtgcccactctccacccctgctcccctgagctgaaataaaaatacaataaacttactataaagatgnnnnnnnnnnnnnnnnnnnnnnnnnnnnnnnnnnnnnnnnnnnnnnnnnnnnnnnnnnnnnnnnnnngggggggggggccaacaaaatagtcccccagtagagggagccactcagacacaccgaccgctagcaccactacatattagcgtaaaaacaaagggcggccccacaaataggagagaggcgcatgaattaaacagacaagacgcacaggaggacaagcaaaaaaagaaacaatgtaagcagcgaggaaacaacgagtagaaagagcgaaaatcatgaggaacagacagaccaacctgaatcacaaaggcggagacgagcacaaaaagagtgagggaaccaaaacacacaccaacgaagcacttacaaaacgccccagcaggacaggaaacaagaaacagaacaaaacaacagagtactaaagcatggggtccaaccaaaagcaacagcagcaaactacacgacacagacacgaaacagacaaacaatgtcagccacaaccacggacaacatcaagctaactggagaggaaaccgacataatataccagcgcacgcgagaagcacgacctgaacaacaacgcccgatagcacacggaaacaatacaaacaaacagcagaacacagacggacaaaagaacaccgaaaaaaagacaaacgacacgcacacaaacacagcgagacacgaaagaccagaccaaacagaagacaagaatgagcaaacccaacaaagagagaggagcagagccgaaggacaaagacgaataaaaaaagacagggacaaacgaaagagacgaacagaagagcaaaagtaagacagagccgaagagaagaacagaaggtagcaaggaaccaacaaacaagagagacgaaagaaaataaggacatagagaagaaaaaacaagtcgaaaaagagagcgacaact

SEQ ID NO: 361778 - DNA, 921 bp, Homo Sapiens
ctgagcgcctctgcccaccagaacgtcacctaccactgctaccagtcagtggcctggcaggacgcagccacgggcagctacgacaaggccctccgcttcctgggctccaacgacgaggagatgtcctatgacaacaacccctacatccgcgccctggtggacggctgtgctaccaagaaaggctaccagaagacggttctggagatcgacacccccaaagtggagcaggtgcccatcgtggacatcatgttcaatgacttcggtgaagcgtcacagaaatttggatttgaagtggggccggcttgcttcatgggctaggagccgccgagcccgggctcccgagagcaacctcgtgacctcagcatgccattcgttcgtgagtgtcccgtgcacgtcctgatcctggacagtgaaggcttctccctcccctcccacctgacttcatctacgcctcggcaccacggggtgtgggaccccagcccggagagaacagagggaaggagccgcgcccccacctggagctgaatcacatgacctagctgcaccccagcgcctgggcccgccccacgctctgtccacacccatgcgccccgggagcggggccatgcctccagccccccagctcgcccgacccatcctgttcgtgaataggtctcaggggttgggggagggactgccagatttggacactatatttttttctaaattcaacttgaagatgtgtatttcccctgaccttcaaaaaatgttccaaggtaagcctcgtaaaggtcatcccaccatcaccaaagcctccgtttttaacaacctccaacacgatccatttagaggccaaatgtcattctgcaggtgccttcccgatggattaaaggtgcttatgtttttgtgagttttaagtaaatatttgtattgtattgttat

SEQ ID NO: 361779 - DNA, 306 bp, Homo Sapiens
taaaaagaaaagaaagttattagtgatgagagttttatactgcaactcttaataagtacaaggagtccatactttaagatacttgaaccacaaatagagccaaaatagctacctttgagagccgagatgaagattacaaggtgtaaaacgtctttaagcattgtaattagttactttccttataatttgtagaaaagaagtttgcaatcatgatcaagatacaattaattactccaaacttcatccaagaaattgtaggataaaagacagaaaggaaatctaaaattcattatctaagaaacttaa

SEQ ID NO: 361780 - DNA, 1057 bp, Homo Sapiens
  misc_feature (703)..(705): n is a, c, g, or t
  misc_feature (707)..(707): n is a, c, g, or t
  misc_feature (709)..(772): n is a, c, g, or t
  misc_feature (967)..(977): n is a, c, g, or t
gagcgggaaacgtaggctaggtacgaggccgggtgctgaattcggcacgagggatggcggcctccgtgtgcagcgggttgctggggccacgggtgctgtcctggagccgagagctgccttgcgcttggcgcgccctgcacacctccccggtctgcgccaagaaccgggcggcccgagtacgcgtaagcaagggggacaagccggtgacctacgaggaggcacacgcgccgcactacatcgcccaccgtaaaggctggctgtcgctgcacacaggtaacctggatggagaggaccatgccgcagagcgaacggtggaggatgttttccttcgcaagttcatgtggggtaccttcccaggctgcctggctgaccagctggttttaaagcgccggggtaaccagttggagatctgtgccgtggtcctgaggcagttgtctccacacaagtactacttcctcgtgggctacagtgaaactttgctgtcctacttttacaaatgtcctgtgcgactccacctccaaactgtgccctcaaaggttgtgtataagtacctctagaacaatccccttttttccatcaagctgtagcctgcagagaatggaaacgtgggaaaggaatggtatgtgggggaaatgcatcccctcagaggactgaggcatagtctctcatctgctattgaataaagaccttctatcttgaaaannnanannnnnnnnnnnnnnnnnnnnnnnnnnnnnnnnnnnnnnnnnnnnnnnnnnnnnnnnnnnnnnnngggggggccccgttctaaagtatccccccgaggggcccaagtcttacgcggaccccagtttttcttggaaaaagggggcccctatggggggccctaattataacctagggccctgggccgccgtttttacaacggccgggacggggaaaaactgcctacctttgggaatcttttgggaaaggaactttaccttcnnnnnnnnnnnacatattggggcacaactcccttacggaatatttaaacgctccaggggaaaaaacaatatttttaagggggaaaaggggt

SEQ ID NO: 361781 - DNA, 1670 bp, Homo Sapiens
  misc_feature (456)..(649): n is a, c, g, or t
  misc_feature (688)..(759): n is a, c, g, or t
  misc_feature (942)..(1062): n is a, c, g, or t
  misc_feature (1118)..(1129): n is a, c, g, or t
  misc_feature (1205)..(1205): n is a, c, g, or t
  misc_feature (1359)..(1367): n is a, c, g, or t
  misc_feature (1431)..(1431): n is a, c, g, or t
tgtttcccatcttccttttctggtttactatgattggatcctatggtaatgtttctgccttacttaccttttgtgggtgctttccgggtcttctcacctttgcgcactcccccgtgtccttgtatccctttgtaggtgatccctgcacatcgagtggagttgtctacgttcagctccctttcgacatcggagtagcgaatcctggtcttgctgtcctttgttccgttggctacctggcaagctcgcctcaggccctattgcgctcacgtagatgcttctttgttttggctgccatggcataagagggccttagcggacttccctgttggcctctgtacccatctttcttcctgatgtgcacgccctggatcctttggcctatcccagttcccaggcctgcagtttcgcggtctgtccttgtccaaagcgcaggtgctagacagtctacgacccacnnnnnnnnnnnnnnnnnnnnnnnnnnnnnnnnnnnnnnnnnnnnnnnnnnnnnnnnnnnnnnnnnnnnnnnnnnnnnnnnnnnnnnnnnnnnnnnnnnnnnnnnnnnnnnnnnnnnnnnnnnnnnnnnnnnnnnnnnnnnnnnnnnnnnnnnnnnnnnnnnnnnnnnnnnnnnnnnnnnnnnnnnnnnnnnnnntgccctcaagttgagataccagctggtctcagctagacnnnnnnnnnnnnnnnnnnnnnnnnnnnnnnnnnnnnnnnnnnnnnnnnnnnnnnnnnnnnnnnnnnnnnnnncaagctcagtttctcagtcacattagtcattcaagtgttcagacagccacatgaggggacagtgcagctacaggatatgccatcatggcagaaagttctattggttggacagtgttggtctatactgactcttatttctcagggagatcacagcaacctaaataaaccagataccttttctcnnnnnnnnnnnnnnnnnnnnnnnnnnnnnnnnnnnnnnnnnnnnnnnnnnnnnnnnnnnnnnnnnnnnnnnnnnnnnnnnnnnnnnnnnnnnnnnnnnnnnnnnnnnnnnnnnnnnnnnnncgcaccacaaaaacacttaagaacttcatctagagccgtgtcttctccccaataannnnnnnnnnnnccacaaaaagacatttactgaaacctcgcccacagagacctcggaaacgaatctcgcccataatacccacaggggncccaaacaaccttatatttacacattaccccgcccaaccgggggcatgaaagtccccgcgagctggttcgcctctacctttacagcactcccccccacaaaatggagaacactcacgcacctcgcggcgcgagtgaagaacccgaatacgcctnnnnnnnnntgtattaattaatcagggcctccctcccccccactatcccaaacactaacccccccgcggagangaggggggggagcactaaaaaaacatccttatagaattccgccccaacgctcacaaacaccagtatcccggtagtacaaacagacttcacactcgccgcaaaggggatcaacaccacaaacccccacaccccatcaggcgcaccaccctttatgacgaaacaagggggcgcagcgagatgtcttctcatcccacacccgcgccggcttatatattgcccgcaaatagctcctgcgggca

SEQ ID NO: 361782 - DNA, 836 bp, Homo Sapiens
ggggggcgggtcctgagtcgcgaccctggtccggacctgacctgaattgcgaccccaacctggactgctcccctgaccgcaacccctacccccgcccaccagtatggcccggcacgtgttcctaacggggcccccaggagttggaaaaacaacattgatccataaagccagtgaggttttaaaatcctctggtgtgcctgttgatggattttataccgaagaagtcagacagggagggagaagaataggattcgatgtcgtcacgttgtccggcacccgggggcctttatcgagagttgggttagagcctccacctggaaaacgtgaatgccgagttgggcagtatgtggtcgacctgacttcttttgagcagttggcactacccgtcttgaggaatgccgactgcagcagtggcccagggcaaagagtgtgcgtcatcgatgagattgggaagatggagctcttcagtcagcttttcattcaagctgttcgtcagacgctgtctaccccagggactataatccttggcacaatcccagttcctaaaggaaagccactggctcttgtagaagaaatcagaaacagaaaggatgtgaaggtgtttaatgtcaccaaggaaaacagaaaccaccttctgccagatatcgtgacgtgcgtgcagagcagcaggaagtgaagacacgtgcattcctgccttccgtgaaggagtgcccagttcaagaggagcctgatggagccctgcctgtcgaggctgtatgcctatggggttatggaaccttgtgggcttttctagagaaaactcaacagctgtttcccataaaatgtttaaagatcaa

SEQ ID NO: 361783 - DNA, 808 bp, Homo Sapiens
gcgcacctaggctaggtacgaggctgggtggtgaatcggcacgagggcgacccaacctggactgctcccctgaccgcaacccctacccccgcccaccagcatggcccggcacgtgttcctaacggggcccccaggagttggaaaaacaacattgatccataaagccagtgaggttttaaaatcctctggtgtgcctgttgatggattttataccgaagaagtcagacagggagggagaagaataggattcgatgtcgtcacgttgtccggcacccgggggcctttatcgagagttgggttagagcctccacctggaaaacgtgaatgccgagttgggcagtatgtggtcgacctgacttcttttgagcagttggcactacccgtcttgaggaatgccgactgcagcagtggcccagggcaaagagtgtgcgtcatcgatgagattgggaagatggagctcttcagtcagcttttcattcaagctgttcgtcagacgctgtctaccccagggactataatccttggcacaatcccagttcctaaaggaaagccactggctcttgtagaagaaatcagaaacagaaaggatgtgaaggtgtttaatgtcaccaaggaaaacagaaaccaccttctgccagataatcgtgacgttgcgttgcagagcagcaggaagtgaagaccacgtgcattcctgccttccgtgaaggagtgccagtcaagaggagctgatggagccgctgtcgaggctgtatgcctatggggtttggacctgtgggcttctaagaaatcaagctgtcctaaatgttag

SEQ ID NO: 361784 - DNA, 933 bp, Homo Sapiens
ctagtacccctacgggtttaaggtagcgaggcctgggtggtgctgacttcttttgagcagttggcactacccgtcttgaggaatgccgactgcagcagtggcccagggcaaagagtgtgcgtcatcgatgagattgggaagatggagctcttcagtcagcttttcattcaagctgttcgtcagacgctgtctaccccagggactataatccttggcacaatcccagttcctaaaggaaagccactggctcttgtagaagaaatcagaaacagaaaggatgtgaaggtgtttaatgtcaccaaggaaaacagaaaccaccttctgccagatatcgtgacgtgcgtgcagagcagcaggaagtgaagacacgtgcattcctgccttccgtgaaggagtgcccagttcaagaggagcctgatggagccctgcctgtcgaggctgtatgcctatggggttatggaaccttgtgggcttttctagagaaaactcaacagctgtttcccataaaatgtttaaaagatcaaattagccttaatgctggattgtctgtacaagattaactatccattgtggcttatctatgcttaaagatttcttgtttatttcctcttgcagtcatgcacatgatttgggtaaactgtgagatgagaaatggttttcagagtattagatggaattcacccccgttgaagtttataaatgtgttcaggggaagcgggaggaaagagttcactgcctaatcagttttgcatgtcatgaaaattaaattcctctccaggtgcagcttcagcctcatgcaacttaaagtgataacagttatttgattttttaaaaaatattattccaaaagaaaaccattttaggtcatctcccccaactctgtttgcttactgcttaataaatataaaaataaatctgatggttacagacagg

SEQ ID NO: 361785 - DNA, 642 bp, Homo Sapiens
gcggccgccgagggggaggcccccgctgagatgggggcgctgctgctggagaaggaaaccagaggagccaccgagagagttcatggctctttgggggacacccctcgtagtgaagaaaccctgcccaaggccacccccgactccctggagcctgctggcccctcatctccagcctctgtcactgtcactgttggtgatgagggggctgacacccctgtaggggctacaccactcattggggatgaatctgagaatcttgagggagatggggacctccgtgggggccggatcctgctgggccatgccacaaagtcattcccctcttcccccagcaaggggggttcctgtcctagccgggccaagatgtcaatgacaggggcgggaaaatcacctccatctgtccagagtttggctatgaggctactgagtatgccaggagcccagggagctgcagcagcagggtctgaaccccctccagccaccacgagcccagagggacagcccaaggtccaccgagcccgcaaaaccatgtccaaaccaggaaatggacagcataccaagaccccatctctaaaagaagtttaaaagaatgtttcaaaggccaggcccagtgactcacgcctgtaatcccgtactttctgg

SEQ ID NO: 361786 - DNA, 819 bp, Homo Sapiens
tggacttcaaggcatttaaaatcatttttctaaggatttaaacagctccactataagtcttcacctgacatgaattggtgagagaccaggctgatcctggcaaaggtcttgtgtctttctgccaggcaaaatcctgggttcttctagcaggacctaagccagtctggggacgctgatattgaggatgaactgggggactctgctctgtcctctgtgaacacacaggaggcccatccagagtgagtgaggttgattctctctccctctttgcccagagcttccctttctggccgccagatgggtggagatctgttttgtctggagtcctggagttgcttttcttaggtttgatataagcaagctccagaaagaatgctgacagaaaagggaccctagctgtggtaggaagtggccctcagagtcaaggaggcaggatgaatttaaattctgcatgtagggcatattttggggagtgatgggattatgcacacccttcaggtgtcaagataaagagataaaaccagagtttgtgcagaatgagcttgctgacacacagcctaaatttgtaccgcatgtttcatactaactccctctgagtttgcacatgggacccatgaggaggcatgaagaggtaactgcccatgcccgaggattttccagcccttccttttctttctatcaatcacctactaatcacagaatccactccctacaccttttctactaaaataactctttaaaataagtacaatgggacagatttgagctgggctcctgtctccttgttaatcaaattgcaataaaatgttttcttttgtt

SEQ ID NO: 361787 - DNA, 255 bp, Homo Sapiens
gatttgagcccaatctggttcagacctgtttggctcagtgagcctggacttgggggaaggggatatgtactttttaaaagaacatttattgttactatgtttcatatttagaaaacaggacagagacttttttctggaaaaacaaaactgcagcaagtggagtttcttttttctggaaaaacaaactgcacgaagtggagtttagcaaaatgttctgaaactagtgcttctcaaccagtaaagcaggcacgacag

SEQ ID NO: 361788 - DNA, 423 bp, Homo Sapiens
gttttgtcttcctttattacatttttgcttttgagatacaaaccaacctctcataccacacaaagaacatccattcttgggatttttaaagtgcatttccccttgaactctgtgtacaaaaatatttatcttttaaaacatgcaaaaatttcttgacaaggcacttttaggtataaaatgaagatgagtccttggttctacattcacactgaagtaatagtgaaacatcatcacagctgcactctcaaagccctcagaggtccagcagtctctaaaaactcgtcaacaagactaaaaacattcacggctttacaatgtgggttacagagctttacaaccatgaccaggaaaaactgctcgtaacaacagctgtccttcccagttccacatgtgttgtctcactgcaggaaattaagataagct

SEQ ID NO: 361789 - DNA, 421 bp, Homo Sapiens
  misc_feature (89)..(106): n is a, c, g, or t
  misc_feature (190)..(198): n is a, c, g, or t
ctcctagatggaaggaatgctttgcttttctgtttgccctttgtttttgtttttgaagcctgggcgacaagagtggaaactctgtctcnnnnnnnnnnnnnnnnnnttcagtgaaatacacctttatatatgagatccaagtttcactttttgtgatataatgagccagttttctcagtaatgtctactnnnnnnnnngccattaacctttctctaatatttgcatgattctaataaaagtatgtcaacttcttaaaatgttttattgaaatgtggcattcctttgaattttatgacattaaaataatccacgacatggtacagctcttcactttttcagctttttaaatgtccattaataagtttgaatacgttaaaattatatgtttaacctcaacaaaataaatggcaatatgttcaa

SEQ ID NO: 361790 - DNA, 694 bp, Homo Sapiens
gagcggctggcgcggccgggccgccatggaccacaagccgctgctgcaggagcggccgcccgcctacaacctggaggccggccagggcgactacgcgtgcggcccgcacggctacggcgccatccccgccgcgcccccgccgccgccctacccctacctcgtcacagggatacccacccaccatcccagggtctacaacatccacagccggaccgtcacccgctatcctgccaactctatcgtggtcgtaggaggctgtcctgtctgcagggttggggtgctggaggactgcttcaccttcctgggcatcttcctggccatcatcctcttcccctttgggttcatttgctgttttgccttgaggaagcgacgatgccccaactgtggagccaccttcgcttaaagggaacaccaggcccggctttcctacacccagctctctttttctaatgtaaatgttgtgtacaatagttttatttgattaagcttcaggactgttttgtaaagcgaggtgggaccgatgtggcacacgccagctgcggtttcccggagcgtggagaggcagtgctgctgctcccgcccgaggctcatgacaactcaataaagcactgcttttattttttgcagtcttcaatttgagaaaggtgagaaataatgttttcaataaatgagattcataccattgttaaaaaaa

SEQ ID NO: 361791 - DNA, 886 bp, Homo Sapiens
  misc_feature (430)..(430): n is a, c, g, or t
tagactacagtgacaatggcacgttcacttgtgacgtcaaaaaccctccagacatagtgggcaagacctctcaggtcacgctgtatgtctttgaaaaagtgccaactaggtacggggtcgttctgggagctgtgatcgggggtgtcctcggggtggtgctgttgctgctgctgcttttctacgtggttcggtactgctggctacgcaggcaggcggccctgcagaggaggctcagtgctatggagaaggggaaattgcacaagccaggaaaggacgcgtcgaagcgcgggcggcagacgccagtgctgtatgcaatgctggaccacagcagaagcaccaaagctgtcagtgagaagaaggccaaggggctgggggagtctcgcaaggataagaaatagcggttagcgggccgggcgggggatcgggggtntaggggtggagtccgccaaaggcccaaaggtgatggtcatcgagatggagctacgaaaggatgagcagagcccggagctccggcctgctgtcaagtcccccagcagaaccagcctcaaaaacgccctcaagaacatgatgggcctgaactcggacaagtgatcgccacccccccaccccaggccctgccagagcagggggacctaagctcctcttacccccgtccaggtggctttccctctttgctcccccgacctggccctgccctcacctccccttggagaaggaaagtttcattcccagaattcattcccccagccaaatggaattctccccccaccctttcacccctgggcttttctgggagacccaggaaactaatccctaaccccttcaactggccccgggggggcttgttgtggtttggggggccctgtttcaaccctgaagcacactg

SEQ ID NO: 361792 - DNA, 911 bp, Homo Sapiens
  misc_feature (45)..(45): n is a, c, g, or t
  misc_feature (137)..(137): n is a, c, g, or t
  misc_feature (278)..(308): n is a, c, g, or t
ccttgaccctaatggaaggaatccccatccttctcttctcgggtnctctttccctcaaagaccctggagtccccagaaccagtgctcccaaagtggtccaggggggaaccaaatgctatactgaaagtgtgaggatncaggggcccctctacttgggctggctcttcattaaggacttaaggggggcgtgaattgcaaaagccacatgacgtcattggtcctcagtcatgggtgtaagggcagaggatgagcacaggtaaacaaacaaagaatggatnnnnnnnnnnnnnnnnnnnnnnnnnnnnnnncctgaaggagagtctgatctgggtgctctgggtattagctggggggacagagtatggagctgggccacctggtagaggggagggagggacgggagaggaaacagccagggggacaggctgggggatgcaggagatgggaatgccaggtggcctggacttgaggcagagggtatcaaagtccctttcttctcagtgctcaggtggacaggcaccaaacacacagcccccggggcaggtgaggggtaggattagctcctgggctcccagaaagccaggggtgaaggtgggggagaatacaattgcctggggaatgaattctggaatgaaacttacatctcaaagggaggtgagggcagggcagggcgggggagcaaagagggaaagcacctagacgggggtaagaggagcctaggtccccctgctctggcagggcctggggtgggggggtggcgatcacttgtccgagttcaggcccatcatgttcttgagggcgtttttgaggctggttctgctgggggacttgacagcaggccggagctccgggctctgctcatcctttcgtagctccatctcgatgaccatcacctttgggcctttggcgga

SEQ ID NO: 361793 - DNA, 1681 bp, Homo Sapiens
  misc_feature (1619)..(1627): n is a, c, g, or t
ctggaccggtccggaattctcgggatcgccactttctcaaccccacagatgctccgggcccctgcccctgccccagctatggctcctggggctccctcatccagccccagccctatcctggctgtgctgctcttctcttctttggtgctgtccccggcccaggccatcgtggtttacaccgacagggaggtccatggtgctgtgggctcccgggtgaccctgcactgctccttctggtccagtgagtgggtctcagatgacatctccttcacctggcgctaccagcccgaagggggcagagatgccatttcgatcttccactatgccaagggacaaccctacattgacgaggtggggaccttcaaagagcgcatccagtgggtaggggaccctcgctggaaggatggctccattgtcatacacaacctagactacagtgacaatggcacgttcacttgtgacgtcaaaaaccctccagacatagtgggcaagacctctcaggtcacgctgtatgtctttgaaaaagtgccaactaggtacggggtcgttctgggagctgtgatcgggggtgtcctcggggtggtgctgttgctgctgctgcttttctacgtggttcggtactgctggctacgcaggcaggcggccctgcagaggaggctcagtgctatggagaaggggaaattgcacaagccaggaaaggacgcgtcgaagcgcgggcggcagacgccagtgctgtatgcaatgctggaccacagcagaagcaccaaagctgtcagtgagaagaaggccaaggggctgggggagtctcgcaaggataagaaatagcggttagcgggccgggcgggggatcgggggttaggggtggagtccgccaaaggcccaaaggtgatggtcatcgagatggagctacgaaaggatgagcagagcccggagctccggcctgctgtcaagtcccccagcagaaccagcctcaaaaacgccctcaagaacatgatgggcctgaactcggacaagtgatcgccacccccccaccccaggccctgccagagcagggggacctaggctcctcttacccccgtctaggtgctttccctctttgctcccccgccctgccctgccctcacctccctttgagatgtaagtttcattccagaattcattccccaggcaattgtattctcccccaccttcacccctggctttctgggagcccaggagctaatcctacccctcacctgccccgggggctgtgtgtttggtgcctgtccacctgagcactgagaagaaagggactttgataccctctgcctcaagtccaggccacctggcattcccatctcctgcatcccccagcctgtccccctggctgtttcctctcccgtccctccctcccctctaccaggtggcccagctccatactctgtccccccagctaatacccagagcacccagatcagactctccttcagggtttatttaggttattaatttttaaatttttaacccatttctttggtttggttacctggtggctcatccctctggccccttacaccccatggactggaggggaccaattggaccgtccttggtgggcctttttgccaaatttcaacggnnnnnnnnnttttaaagtctccctttaaatggaaaggaagccccaggcccccaaaaagttaaa

SEQ ID NO: 361794 - DNA, 773 bp, Homo Sapiens
tcggtattctatctctggcaaaggtgtggagagttttttgttggctgggatacctccattgtggtgtataaggatcgaagaatccatatcaggtaatcctttggctgcttcctcggcctctttttcttgcttctgtagcatctgttgctctggagggagagcttgttgaagaagttgcatgtaaaactcgttctctttttgtacttctttttgcttccttaaccgcattttgtagcttacgtaacttttgaagccaaaccccaaagttaccacagggtacccaatacagtgagcagcaaatggacgacaaaggtctacatgaaagtttttgagatctttaaatctaatggctgcttcaatataaacaaagaggatccagagagacactgtaggcaaacacactcccctctctgtgtgccatacgtactgaacccatacatatgtgctagcagcaaaaaaaagccactgtatggggatgaacagcaggcatattatatttgacgtgaatgctacacaaacaaaaaatactgagaaggccagtccctggtatctgaaggaatcatagacgcttctgatgaaaagccagaatggccacaggtattcaaatctgaactccaggacaaaatctgctaggaggacaagtgcccacaccaccaggaatttcaggtataaaaatgtactgccgtaaatgccctcggtgatccggttccgctttagggggcggcggagcttactgcagtcggcgttccgccgcttcatcctcccgctggggg

SEQ ID NO: 361795 - DNA, 537 bp, Homo Sapiens
ttgggaggattgaagcagggaggtggcagtggctagagttgctcagatcggctcagatgaaggcccaggggtcaaagcatttgctcaccacaactgagtctggaaggcactgtgcagccaaaccctcttgtccaatcacatgcaggccccaggcccctcagaaacgccctggtggagggaggagcccaacagatagggtcagggagtcagtggggaaagcagaggggagagcttagagtgaaacttgaaactgctatggacatggaggtcagatgggaacttggaactgggcatgaatcctgaatggtggggaaacttgaagccatcacagccaagaggtggggttccatgacctgccctgaggtcagcagctcccagactcctttgccctcactagggaagccccagtcaccggacttgtccccatggagtgaagagaggccccatttttgagtgttgtgtgtccaaaacagtgttgtgtcactggtggtcatgttgcttagttgaagagaataaagggaataagatttaaaaaaa

SEQ ID NO: 361796 - DNA, 118 bp, Homo Sapiens
  misc_feature (1)..(1): n is a, c, g, or t
nccaattctccaaatctcacagccaaactgcaactaaattccatctcaaacaaatattcaaatgcagaagactcacccatctaatcaaggcagttttaatatttaggggaaaaaacct

SEQ ID NO: 361797 - DNA, 493 bp, Homo Sapiens
atacttgtatacaaatatagaaacattatttataatatccgaaaagtggaaacaacccaaatgtccatcaactgatgaacagataaaaagttgtggtatatacatataatagaatactattcagtaataaacaatattgaacttctgacacataatacattgtagatgaaccttaaatcatgtcaagtaaaataagtcagatacaagagaccacatattgtatgattccatctatataaaatatccataaaaagcatgctaatcaagacagaatgtagattaatggttgccttggaatgggcatgagaaaaacaattaaatgttaataggcatgatggatcttatttaaaggataaagatgttctaagatttagttatgctgatgtcttccccactcaataaagttaataaaaatcattgacttgtatacatgaaattatgaatgaattttataatatttagaatattcctcaataaagctgttttaaaaata

SEQ ID NO: 361798 - DNA, 1029 bp, Homo Sapiens
  misc_feature (619)..(627): n is a, c, g, or t
  misc_feature (980)..(980): n is a, c, g, or t
  misc_feature (996)..(996): n is a, c, g, or t
caggtgaccaaggcccgtaggtgccatcccctctgggaaggcagaagcctgtgtggcacccagagtgggtactgttcggtaaagagctcaccctctcacagcaccaccagcggcgagacagaccccaccaccatcttcccctgcaaggagtgtggcaaagtcttcttcaagatcaaaagccgaaatgcacacatgaaaactcacaggcagcaggaggaacaacagaggcaaaaggctcagaaggcggcttttgcagctgagatggcagccacgattgagaggactacggggcccgtgggggcgccggggctgctgcccctggaccagctgagtctgatcaaacccatcaaggatgtggacatcctcgacgacgacgtcgtccagcagttgggaggtgtcatggaagaggctgaagttgtggacaccgatcttctcttggatgatcaagattcagtcttgcttcagggtgacgcagaactataaagccctgtgtgtcacttagagacagtgaaaacccacggcctccatcttcattaatcaggaaacctggactgcctgcttgttttgtaacccttttaaactacctgttttaaaagtggtcattttattcaggtttagnnnnnnnnntcctatttcttttccttttatttaaaaaaatttgtttttgtggggggttgggggaataaataattggcacaactatctttaagaggtgtttcatctgggctaccttctcatgaaatcattcccagtagggactgaagctgaccttcatgttccattgcattcagatgtcaaccatcccggttgccttttatcccaaagcttgctgtgagtgtgtgtgtgtgagacgcaggcgaccctcttagtactggggtcttggggccaacttttcccatcaagcgttactttgattctgttctgacctcattccatagtttgcagtgagcatggcatctttgcctgggagatactatggntagggggcagcttttncagggggcaaagcaaggccctcgtgtttacacg

SEQ ID NO: 361799 - DNA, 509 bp, Homo Sapiens
aaaacatgattaaaccaaataacagtcgtataattttattattaaagatttactctgatgaggacattctgtgctaagtatgattatttctcaaataggaaaatatttactagttaagcaaagggatcaatatgaacccataaacaaacactgagcagtgggggcaacctttaagatgccatggacagtgacagacacctctctccctccctggtagctcccttggtagggattgcaattcagtatggtcagcaattatttttaaagtgtaattaattaaacaaagaaacaaaaagcatttccaccaaacaaggaattctgaaatgtcttcttttggtttcaatcagaaatacactttgtaaaaattttctcaaggtttacacatttattccaagcacatatacactgacccacagtagatttcaccacccatcataggagaaaaaaaagtgtaatatctgttggtttacatcatctatatttaataaattttgattcaatttaaaaaa

SEQ ID NO: 361800 - DNA, 528 bp, Homo Sapiens
aaaagtggggaaccacgtgtgggctgaggtgtagatggagtggggaaggctggagggtcaagagcctccctaatttttcttgaaccagagctactttgattttatttgtgctacatctctaagaatccacagcagatttcatgtcaaaaatagagttctaatgctgaaatgcatttgaaagcctctgctctatacagctattatatctgccaaaggatagtgttaacatactctgacatctgaagatccaggatttccaacatttagagcaacttcacctataagccccaccttctcccatgttttccctctcttttcaccctctcattttcctcttcttcccagcctcctcatatatcatctcttccctcattcttaactctctgtggcatagaactgctgtatatttgtgtttgtgtgtttaccactggtcaataacaagcaagcatgttaactattcttcttaaattaagtttctttttcttgtggatggtgtagtcaatcaataaagatttttctcaatgataa

SEQ ID NO: 361801 - DNA, 923 bp, Homo Sapiens
  misc_feature (873)..(881): n is a, c, g, or t
cagtcataagcattcacttagccaggggcttttagataattgtctgtgaagtctgagaaaagactaagataaccaagatgaacataatgtcaaaggacgaaatcatggggacaatttggattttgttccaaaagacaagtgtttttaaaaagaacctttccatacttcgtgttctgttctatagagttaaaccttttaacttcccatgagccaccatgcccggccccttattttactttatcctcctgattatttgaatttgttacactaagcatgtattttataatcaaaaataattaagatttaaaacaatgtatttgactactaaaaagcaaattatataaatcagttgaataataatgttgttaaagaggctgtttagcactaatttgaccaaatctatagtcaaagtttgattctacttgaattttttggaaatttgctgttgtattacttattctttgccttgttctctgtgaagtcctttcctaaaaaagaaacttatacaatttagttcacaaaactttgttgacctctttctctgtagaaatgaaaactaaatatatataattgagaaataattctgatactcttcattcctataaaagtaattaagatagacctataggattgttgaaccttgctgcccaaatatagtaaccaggaaccacagctagctgtaaaattgaaaaatcagttcagtcaaactagccatattttcaagtgctcaaaaacccactggggggctatttggttacccttactgaaccagcccaatataaggctattttcccctccttttataaaaaagcctcctatttggaacaaacatttgggccctaagaaaaacaaatatttttgggaaattttatnnnnnnnnnaaccccaccgcattcccaaatatatttggagttaaattagcc

SEQ ID NO: 361802 - DNA, 523 bp, Homo Sapiens
ggcacgagggaattccccttcacggacctgaagcctaaggatgctgggaggtacttttgtgcctacaagacaacagcctcccatgagtggtcagaaagcagtgaacacttgcagctggtggtcacagataaacacgatgaacttgaagctccctcaatgaaaacaggttcatcatctgaggaatccaccaagagaaccagccattccaaacttccggagcaggaggctgccgaggcagatttatccaatatggaaagggtatctctctcgacggcagacccccaaggagtgacctatgctgagctaagcaccagcgccctgtctgaggcagcttcagacaccacccaggagcccccaggatctcatgaatatgcggcactgaaagtgtagcaagaagacagccctggccactaaaggaggggggatcgtgctggccaaggttatcggaaatctggagatgcagatactgtgtttccttgctcttcgtccatatcaataaaattaagtttctcgtcttaaaaag

SEQ ID NO: 361803 - DNA, 1164 bp, Homo Sapiens
ttttcggacagttgatcagggggtcgtattaatggttaacatgagggggtgacaacttcggggtgttaattaagggctcccgtgtattctttttgcccgtccctggtttcgactgattcatggtctaacatcgatggtcgtaccgcacaaacatctagtcttatgcatgacaccttttacggctgtctatcgaatacaaggtctcccagacgaccgagggtcccaaatgcgtgctaagactgtggtgatcactgggattctagagttgaatccagcctttcaaaatcttctgtcgaatccatcagaggccattacttaacacggcaccaatgcttttaacggctaactctcgaggattatcaagcattggtatttcaccggtaaagtacacgtgatctcgagttttgtggcctcatccagattggggatcgcggtctacaaggctcacccaattgactcccctctacaggaggtgtccgttcaggtctactatagtgccttccgtcacaggagggaggtaacgagagtagatgagtttttcccgaattatatggagcatgttaagcaaagcctgggactgccagctatggcggttaactatcttcgcaactttttactaataggacctcttcagaactgagtctgctaggcttctgcacggaaattatgctcagctttacaccaaatagactcacccagagagcaccaccaatataccaagagtataaatactctttctacagtaaggtgttggattgcgtaacatcaacaaagtccattaacacattaagcacaccaggacttcaggattgaccaccagggtctaaaggtactgttgaacaaaattactcgcaatgataatgaatttggcttattgttttttttcgctttcagaaattggcttggttctctttagagttggtgtaaacatgccatgtaataaatgatttccacttaatggtacaacagaattattgctttcttagatgtatgtgtagtaaaagtcaatatacacatttatataatttctttcttcaaaatcttatacctaatttgatatttctaaaaattgcacatgtaagtcatgtgtataacatgctaaagtactttaactgtgatcttaaaactgaataaaaatatttaataaaactttgaaccctcttt

SEQ ID NO: 361804 - DNA, 785 bp, Homo Sapiens
ggtacgaacattcgtcatatcaggatgacctcgagagctgaggctctagccacctaaaaccacgtgcccaaacccaccagtttaaaacggtgtgtgttcggaggggtgaaagcattaagaagcccagtgccctcctggagtgagacaagggctcggccttaaggagctgaagagtctgggtagcttgtttagggtacaagaagcctgttctgtccagcttcagtgacacaagctgctttagctaaagtcccgcgggttccggcatggctaggctgagagcagggatctacctggcttctcagttctttggttggaaggagcaggaaatcagctcctattctccagtggagagatctggcctcagcttgggctagagatgccaaggcctgtgccaggttccctgtgccctcctcgaggtgggcagccatcaccagccacagttaagccaagccccccaacatgtattccatcgtgctggtagaagagtctttgctgttgctcccgaaagccgtgctctccagcctggctgccagggagggtgggcctcttggttccaggctcttgaaatagtgcagccttttcttcctatctctgtggctttcagctctgcttccttggttattaggagaatagatgggtgatgtctttccttatgttgctttttcaacatagcagaattaatgtagggagctaaatccagtggtgtgtgtgaatgcagaagggaatgcaccccacattcccatgatggaagtctgcgtaaccaataaattgtgcctttctcactc

SEQ ID NO: 361805 - DNA, 879 bp, Homo Sapiens
gggcaacaagccatctcagacggcaaccacctcatggggctctcgacactcttccccctagcaacccataacttcaactttgacttcagcggtttgtttagtgctgccttctcattcgggccttcctgttccagaagaaatgttagaaatatgaatgaccacgttctgtcattagagattccagaggcttcaattaggcaagctgaaataaaatctgtctaaaagacacgtagtaataggcctttgaaacaagcttcgaggtggtcccagacattcagttccaactttcacacgtgcgcatagccagaaacaaacttgtacctcaatgggaaagaacttttcagacagtccattatttttttatgttaccttcttttgtcatcaaaaaaatgatctggatctcttctctcctcctcacttaagtaacttttcttcatgtcctgggtcatgccccaggaatttttatctacaaagtgctcagcctggtgcacaatgcacattcgctgcttaataaatatttgttgcctgagatgcgtgctgctggcatgaccaaaatgtgagacgttagcgacatctgctggggatatggtgatggtgtgcagaatttaagtcagaaatgcatgtttttgaagggctgagttaaatcaaatgccacaatggggcactgttggaagcttatgtctacagtgatgaggccatggctttgcagctcttccttaccaggatgtggtccagtgggttattgttctcctacaatataatgcagccttgtttttttaaaaatacagaaatcaagaagatggaaaaggagctgaactggggaaagctgaggtttgcacaggtctgttggctcctccagacctttgagcttatttgttc

SEQ ID NO: 361806 - DNA, 581 bp, Homo Sapiens
ctctgttaactctgactttcggtaaattgcttcagttttctaagcttccatttccttctatgtaaaaaagtgaaaataataccacatggagttgcctgtaggttaaattacatattttatgaaaatcacttagcacagctcctggcaaaaccgaataagtgctatctacgtcagcatttggcgtttgttgccctgggcataaaataccctaggacccctctttctatttcgcctggctcagaagttttgacgtggctactgaaatacaagacaaggcctgctacttactagtgctgcttttagtgaaagtgtgctaaaagtatttatagattttatagctttaataatataaaatgtcaagaacaggcagcaatttggcaagagaaattccagattgcattttacagcttctatgataaatgactgttacataagcaggaaacatacctcattgaaaatggcaactcttttggcatctatagcaaatataatgaaacatgctgtttaatatttcacttggcagaaattgtatttttaagtctttctctgcatataaatgtgctttaaactgtcaaaaaaaa

SEQ ID NO: 361807 - DNA, 837 bp, Homo Sapiens
  misc_feature (97)..(97): n is a, c, g, or t
gcattttatgaaatgggtcacatgtggcctgtcagcaggagccaatatgccttctttaccctttctgggaatgcaatactaggaagtaaagtgaagnatttatctctttagttagtgattatatttcaccatcttctcaggaatcatctcctttgcagaatgatgcaggttcaggtcccctttcagagatataataagcccaccaagttgaagaagctggcggatctagtgaccagatatatagaaggactgcagccactgattctctcttgtccttcacatcacccatgttgagacctcagcttggcactcaggtgctgaagggtaatatggactcagccttgcaaatagccagtgctagttctgacccaaccacagaggatgctgacatcatttgtattatgttccaaggctactacagagaaggctgcctgctatgtatttgcaaggctgatttatggtcagaatttccctctgatatgtctagggtgtgatttaggtcagtagactgtgattcttagcaaaaaatgaacagtgataagtatactgggggcaaaatcagaatggaatgctctggtctatataaccacatttctaagcctttgagactgttcctgagccttcagcactaacctatgagggtgagctggtcccctctatatatacatcatacttaactttactaagtaatctcacagcatttgccaagtctcccaatatccaattttaaaatgaaatgcattttgctagacagttaaactggcttaacttagtatattattattaattacaatgtaatagaagcttaaaataaagttaaactgattataaaaaaaa

SEQ ID NO: 361808 - DNA, 641 bp, Homo Sapiens
  misc_feature (440)..(450): n is a, c, g, or t
  misc_feature (522)..(522): n is a, c, g, or t
  misc_feature (565)..(565): n is a, c, g, or t
  misc_feature (597)..(597): n is a, c, g, or t
  misc_feature (614)..(614): n is a, c, g, or t
ggtctcattatggccatttaattggtacactgtgatgttatatttacttcacgtgaatagagcatgaaattgaaacataaggatctgtaaaaatgcctgccttttgtgaactggcttacactgttcattatggctcctgaggatcctaccaccagcttcatgttattacatcatctgtaatttgaattatattttaatcaaagcttttacatggccagtcttaggattttccatgtaattatcagcattaataatactctgttgttactttgcagagtacttcctggccatttatctttaaataaaattatttatattaaatttacacttgatggtccagaattttaagtctttattaactgaagtacaacccttttcctttcctcttgctcagataaaactagaatcaaataagaatgtgggccacatcaggatggggnnnnnnnnnnnaacagtagcaaaggatctttttcctacatttctattttgggctttatttttgaaaattatagagtttttagntaaattagagtattgtttaattttctaattttaaatgaatttnagctcagaatttaaaattatgtcttttcaatngctatgatttatctctnaaaatatctcacattcatcttcaaagt

SEQ ID NO: 361809 - DNA, 560 bp, Homo Sapiens
aaatggtctgctagagtgataagactcagaacaggaagcctgcatgtgactgagcaagtcacctacataaccctgcctgtactaaggtgtacacctgtctattgtaagtttgcctaggctgttggtgtacagagaccagaggagagagacacactaggactaacaatgtcctaacaaaatggtacttagtttgttggtctttaggagaaagcattagtaatgaaagaagaaagaattttcacttggttggacattggggctgcttaagaaagttgacatttgtcgtggaatgactttggaaagacttctaaaagaatctttttcaaatccctgaaaatcaggatagcacattttgctactgactgtgacagtgttttattcttttgagagaaatgacatagttttccctttatttcccaaattcctttcatgttcttaactgctacccagaaattgagcttcagaagattgaggatagcctttgattggtatttaaaataatttctaagctgtgaagcttatagcatttttaaagtatggctattaaaaacactaagttg

SEQ ID NO: 361810 - DNA, 577 bp, Homo Sapiens
ggggagacggggtggaagggaagggatcggaacccagcgagcaggagtggaaggatcgctgcaggggccgagtatggatgctggggctcaacctttggattgtaaaagtttcctccttgcgctccccggactttcttttcaaaacgtggatggtgcaatcgtcgcttgcctaagctgctcccctaacacgccctcccgcggtcggggaggggacctggggatagaattccaagggcctggaagggccaccccagcctctgcagcggggcctggctgcgggtggatggttcggacaagtctcgaactcgccagctctgaccgcacacactgcatccgtgccagggaaagaaaagcctgggaaaggccagggtatggctgtaacactccaaggccttcaaaagggcagaccagcagaccaggagccggaaagacttccctgactttggtgccatccacgctacatctcctcttggtacacagtatgaacatgtttaattagacctagacaatttgtcaatgacccagcaattccactaacaaaaatgtattccaaataaataaacgttgttatgttaaa

SEQ ID NO: 361811 - DNA, 419 bp, Homo Sapiens
taaagccaaaagcagcgggtgctattcgtggcaacacacttcactgaacccacttgcttccaaaaacgatgcccagcccgaggctactgtatcgccgacaagctgccacatgggatggtggctcaggcgctccctccaggattctgcccctgcctgtccacagactcctttgtgctggaacctgggctcctccaagctgccaggcaggagtcggtaggactgtgcctgtgcctccctcagcggggccctgggcggggttccaaggcctgcgagctgggaaaggacaaatgaggggacctcgtgccttcttgctgtcatgcaatgaccccgccttatgttgccgaaataagcaactcttaggtttgcctgactgccttatgctggtaaagaaaagggattcaactgtctcttttcccaat

SEQ ID NO: 361812 - DNA, 1269 bp, Homo Sapiens
  misc_feature (845)..(845): n is a, c, g, or t
  misc_feature (897)..(897): n is a, c, g, or t
  misc_feature (1036)..(1036): n is a, c, g, or t
  misc_feature (1051)..(1051): n is a, c, g, or t
  misc_feature (1058)..(1058): n is a, c, g, or t
  misc_feature (1082)..(1082): n is a, c, g, or t
  misc_feature (1098)..(1098): n is a, c, g, or t
tatgaaaaaaggaatctcttatttgttccaacaccacagccgagaccctcctttacggctccaagctagaaatggtgcagcaagcacagtgtggccttgatcttcgacacatcaccgtggtggagctggtgggtgtgttcccgactctcattggcaggataggagcaaagattatgcctccagccctagcgctgcagctcaggctgttgctgcgaatcccactctactccttcagtatggtgctagtggataagcatggcatggacaaagagcgctatgtctccctggtgatgcctgtggccctgttcaacctgattgacacttttcccttgagaaaagaagagatggtcctacaagccgaaatgagccagacctgtaacacctgacatgatggttcctctcttggcaattcctcttcattgtctacatagtgacatgcacacgggaaagccttaaaaatatccttgatgtacagattttatttgtaattttaaaagtctattttattatgagctttctttgcacttaaaaattagcatgctgctttttgtacttggaagtgtttcaaaaaattatatgaccatatttactctttctaactttctttactccatcatggctggttgattttgtagagaaattagaacccataaccatacacaggctatcaacatgttattcaatgtgacacctaactcttttctattttgttttttaagtaagacttttattaataaaacaaaatgttttggagcaaatttagtagaactcactttgtttgtcaagcaccagccatacttgttcagtgtggtcagtggttttaggattgtgattcttagtggtgntttaagaatggaaaaaatttaattagtctttttaggagctctgctgagctgngagagagctgagcctgtcaggtgttcaagtagccaattaaagccacaagctgaaaatgaaagagttaagcccttcagtcacagtctaaaaccagaggaagcatcaacttcactcttccattttcccctgtgggacagcncgctggtcaagattnaagtgcnagcagcacagacgtggggtcatcnttatattgagggagtnccggaacaaaaggctctggcaggttttaccggaccctggagtcatgtggtggggtaggagtggaaaagtcctgggcactgaggcagagtgaaggaaagtattctttaaaatttttttccttttcccttaccccattagatctcagcagaggaaccctgaagacctcttgcc

SEQ ID NO: 361813 - DNA, 524 bp, Homo Sapiens
cgttgtgtggcactaacccacacactgcaggacatcgttctccctggctgcatccactcagtgctgggagtagtccccagttattatgaaaccaccaataacccactgaccacagtgagaaccactgattttttccactgacctactgaatatctagcatccttagattggctcaactgttactttcctaaggagtccttctacagaataggtcagatcttggcctcccaaaccccttatttttaaaatactttgcgccttgctttgataatttgtattatgtatccaaactgaaattatctgctttctgcattagaatgtaagccccctgagggttgagtcagtctgtcttgtttgctgtgccacgcctgatgcccagcccagcagcatgctttgtacactgatatattgggtaaattttgttgaataaattaagctcaactatttgtatttcaatagttgagttgtattgcttcctgttcttcaagcttaatttgaactgtctaataaaaagaagtaattaa

SEQ ID NO: 361814 - DNA, 688 bp, Homo Sapiens
tttttaatttaatccttctgtagaaacaggcattcagaaccattccattgatcttaataaagctgctctttactgtttctagtcaaaaatgagacttcgatcaaaccataagattttatactgcagatagtcagcttcaccaaagccgcagaggaaacatgtcgagatcaggcttcctgcttgatagtctcttgactaccatttaaaacgaatattgggaggtcatgaaagtcattggtaggccattagcattgatatctttaaaacatctaccctaaaccatctgctatggacccataataagaggcctgttgtatatgaaattgtctagaattcaggtgcaggtctttgccggttaagtaagggagcaacacgtaaaatgggagaggagtggggtgtactcacttgcctcctcttttgtcctgatttaaccagcatttttcaaccctgggaaaatttgcagaatctaagttgattgtaatgattttgagctgcagcagctttaactcttaccctttttccacatagttatggtgtttgagttggaaagaaacaactataggtagctacacgtacataattatctctttattcacaaagggtatagtaaaattgattgtaaataactttctaagtgccaatattcaaaacttttggattaaaatgtatttttcaccgtgaaaaaaaa

SEQ ID NO: 361815 - DNA, 485 bp, Homo Sapiens
ttttaaagtaagtgcttaagtattaactttgggttgtcccctctgtatgtttcgaaggggttttggttctttttgcttctgttttcttaaacatgttttccactcccacttgggcattttggaagctggtcagctagcaggttttctgggatgtcgggagacctagatgaccttatcgggtgcaatactagctaaggtaaagctagaaacctacactgtcactttactgagatttctgagtatacttttcatattgccttaatgtagcagtaatgtgtttatgcatttgtttctttgcacagacattttgtcaaatattaaaactctacttttttatggcacatattagcatataagcctttattccaagaggtatttattttttcacttgtaaaaaaataatgtttccacgtaaagaactctgttatatcctagaggactctgtcttttatattcgggataataaagactttaaagcaaaaaaa

SEQ ID NO: 361816 - DNA, 545 bp, Homo Sapiens
  misc_feature (30)..(30): n is a, c, g, or t
gttaattcccactatttccaaggaaaattngattaggttgcggggggtctgagtctatgttcaaagactgtgaacagctggctgtcacttcttcacctcttccactccttctctcactgtgttactgctttgcaaagacccgggagctggcggggaaccctgggagtagctagtttgctttttgcgtacacagagaaggctatgtaaacaaaccacagcaggatcgaagggtttttagagaatgtgtttcaaaaccatgcctggtattttcaaccataaaagaagtttcagttgtccttaaatttgtataacggtttaattctgtcttgttcattttgagtatttttaaaaaatatgtcgtagaattccttcgaaaggccttcagacacatgctatgttctgtcttcccaaacccagtctcctctccattttagcccagtgttttctttgaggaccccttaatcttgctttctttagaatttttacccaattggattggaatgcagaggtctccaaactgattaaatatttgaagagaaaaaaaa

SEQ ID NO: 361817 - DNA, 697 bp, Homo Sapiens
  misc_feature (110)..(122): n is a, c, g, or t
  misc_feature (426)..(456): n is a, c, g, or t
agcgggtgaatcactgtgttttcagaatgatatttaacaacaaacccgtggtcaaaccaaaatagtgggttgaagtgtattattcatcttttagtgcattggcaattgcnnnnnnnnnnnnnggaatttaatataaggctatagagattaattcagtgtctaacatttgtatttatttaaatagttattgacctatgatgactttctagtcttaacattttatctttttatggttgttgtcctacctttcaaagatgtggttcttaataggttcactgaatgcacagttgaggcacttcttgtgacaccagttccccaagtagcgttaataattggggcctgtgtcataaaatgcacggatcattaataactaaatgtccctgacacttttcactacggggctggacttagtaactgaccaacttnnnnnnnnnnnnnnnnnnnnnnnnnnnnnnncgttagaacatgatcaaaaaatgtctccgctcagggatttatggtggattattgcagacagtgctaaaaatatagagcacaagacaagtttactaaattaaaattttattttttgagaaactgttatttgtataaattatcaagatttgtaggctttccttttgtagaaataattgttttatgtgccagagaatttcaattttgttttcaacaataaagcattgatcagaacttaccacgg

SEQ ID NO: 361818 - DNA, 2022 bp, Homo Sapiens
ctccgcattcccacccagtccagaaattgaaatactatcagggggcaagagcctttctctccagctacacactccatctcccgggagcaaggggaaactccgagaggagggcaacagagccagcatcttgccagggccccggaggaggggttccccgctacgcctgtgccggaggagttccagtcaccgagcgaggggcgcaagggtgggtgcatcctgcgctgcggcgggcgcgctacccagacgctggtgtgcagagccacatgaagcctgctggggactgggggccagggagcagcaagccagctgggactgaggcggacgctgtctcagggagacgctgactcgcaaagacactcccttccttgtgcctgggtaaaaagtctcctcctggggtccctggccatcctgaatatccagaatggtgtttctgaagttcttctgcatgagtttcttctgccacctgtgtcaaggctacttcgatggccccctctacccagagatgtccaatgggactctgcaccactacttcgtgcccgatggggactatgaggagaacgatgaccccgagaagtgccagctgctcttcagggtgagtgaccacaggcgctgctcccagggggaggggagccaggttggcagcctgctgagcctcaccctgcgggaggagttcaccgtgctgggccgccaggtggaggatgctgggcgcgtgctggagggcatcagcaaaagcatctcctacgacctagacggggaagagagctatggcaagtacctgcggcgggagtcccaccagatcggggatgcctactccaactcggacaaatccctcactgagctggagagcaagttcaagcagggccaggaacaggacagccggcaggagagcaggctcaacgaggactttctgggaatgctggtccacaccaggtccctgctgaaggagacactggacatctctgtggggctcagggacaaatacgagctgctggccctcaccattaggagccatgggacccgactaggtcggctgaaaaatgattatcttaaagtataggtggaaggatacaaatgctagaaagagggaatcaaatcagccccgttttggagggtgggggacagaagatggggctacatttcccccatacctactattttttttatatcccgatttgcactttgagaatacatctaaggtcatctttcaaaagagaaaaattggacacttgagtgactttgtttttagttttgtttttgtacattatttatgtgattgttatggaattgtcacctggaaagaacaattttaagcaatgtcatttctagatgggtttctaattctgcagagacacccgtttcagccacatctaaaagagcacagtttatgtggtgcggaattaaacttccccatcctgcaaattatgtggaaatacccaaagataatagtgcatagctcctttcagcctctagccttcactcctgggctccaaaagctatcccagttgcctgtttttcaaatgaggttcaaggtgctgctttgcatgcctgccaacccatggaagttgtttcttacttcttttctctcttatttattaaccatggtctgagagttgtttttgttctatgtaacagtattgccacaaaactataggcaaatcgtgtttgcagggagatttctgatgcctctgtgggtgtgtgtaagttaaagtggccacatttaagaaggccaagctttgtagtggttgcacagtcacactgatatgctgatttgctctttctcattgtatgtctatgctttgtcatcagtgctatagtaaattacaaagaaataggtagattgtatgaacatacccacaaatgcctatgatttaggttaccaatgtattctttctcatttggggttttgcttctgtctgtctgtttattggaaacttgtacttcaagtagggggaatcctaattctaataactccttagctaagttttattattcaggcaataaacatgttttcatgtaaaaaaa

SEQ ID NO: 361819 - DNA, 614 bp, Homo Sapiens
tgccgtgaatccatatgccatgccttaggaattgggggagcaaagacttgtggggtgaggcaggggaggatttaaaagggactttcttttcacaatgggaggcaggggtggaagctgcccagccctctggcttcctgccatcagttaatgaggaaactgcaaggtcagtgatccacttgactaagttaggatcccctccagaccccaccctagacctgtataggcaggtaccagggaaagttaaaagaatgaagactgcttgtctttcacccttcatccacctctctctccctccctctctctggggatgggaaaagcagtagagttacagtatgttcttgtgggtagaggacagaagagtgaccttccttcccctaagacgtgggttcagtctcaaactgcccagtgatctctcccttaaatcaggtggaaagatctcatggaaaaagtaattctagttaaacatttacagctccctggggcaatgccaccactgcagctactgcttgtgaagctttccagcatgaagtgccatatgctgcctctcagcctccatactcacttgactccaggagaatgactcagtttattattctcaatttgaccctatgtat

SEQ ID NO: 361820 - DNA, 406 bp, Homo Sapiens
cttaaatatgatcaaggaaaatagcttccagaatgtggtggttctgggcaacaaatgagattgtggcgacgtggagattaaaatatatgtatttgagctggggaatttgaatattgtgagtttcagatgttggaaatttgggattttgcagttttgtcttttgaaaatgatcaagtcttgtcagttcgtgccctctttccccatgttccctgggaagacgggtggtggcagagtgagaaggccactggttctgtgccgcagcacgcaaaatttagaattctacagactagctctatacgtagtgaggacccagatttagagaaactgaccaatatttatctccgcatttgtgtgtgtgtccaactctgtaggccaataaaccaacaagacaaatgaactgtgctcc

SEQ ID NO: 361821 - DNA, 675 bp, Homo Sapiens
  misc_feature (486)..(536): n is a, c, g, or t
  misc_feature (607)..(607): n is a, c, g, or t
  misc_feature (641)..(641): n is a, c, g, or t
tttgagaaaaaatataacatttattagagaagcagatacgagggtacaactaaaagatgccagacagagtcttttaggataagaatagaaagagacaatcatgttgctgtattcaaacaaaacttactcagaaccccagagtttataataaactcaagtgcggagccgcagcggggacctagctccccatgcgagaggcttcgcggctttccggcagttataaaaacagaaaggtcattaggcagcaggagaacccataaaacaaacagataaaagtacaacattaaaacaactcattcgagtactgcttttagtttttaagttgcagtatatacacacgtattctgtggggggaattatgaaaatatttaacagagagcaatcgaagaaccaaaaaaccacaaaagaaagtcacaatccaattgacccaccggaagttactctagtctaaatattttggcaattattaaataagcacatcgtagnnnnnnnnnnnnnnnnnnnnnnnnnnnnnnnnnnnnnnnnnnnnnnnnnnnaacaaaaggttgaccggcattataaaaataaaacagctgccactgagttatgggccctaagaaaacagtgnctttgccccacatcagatgggttgcaaggagggncagtgtttgtgggcaagttggacagagttataaa

SEQ ID NO: 361822 - DNA, 357 bp, Homo Sapiens
gcctcccattctattcaaagtcacccctctgctcactgacataaatacatatctgattgcctactttagagaggccaatcagaaactcaaaagaatgcaaccatttgtctcttatctacctatgacctggaagctcccttcctacttccagttgtcttgcctttgtttcaagttgtcccacctttccagaccaaaaccaatgttcatcttacgtatattgattgatgtgtcatatctccctaaaatgtataaaaccaagctgcgctcagaccaccttgggcacgtgtcatcaaaacttcctgaggctgtgtcgcaggcgcacgtccttaactttggcaaaataaacttactaaattg

SEQ ID NO: 361823 - DNA, 814 bp, Homo Sapiens
  misc_feature (1)..(1): n is a, c, g, or t
ngtaggtcaattcgtaacagtttatttgggacacaccctgaagctttggtttggaattaagaaatgagtttcagggaatggacaaaccattggttaaccagctgtccggggctatggaagaagatttcattttccgcgcatccactgtgtggcagtccaagtcctctagtgcaacgccatagcaaatataaagatttactatgcacgtgatacattttatgggagtggcctcaagccaagatagtgaatttatatgaagggtggtgaaatggtatttctttactactatagtagtttagttataacttggcatctataattgagctttctcatctgtcaaatgctatggttttcttaaaatgttacaattctagatcaatccaccttgtttttttattgtctacaaaccattaaatgtaaatattgtttttagagtcagtcattggctttgtcatttaccctttgagagttccacaagtggtagtagagtggtttaacgtctttcctctagtactaccagtattcataaatgtataccccttactgtaatttgttcctcttagaagtcagatcatctgatttatagaggattatgaaaaccagagtttttgaaaaggcttattttatacatacgtattatatagagaaacaaatgtttttattaaatgtttcattgacccaagtaatttaaaagtaatatgttacctatgtctttcaggaaaaataattatagcagctgatctgtaaatgactttaaaagctattttagtaatttaaataaatttactttcttggtttatactctcaaaaaaaa

SEQ ID NO: 361824 - DNA, 1097 bp, Homo Sapiens
ggcctccaggatcaactgtgggcaaagtgcctgcctctgacctcatcatggttctagttctcatacagaactccagaatttttaaagaactctataagtggattgcaaactaggatgctacataggattctggtattccacatccaatatggatttctagaatgctgtgattaaaggagccagccaggtgtaatacagtcaaggcagcccccagcctagagacaatctgtgaaatccaaagttggtggtgttgggaaagcagggggacatgtgtccctcagctcagcagaggctgtggtacaacatggtccttggtgaagacctgcacccctggaacctcccaccatcatcacaactgtagtctcatttgcagtggagaaaagaacccgacgtcccacagccagatatacacccagctccatgccagcccttcatgtttaccttttgctttgttaattacatgtcagactcctagagggcctccagactaataggaagcatttctgtaaccaacctgccacccactgattcagaaatggaaatcacattccacaatctatggcttccaccagctagcccaggaaatacttgaaatcagcattccaattagtgttgagtctcttgattgtgtcatttaccaattaaataactgagacctaagtctgggaacagagccacgaatctgcctttgagatgctggcagatctcaaggccatcaattattgggggagggagggacaaacactcccaatcatccaccagtcagactgaatgtgtagctggcgaggaattacttccacagctggcccagcacaagccctgctttggccacctgtctgcaagagaggcggcccctgtgcttgcaacgcttacgtgttgatcccagtgtccttttccaaatgagtgctgaagctttagaagtggccctctatagaaagaagtcaaaagatgaggccccttctagaatctaggataacaagagagatgacagagtgaggagtcgaaatgagattcatcatcaaagagcaatgcagcgtcgttaaaataaaaactgtgccttttaaaaagaaaaatgcaaatatagagcaaatccctaa

SEQ ID NO: 361825 - DNA, 690 bp, Homo Sapiens
  misc_feature (676)..(676): n is a, c, g, or t
cttggagatgtcccgggggcctgcacgcccgtcgtacccacccgcatccccgcgatagtcagcctgagccgcggcccagtctcgccgctcgtgcgcttccagctgcccaatgtgctgttcgcctacgcgcatactctcgccctgtatcacggcggtgacgacgcgctgctctctgacttctgtgccacactgctcggcgtttccggagccctgggtgcccagcaagtcttcgcctctgcggaagaagccctgcaggcggcagcccacgtgctggaagcaggcgagcacccgccggggcccctgggcacacgaggggctatgcacgaggtcgcccgcatcctgctgggcgagggcccgaccaaccagaaaggctacacgctggcagcactgggggacctggcacagaccctgggccgtgcccggaaacaggccgtggctagagaagagcgagatcatctttaccgggcccggaaaaagtgccagttcctcctggcctggaccaacgaaaatgaggcggccctcacacccctggctctagactgcgccagggctcaccaagcccatgctgtggtagccgaggaggtggccgccctcactggggagctggagcggctttggggaggccccgtgccacctgccccaagaactctcattgaggagctccctagctgaacgngttaccctggtcat

SEQ ID NO: 361826 - DNA, 498 bp, Homo Sapiens
ggcagccccgcgcctagccagcgctgtttcaagccctacccgctcatcaccccctgctacatcaagaccaccacccggcagctcagctcgcccaatcactccccgtctcagtcccctaatcagagccccaggatcaagaggcggccggaaccctccctgagccgagggtccagaactgccctggcctccgtagccgccccggccaagaagcaccgggcagacggcggccttgcggccggcctgagccgctcggctgactggacggaggagctaggcgcccgcacgccccgggtgggaggctccgcgcacctgctggagcgcggggtggcgagtgacagcggcggtggggtgtccccagcactggccgccaaggcgtctggggcccccgcggctgcggatggcttccagaacgtgttcacaggtgagcgcgccctgctgctggcctccgggtctcaagtcgcctgtcagtcagggccttcccctgccacccgccctccc

SEQ ID NO: 361827 - DNA, 232 bp, Homo Sapiens
gattaccgagggtatttggggtggggttgttttttgagatgtgtaattcttttatggagtttttaaaaagaattttcatattgtttttctaacatggcttcattaaacgtttaagtattttaaaaatatgtaatatttggaccagatgttgtgaataatagtagagataaagctattttattctgtatttttaaaactgttccgtacaaataaaagctctcctggacacaaa

SEQ ID NO: 361828 - DNA, 578 bp, Homo Sapiens
ttgttacttgaacaatctcagtctctaagtggtgggtggggacatgaagaggtgtgggtccaggttaggcaggagagagaacttctttggtctcggagtttggggtctcaagaattcaagtagccccatctctctctcgggcaagcccaaagctcaggtcccatacgctacccttagatcctatccccagggctagggtgaaccatgccaaaggaaggggccagcttctctgtgtgtgtgtgtagcctgtctcctagtctgcctatgtctttctctgctatatgtttctgtcctgctgtctgtcaaaagtctcacagagagagggcctcagggagctgctgaggggtgctgagcctggctcagggagctgggacccctcccctccaacacacatactcacagtgctttcctccttgtccctcctacactaggagcaagaggagggggctccaatgacactccggggttttaagacccaaggcacattcaatgcaaggggagcaaggatgggacaactccatcttctgctgcccatgtgaaaaataataaaaatcaagagccattggctgcccaaaaaa

SEQ ID NO: 361829 - DNA, 999 bp, Homo Sapiens
tggaccggtccggaattcccgggatggcccgcgaacttggccattcagccgccgctgtccccgctgcgcgccctcgcgcctctgcctgagaagccaggcgctgttcccccaccccagaagaggatggcaaaggtggctaaggacctcaacccaggagttaaaaagatgtccctgggccagctgcagtcagcaagaggtgtggcatgtttgggatgcaaggggacgtgttcgggcttcgagccacattcatggaggaaaatatgcaagtcttgcaaatgcagccaagaggaccactgcctaacatctgacctagaagacgatcggaaaattggccgcttgctgatggactccaagtattccaccctcactgctcgggtgaaaggcggggacggcatccggatttacaagaggaaccggatgatcatgaccaaccctattgctactgggaaagatcccacttttgacaccatcacctacgagtgggctccccctggagtcacccagaaactgggactgcagtacatggagctcatccccaaggagaagcagccagtgacaggcacagagggtgccttttaccgccgccgccagctcatgcaccagctccccatctatgaccaggatccctcgcgctgccgtggacttttggagaatgagttgaaactgatggaagaatttgtcaagcaatataagagcgaggccctcggcgtgggagaagtggccctcccggggcagggtggcttgcccaaggaggaggggaagcagcaggaaaagccagagggggcagagaccactgctgctaccaccaacggcagtctcagtgacccgtccaaagaagtggaatacgtctgcgagctctgcaagggagcggcccctccggaacagccccgtggtctacttcggacagggcaggctacaacaagcagtggcaccccacccctgctttgtgtgtgccaagtgctccgagccgctggtggacctcatctacttctggaagga

SEQ ID NO: 361830 - DNA, 1294 bp, Homo Sapiens
  misc_feature (43)..(79): n is a, c, g, or t
  misc_feature (1061)..(1091): n is a, c, g, or t
  misc_feature (1188)..(1188): n is a, c, g, or t
tgatcatcatataggggactggagcttaccgcggtggcggcgnnnnnnnnnnnnnnnnnnnnnnnnnnnnnnnnnnnnnatcaggccaaatcggccgagctcgaattcgtcgagagcggctcgcgcctctgcctgagaagccaggcgctgttcccccaccccagaagaggatggcaaaggtggctaaggacctcaacccaggagttaaaaagatgtccctgggccagctgcagtcagcaagaggtgtggcatgtttgggatgcaaggggacgtgtccgggcttcgagccacattcatggagggactgcagtacatggagctcatccccaaggagaagcagccagtgacaggcacagagggtgccttttaccgccgccgccagctcatgcaccagctccccatctatgaccaggatccctcgcgctgccgtggacttttggagaatgagttgaaactgatggaagaatttgtcaagcaatataagagcgaggccctcggcgtgggagaagtggccctccagggcagtctcagtgacccgtccaaagaagtggaatacgtctgcgagctctgcaagggagcggccctcctgacagccccgtggtctactcggacagggcaggctacaacaagcagtggcaccccacatgctttgtgtgtgccaagtgctccgagccgctggtggacctcatctacttctggaaggatggtgcaccctggtgcggcgccattactgcgagagtctgcggccccggtgctccggctgcgatgagataatattcgctgaggactaccagcgtgtggaagatctggcctggcaccgaaagcactttgtctgtgagggttgtgagcagctgctgagcggccgggcgtacatcgtcaccaagggtcagcttctgtgcccaacttgcagcaagtccaaacgctcctgaagggctgcccacccacagccagaatccacaggatcccaccgagaaggagagccaggtgtgccgagaccatcctaagggtccgatgtgacagcaagcaagtgaaataaacaatgatttgcttttcagtgagannnnnnnnnnnnnnnnnnnnnnnnnnnnnnntctaggttgggtggtggtagatccttgagggtcagtagtttcaaaaccaaaaatattctaagaagtcttaggatggagttccttttctttctgttgntgtttcccagctacaaccaactaaagacacaaatggcgttctgcaaggggactctgggaggagttttccagaatgcaattccgagtgagcaaatcgcatagctgta

SEQ ID NO: 361831 - DNA, 463 bp, Homo Sapiens
tgtaatcaatagacaactattggaaatatggcatatgttgacaaacacttaactagggaaatcaaagatataaatcatgtttataaaaaattaggcacgcaatcatgtgattcatgcttcaagaaaatatatgaaaaaagtgttactccattgtgttataaactagcagattttccctattttgaaatgcatgtaaacgggctcggctgattctgaaattgtactgtatcctttggtatttacttatatggtcaaatacttgtttgtaaaagtgatggttctgatacctttgatcaaacatagatacaaacctcagaaaatggtaaatgcaaagcagtttacgttgtaaatcatgatggtgtcctccagcacaaccatcccacccacacacctagactacagattctgatctgtgaatattttcaccaaagtgacatttaaacaagtggatttttcacaaata

SEQ ID NO: 361832 - DNA, 365 bp, Homo Sapiens
ctggtgtttgtgactggccaacaagatgtggctatgccaggggacatctgagtatgtgcccagtcatcttttttcacaggttgaagggagagaaaagattttgagttaaggtcattggctgctctactctgtcccctacctggtcacctagtgatagccccagtggagatactgtccatacaaggtcttcccagaggctggataccacagtaaaaggccaggccaggaggggtaggagactatggagatcttacctcctgataaatgtgctacaccccctaatttgagcccttcctttccgtgttccccaacaacctcatgcttacgtgatttttattcaaattaaaaattttcattgctacaga

SEQ ID NO: 361833 - DNA, 362 bp, Homo Sapiens
tgtcttctaaaaaatataaaaagtgaagttgggatttttggatttaaatggtacaaaaagaatatctcattttcccatgattaaagctaatcttcagatggaaagcttgcctggctacctagggtgcaccagagaatctgatccaatgcaagccagtcaatcctacaaatgtggtgagctagtcttccttcctatattttaataaatgtaaccaaaggccatctggaggtaggggaatgagaggtgaagaaacagaaaaatagaggttataaggatggaactaaaagttgtcagaagaggtatgagctgaagaaagaattactctcttttgaccaataaatacaattgggaaacactggaaa

SEQ ID NO: 361834 - DNA, 839 bp, Homo Sapiens
  misc_feature (756)..(756): n is a, c, g, or t
  misc_feature (771)..(774): n is a, c, g, or t
ggagcatcagatctttcctccccagagctggaagttggcgctggtggctgccatgatgagtggcattgcagttgtcttggccatggcaccctttgatgtggcctgcacaaggctctacaaccagcccacagatgcacagggcaagggcctcatgtaccgggggatactggacgctctgctgcagacagctcggaccgagggcatttttggcatgtacaagggtataggtgcctcctacttccgcctcggcccccacaccatcctctccctcttcttctgggaccagctgcgctccctctactacacagacactaaataacagccgctttcccagtctccaccaaatgagcactccttggccacttgtgcctccaccactatgtcctggtgactactgattaggtgacctttcatccatccatgggggacagccaaccccactccccatctgttctcagggttgaatcactacaagagatgagtttcccttctttccttgggtgttgctttaaaccttccctacccattccctgggtaactcacacccctctctcagggctgaacgagtcatcccaaagtgtatttcctcccactcaccactgccacccttgagtccctcctgctcccatgcacagttttaaactcctccctccaaaaccaaagggaattgagagacccaattcccaggcgtctgggacccaggtgtcctgttagattcaaaggcacagagattatattgattataaagcggaaaancccgacgggggagannnnacatggcggccgcctcgggcccccagaaacctttctagaccttccctttgggcccgcggggccca

SEQ ID NO: 361835 - DNA, 491 bp, Homo Sapiens
aaaccctaaacccctcttccgggccccagacccgaggtccgcgctcctgggcagtggggaagctttagtgagcaggcttttctctccgcagcaaacttgtagcccagacccagatgggccgccccagctctctcgggactaggcaggtgcggttgagttaatttttccgcattacaaagaaagatgacccagcccgcccttggactctcttttccccaaaatctcccaaccaaacccgcggtaacgttatcaaaggacacagagcccaggcatatctgtgtgtttatcttacaggcacacacgcatggttttctcttttatatgctagatttcatccctgacagcagaaaatgattggcaatggttctgacggagaacatgcaatagcgtggtccttaaaaacctgccattccttacaagtgccttagaaaggattcagggcgaaccaactgggttaattgcattcagtaaaataacacgattacaaaatt

SEQ ID NO: 361836 - DNA, 931 bp, Homo Sapiens
tcttagcattcagattgtattttgaatacttacacacaccaattgtagaaagcaaccctttatttgtagcaagtttggtttactcttctcccatgagattttgtctttctacattaactagtaagacataaagatttgaaactggaactatattatactttttaaccaatctctgtggcttcactcatgaaatttacttcagttaatatgagactgggggttaagttgtaactaatatgcaaaattgctttgtatatttggtgattttgtaatgtaagtgaattgattcttatttcactgatactattaatcatgcagtgtacaattcaaaatcatgcaatgtttcactttagaattggatttgaagaactcgactttatgtgatcatggtattggtatacatgtggggtggagaacttattttttcattttgtcacaataggtatatactgacaaggcttcaggaaaaaagttgttagaagattttttaatgtataataaagtccatgatttttgtttaataaaaccaaaaaaatccctcccctacataaattcccgacattaaacggacctctcccgttccctttcttaacattccccttttctccttatcagcttcttgttatctgttttgtccaccaatttttttcctgcccccctccttccttgtttttgccctacacacttttttcccttgtgtcttgtccagtggtttccctttcggtgatacttagctttcgttttttcccttattcttttaccacggccttcccggcatcccagtaactttaggccgccttaatcccccggtaacgatgatccacagccgtcgccatataactggcgttcactaaatattcccgatctaccccgccagggccattctattctcatacttcccccacttgtgcacacttctcatgtcataata

SEQ ID NO: 361837 - DNA, 1349 bp, Homo Sapiens
  misc_feature (535)..(558): n is a, c, g, or t
  misc_feature (1052)..(1065): n is a, c, g, or t
  misc_feature (1067)..(1194): n is a, c, g, or t
gaataaatattagattgatatagctgaaatgtgacttccagttctttgatattccccttgttattcaaatagaaatatggaaatgctttatatattactgttaaatttcttagtgcagaaataacattattaatagagtattgttttcaaaacagatgattaatttcaagaggtttaacagtgaaattgtgtcaatattttgcatttaaaatgaatttaattgaccgatattttctgtagttaaatttagtcacaatatcacatatgttcttcaagaaacacatgaaattattaataaagtaattaaaaaatttttaatgtataacagaattgaccaataggccagttttctggtaacttatgatagtagattgtttctttagaaactgggcagaagctctgcattctcacttgtactttgatttcttatttcttggtcaggcaatttgaggaaagaagaaatggcatggggaatatatatgttttgtttcttagggaaaacagtctgagaaatgaataaaaagcatgaagtacnnnnnnnnnnnnnnnnnnnnnnnntaccatggaaaaggatattcacagtagtacagttctcaatatttttaattagatgtcatatttttttaatatagtaaaaccttgggatatagaatattacatcttttgagaatgtatgtgtctctaagtaagtaaaatctaatgcgtataggagactgatagctaaaaatgaatggaacattaatgtacttttataattaaacctcttatctatcagaaattgtaagagaatagatacatgttttgaatgtaaagttgaaaagtctggtttactgaataaattgaaagtgatttataaaatctaaatttggactacttgcaaatgataagctattctagtagcctttagtttaaatccaacagaaatctagaagtcacaagcaaatatcttaaaggtaaaatccatctgggcactcatttaaagtatatcttaaaaaagcagcagcaaggtaccttgccatttttagcatattttcttcctctttcttctttcnnnnnnnnnnnnnngnnnnnnnnnnnnnnnnnnnnnnnnnnnnnnnnnnnnnnnnnnnnnnnnnnnnnnnnnnnnnnnnnnnnnnnnnnnnnnnnnnnnnnnnnnnnnnnnnnnnnnnnnnnnnnnnnnnnnnnnnnnnnnnncccactaacaccactcggctaattttgtgtttttaggagaagacaaagtttccccctggttggccccggcctgggtcctggaacctccctggacctccgggttattccaccccaaccttcaagccttcccaaaagtggcttggggattaacaagg

SEQ ID NO: 361838 - DNA, 450 bp, Homo Sapiens
  misc_feature (237)..(262): n is a, c, g, or t
agggaaataggaaagctttgtagtggccaagatgatcttacccattcctcagcttgactaaatttcagataagcttcttgacttaggtccctgactttccttttcttagagcatttactttagaagactttgaattgtaaattatttctctgcccctttgaaatgtaaatctaataaagatccaggtatgtctttcttgaggacctaggagccattactgtgaagtgtaatcaccgnnnnnnnnnnnnnnnnnnnnnnnnnntaagaggtctctaactatcagtctctgtgggagggtggaagcccagcttctcaaagtgccaatcagcaaacatagatggcataatcacattgaccaatgtcccttttaacattgtctcatagtttttctctagctcgccttaatgcttaaaatattcccaccttttgtttcaaaggaattaagttcaa

SEQ ID NO: 361839 - DNA, 593 bp, Homo Sapiens
aatcttgcaggccgcacaccctgggttgcatacttactactcaggggctttccccccagctttcagagcactgaattattgtgagctggtgactctgcaggcctgagtggtattagggttgtggaatgttgttgcatacacgtttatgagttaaccactatttaaatgatgctgctttttaaagttttttcaaagtacaatagatttttgaagtttcaggtaactggaaaaatctttaacttttgctttaagtgtttggggcaggataaaacaacatagaaaatataaaacaatttttgctttgaaaaatacagtgcaggtgaccatttactgcttattctgtaatccttactgtctataattaacttcagtaacactgaaacttgatgaaaagttttaaaaaattatttactgtagggacaaagttatatggaatgtttgttattttctataccatctgaatgcactgccagtgaagactgtaaagacagaacacactattttggagggaggacactaattgtttaaaatttttcatcatttgtgagtgataaaaagtttgtatagtttttataataaatccctattttgaa

SEQ ID NO: 361840 - DNA, 492 bp, Homo Sapiens
tagattgatgtagttgtttttgttatccctataatgtgacttttatttttaagtcattgtgtactgcatttgtttgtcactagttgggcacgtgccaataatattctctccattccttatctgccatctctgttttgcctgatttctcttcaactgaataatggctttttgcatggaaaaaatagtttttactattagacgtgtaaagggaagagagagctaatgtattggactttgtgagcctacaaggaatattttggatccctccaataaataagggctatgtactatatgtactatatagagttatcatgtggtggaagatacttgcaagtcatagatttatgggcaggaggatttgttactccctatatctaggctgaatgtaaaatcccttatgttgtatcaatgggggtaaaaactatttttatttgcctatgatatacttggtttctaataaagtgccctaggctctagtgagaactgaaaaaa

SEQ ID NO: 361841 - DNA, 485 bp, Homo Sapiens
  misc_feature (385)..(385): n is a, c, g, or t
gcggccgctgccgttgccgccacagccgtgcccgcagtgtcccaggcgcaactgggcacccgcgccgcgggcaagcactggtaacctagccggggcccgagggaagcggagatccccggcttccgacgtccttgggcaccgtcgcctccttccctcctagggcatcccctgcctgaacgaagacttccgccgcgaagcccgatagatcgggggaaaatggggccttcgaccccagcgggctacctgaaccaaggcgtctctctaagtggggcgcccgaaagtcattttggacggccacctgatttttaccctttgtttctgtgttttaagagggaatcctaaagtcaaaacaccagagacttgaagaacttgcaaactggcgttntaaaataaccggttaatttatttccacacagtttgtttttgaaaaagagctttcataatgtataaccctttccactttcatcgtcttatatatgaagcgc

SEQ ID NO: 361842 - DNA, 481 bp, Homo Sapiens
ttgcctccgggaccagcgcttccaaattctctggggcgtcccggcgcgcacacgctcctgaggcctcggcgttctgaggaaaggggctggcgtggcgacccgggtcctcgaggccgagatctggctgtggcccgcgaagccccgcttgcccgcgccagcgtcttgtcaccccgagccgagggcctgcgcgcggccgacagatatgggatgctggaggacatctgggggccacaaatgctccttctcctggagacgcaactcaagttctcatggagttttcattgtctcgtgcaatgccatcgaccttgaatttcagcataggacccatatgaagtgccactgttaatgctgggagcactccaggaagcagagaaaagttatgacatttcaagaaaaatctgaattgcttgatatgttccacagattgaggtctgtacctatggttgcccactatttcaatagtcagtgtaaggactattgt

SEQ ID NO: 361843 - DNA, 400 bp, Homo Sapiens
atggaaaagctgctttccccgggttccacttataacctccggtaggtcacagggttcaatgtggatctgacttaaaaacccaccagcatgctcaatcccttgttatccttatggaatctgtatgttaactctctgggtgttcaggcttctatttgactgctgttgtgaccctgtttgcaaaatgaatatgacactctgtggattatttgctctgtaaggcacaagtgcttcttatgattattttgacgtttccaagagcaaaagccaaatttaaactctcttcagcaaacttgagccttttcatctaattccatgtcactcacggccataactttccttgaccattcttcaccccatgtcttacataataaattgtggtcttgatcctggatttaaaaac

SEQ ID NO: 361844 - DNA, 942 bp, Homo Sapiens
ggatagtttcatttgttcttgcccacaagcttgaaatccaggttaaggtatccagcctttatcatataagcattgacattatccaggcctagtcagtagcagtagggtaacgggattgaaaaagatttgatggagaggaaagtatctaatattagtcatggttttgacctaaattgctagacagtcgtgccattcacaaagtcagaaaatacagcaggaagagacagcttttagaggggcagagaattagaggatggtggtagtaatgaaaatgatgcattcagtttaacaagtttaatttgagacagctatggtatagctaaaaacaaaagcccataaagttggagatagggaccagagtttaacatagcgatctaggccagaattgacaatgtttaagtaatggtggaatctgtcaataagacttcccagagtgttaatatatatcagaaatgcacacaacagaaccataggcaacaccaacacaggaagaaatagaagtcacctattgaaaactggaatggcccattcagaaagacaggagaattaggagagagtgagtgaaagaagccaagggtcaagaatgcagaagcaaaggaaggactaaaaagcctccacggacatcgataatcaagagattattaagatctttgctagaagagttcctttacctgtacttaactcccttaaaaagagaaaagtgatggaatgacttctgcaactgtagtcccagcaggaactgtgaagaccagctgccctgcaggatccagtttttcttgggaggttgtatctggtcataaggtaaacattctatatattctatgcctgctctagaattgaaagacttcagcagtattaaagcattttttaatcttatttgagctttcatattcttcaatggttcctttcgtaatacctgagttaataaaagtggtctgaaag

SEQ ID NO: 361845 - DNA, 549 bp, Homo Sapiens
aattgctaaacggatgttgtgcccagaattttatctagtgactacctcaacatacaggccaagcgttacctacaccaacacccaagccattaatttgaggtgccatgagaataggtgaaccacagcctaacaccatttaggtttttgtgtttttttcaggcttgcctctacttaaatatatttagatgagagagttctcttagacttctttctttgtaaggaagggttatttggggaagtgttggaaaaaagattagggcagggtacccttagtttatatagggtacaaaagaatgggaaacatcttccctttcttctttaatctctgaagtcatgtttggaattacatataatgtagcaggtactggagaggacctgaatttcaagcttctgatttagctgtttgtaaacttccaagttttgcttgactaaagaatgctgatcttttttgggagtctgatctccttctaatatcagaaagtgctttttatattccagattgcttgaattaaactgtttggattaaagaacatatatggagtttcctca

SEQ ID NO: 361846 - DNA, 897 bp, Homo Sapiens
ttttttctaaagaaaagaagtttaattggctcacagttccacatggctggagaggcctcaggaaaggtacaatcatggcggaagccacaggggaagcaaggcacgtcttaccatggcacagcaggagagagagagcaaagggagaagtgctgcacttttaaaccatcagatttcgtgagaactcgttcactatcaacagaacagcaagggggaaatccctccccatgatccaatcacctcccaccaggtccctcccctgacatgcggggattacaatttgacatgagatttgggtggggacacagagccaaactatatcatttggttaaagaagtaagtggcctgtatttaacttttgggactgggaaaatgaattaaaataattctttattttacagatattaaagtaattgtgaaataaaagaaaaaattgtctgataaaaccacatctcatagaaacccaatgaatgcaacacatctaaaattttatctgcaaaaaacgagagaagacttgcccttctgtcagtaaagcacagataaagagaagtaaacttttctggattgaggcaataattgggcatcaagagtccacagtgacaactgaggctggcagtgcaaatgtcacacctcttaggaatgactttccttgcacagtgctctcctcagggcaccgttgacctctacattcctcaggttgtaatcagggggttagcatcgggttgaaagaactgtacaatagaacccaggaccttctgctgcctcctcaggatggcggggactcagggggccatgtaccttgacgatcgcgcgctgccaaagaagcagttccactacgccagacgtgccacgagccacgctgccacggcccttctgccgcccgtcccaaaactggatccc

SEQ ID NO: 361847 - DNA, 1120 bp, Homo Sapiens
cgactagaagtgtaaagggtcataagtaaagaggcggagtgtgagagaaatagagagaacggggggaaccacagcgaattgcaacacgaggcgaatctaagcagcgaaggaatcaatcgataaacgggctggaacaaaggagagattagcgatagcggacgtgagactgggtcatattcgtggttagagctgtggggtgggggggaatgtagtctatttaataggcgggtggtgagtagatagaggtgtagatggaaaaaaggggggaaacaaacgaggataaggagtgtaagatagggggtcggagatcgtgaagtggcgagtagaatgagaaggagcacgggaggcgagaacaagtcgcgagggatgaatgggagatccacatcgactcgatctggacgccagcacgcagcctctctactggaatcgctggctaacacacagtccgttctagggccgacactgatgcgagctctcgtgtgggtctatctacatggtggggataaccctagggccggttgtccaaaggtaaaaacatccaacggggttggagtttttacaaagacaaagggcgggttagatgggcgtcgtataacagcgagtcaagccttaacgtgcagaccctctacctctgtttttagggggcctgtatatgccacccctccaccctgctgggggtggtccttaccaccggttctctgttctcctggaagtccagggaagaaggagggccccagccttaaatttagtaatctgccttagccttgggaggtctgggaagggctggaaatcactggggacaggaaaccacttccttttgccaaatcagatcccgtccaaagtgcctcccatgcctaccaccatcatcacatcccccagcaagccagccacctgcccagccgggcctgggatgggccaccacaccactggatattcctgggagtcactgctgacaccatctctcccagcagtcttggggtctgggtgggaaacattggtctctaccaggatccctgccccacctctccccaattaagtgccttcacacagcactggtttaatgtttataaacaaaatagagaaactttccttataaataaaagtagtttgcacagaaaaa

SEQ ID NO: 361848 - DNA, 1154 bp, Homo Sapiens
  misc_feature (397)..(443): n is a, c, g, or t
tttattatacacggtcggtaagaatgttctaaataatttcctgggaccaaattttttgccgcgatgcatatttcgcgttgggtgtagcaccaaaacaccgtcagatgtgtatttgtcccctccggggcgtcttaatctctcttcgaggggagggttgtgcccgccgaaataggctgccacgccacaccacgaatgaggggttctctttcccccaagaaggtctcccacactagccgcgtgcgttcccccgcgccacgccacgctgtgtttttacagcctcggcgcccctctgtctctgcgtttttattcgctcggcccccctttgggggccccctttgcaaaaaaaaggggtggcaaatggggccccccgcggggtaattttttggggccccccccnnnnnnnnnnnnnnnnnnnnnnnnnnnnnnnnnnnnnnnnnnnnnnncataaatatttatattttttaatgaaatacacaccaaaaaaaagcacacatgcagagaattcacaaacaatcaaatccttgggaaaggctctgccatttgttcaacaaggtcaagtgtcattaggagcacagaacaaccgaatgtaaaatttctttccaggagctttccacgtggttggaataaacacaatttagaccatgcaaaactcttaatgtatattggtctgggaacttaaagatggaaacagagaatacatagggagctatgcaacacaccaagggccagtatccacaataataataacagtgacaacagcaataataatatacaatgctataagattattaaaatctattctataatgcacagagaagtacctgcttgaagccattaaatatatgacagggtctgtcttcagtgcaacatatcaaatttggcaattgaagggtatatcaaatatatattttttgctttcaaaatgtggaacaaactaaaatataaggcttttctgataaactataaaaatttaatcagcacttggatctaatgacatatctttgtaatacttcctctgcagatacattcacttagttcaaaccttaacatacaaagttagtctcaggaggatcatatttccttccattcatttcttataaatattgttatccacttgaagtcgttctgatgaaggaatttcctccctatttttt

SEQ ID NO: 361849 - DNA, 337 bp, Homo Sapiens
ttttttaatttataaatgaaagaggtgtaattgactcacagttccacatggcgggggaggcctcaggaaacttacaatcatggcggaaggggaaccaggcacatcttacatggtggcaggcaagagagaagagcaggggaaaccaccacttacaaaaccatcagatctcgtgataactcactcactatcagaacagcatgggggaaccacccccatgatcctatcacctcccaccaggtccctcccccaacacatggggattataattctgattacaattctagataagatttgggtggggacacagccaaaccatatcaaacaaacaacctgcaat

SEQ ID NO: 361850 - DNA, 302 bp, Homo Sapiens
aatttataaaggaaagagatttaattgactcacagttccacatggctggggaggcctcaggaaacttacaatcatggcagaaagcacctcttcacagggtggcaggagagagaatgagagccagcaggggaaatgccataggcttataaaaccatcagatcttgtgataactcactcactagcatgagaacagcatgggggaaatcgcccccaagatgcaatcacttcccaccgggtccctcccacaggaactacaattcaagatgagatttgggtgaggacacaaccaaaccatatcagga

SEQ ID NO: 361851 - DNA, 509 bp, Homo Sapiens
gggacgtcgtctacaacgcagcgatcggagacggctccaacctctgccttgagcccgtttcaaagtcacttccacattttcaggtatccttatagtagcgccccattctgagataccaatttactgtataagtccattctcacacggctatgaagaaatacccaagatagggtaatgaataaagcaaagagatctaaatttgctggggaggcctcaggaaacttacaatcatgacataaggcacctcttcactgggcagcaggagagagaatgagtgccagcaggggaaatgccagatgcttaaaaaaccatcagatctcgtgagaactcacaatcgtgagaagagcatgggggaactgcgcccatgatccaggtacctcccactgggtccctcccacgacaggtgggaattatgggaactacagttcaagatgagattcatattactatgtctagttgttatggctaatgaaataacaactagacaaggtagaacccgaggggatcct

SEQ ID NO: 361852 - DNA, 649 bp, Homo Sapiens
gcggccgctgtggcgcgcggctaccccaagcccctggccgagctgccggggcgcccgcccatcttctggcccggcgtggtgcagggcgcgccctggagggacccgcgtctggctggcccggccccggccggcggcgtcctggacaaggacgggaagaagaagcactcgcgcccgaccttctcgggccagcagatcttcgcgctggagaaaaccttcgagcagaccaagtacctggcgggcccggagcgcgcgcgtctcgcctactcgctgggcatgaccgagagccaggtgaaggtctggttccagaaccgccggaccaagtggcgcaagcggcacgcggcggagatggcgtcggccaagaagaagcaggactcggacgccgagaagctgaaggtgggcggctcggacgcggaggacgacgacgaatacaaccggcccctggaccccaactcggacgacgagaagatcacgcggctgctcaagaagcacaaaccctcgaacttggcgctggtcagcccgtgcggcggcggcgcgggggacgccttgtgaggacccgcggggtgggggcgaatctatttttgcagaatccgggggcggccccgggtgggcgcgagtcgctttgtatcatcaataaattatttaacgggtc

SEQ ID NO: 361853 - DNA, 952 bp, Homo Sapiens
  misc_feature (461)..(533): n is a, c, g, or t
taaagacccgccccccggttcgatgtccttccaagaatgaagtctttccctggtgatggtcccctgccctgtctttccagcatccactctgtcttgtcctcctggaagtgtatctcagtcagccagtggcttcttgatgatggcggtggaggtggtggttgtagtgtgatggatcccctttaggttatttaggggtatatgtcccctgcttgaaccctgaaggccaggtaatgagccatggccattgtccccagctgaggaccaggtgtctctaaaaacccaaacatcctggagagtatgcgagaacctaccaagaaaaacagtctcattactcatatacagcaggcaaagagacagaaaattaactgaaaagcagtttagagactgggggaggccggatctctagagccatcctgctgagtgccctgtgtgtaagtcctaataaactcacctactcaccnnnnnnnnnnnnnnnnnnnnnnnnnnnnnnnnnnnnnnnnnnnnnnnnnnnnnnnnnnnnnnnnnnnnnnnnngagagggggagggcgcgcgcccgaaagatatccccctacggggggcccccctgcagcagcggacccgacgatgttttgagacaagaaggggcgccccccagaggagggctcttttatttaagcgcaggcggcgcggcgcccctctaaaacacacctgggacgggcacaaacgagcgcaccggggcaacttatcgtgggaagaagcaacccacttctcgcgagggggggcgaaaaaggggggagcacaccacaccccagagaaaattaaaacgccacggggggacaatacaaccacctcacaaggtgagtaatggggtgacaacaacagcggcgatgagctagcacgcgcggaaacacatgtcgggcacagagcgaccgatgaacttcgagaaatcattattcacaacggcgggatcagt

SEQ ID NO: 361854 - DNA, 681 bp, Homo Sapiens
cgagtctagactatgaggagccccgtctcatttcagttccaaggagcagggcctgcgcccgtggtctcatagagcctggcctgttctggaagagcacccagttgttccttctaggctgcccaagccccactgatgatggctgagagggaagaggacgacgacactgaggaagcctgatgcagctacggcccacagaacccttgccttcccagtgctgcgtcagtggctgctcaccctgtgtgtttgacctctatcaccgagatctggcaaggtgggaggcagcccaagccagcaaggacaggagcctgctgcgtgggccagagtcacagagctgcccctccaagctgaacccagagaccttcgtggccttctgcatcatgtgccatggacaggctcactaaggacacctaccgtgtccggtttgctctacccgggaacagccagcttggcctgcggcccggccagcacctcatcctacggtacactcaggtagcgggaggaccaaagcttcacagccatgctttgctattttgctagctgctggccttgaccaactagcgtactctcccttaagcctccatttgtcatcttcaagatagtcatagtgacacatgactcagagagttcttgggattgaactagataatgcattttcctaataaataataacacaatcaaaaa

SEQ ID NO: 361855 - DNA, 1273 bp, Homo Sapiens
  misc_feature (21)..(21): n is a, c, g, or t
  misc_feature (98)..(219): n is a, c, g, or t
gaagggctgggtaccggtccnggaattcctcgggatctacccagagactgggaggaacctggaaaatcctcacgtgaggtgaagcgcaggcgagtagnnnnnnnnnnnnnnnnnnnnnnnnnnnnnnnnnnnnnnnnnnnnnnnnnnnnnnnnnnnnnnnnnnnnnnnnnnnnnnnnnnnnnnnnnnnnnnnnnnnnnnnnnnnnnnnnnnnnnnnnnntgctggccaaggagcagggcctgcgcccgtggtctcatagagcctggcctgttctggaagagcacccagttgttccttctaggctgcccaagccccactgatgatggctgagagggaagaggacgacgacactgaggaagcctggatgcagctacggcccacagaacccttgccttcccagtgctgcggcagtggctgctcaccctgtgtgtttgacctctatcaccgagatctggcaaagtgggaggcagcccaagccagcaaggacaggagcctgctgcgtgggccagagtcacagagctgcccctccaagctgaacccagagaccttcgtggccttctgcatcattgccatggacaggctcactaaggacacctaccgtgtccggtttgctctacccgggaacagccagcttggcctgcggcccggccagcacctcatcctacggtacactcagagggatagtagatgacttagaaattcagagagcctatacgcccatcagccctgccaacgcagaagaatactttgaagtgttaattaagtgctacaagatggggctgatgtcccgggtatgttgagtcctgggagagtaggagacacagctttctggcgaggaccctttcggagatttcttctataaaccaaaccaggagagctcctcagagcagcttccctggagttaccaagagaaaacccactttgggccactgggccaggacctaattaaagagctggtcagctgctgtcggagaaagccattcgcactggtctgtggctcggctgagttcaccaagaatagccaggtggctactgtgcgcaggcctcactgaggactcctattttctctttctagcccggccctctccttcaaaagcctaggccatggaccctgctacttgggacccaggaagggaccacagactgggaatccgaagaaccggaattccaagccctggtccctgctgctcattttgccaaggtgaaccttgggccaaatgttctttacttgcttcagaaacaccctacattttcaatcgggcccccatgaaga

SEQ ID NO: 361856 - DNA, 838 bp, Homo Sapiens
tgctggccaaggagcagggcctgcgcccgtggtctcatagagcctggcctgttctggaagagcacccagttgttccttctaggctgcccaagccccactgatgatggctgagagggaagaggacgacgacactgaggaagcctggatgcagctacggcccacagaacccttgccttcccagtgctgcggcagtggctgctcaccctgtgtgtttgacctctatcaccgagatctggcaaggtgggaggcagcccaagccagcaaggacaggagcctgctgcgtgggccagagtcacagagggatagtagatgatttagaaattcagagagcctatacgcccatcagccctgccaacgcagaaggatactttgaagtgttaattaagtgctaccagatggggctgatgtcccggtatgttgagtcctggagagtaggagacacagctttctggcgaggacctttcggagatttcttctataaaccaaaccagtatggggagctcctcttgctggctgcggggcacgggcctggcccccatggggcctatcctgcaaagcatcacagacaatgagaatgaccagaacttttgtcactcctggtcgggttgcttcaagaccctttgagagcatctaacctgaaaaacttccctccaaaaacaggggcccgtttctgggaatgggccgtaaccttcctttgggactcagcccaggaaaagcttccctcaaaagcagctttccccgggaggtttacccaagaaaaaaaccccccttttggggccccccctggggccacggaccctaaatttaaaaaagactgggtcacaactgtgcttggccg

SEQ ID NO: 361857 - DNA, 237 bp, Homo Sapiens
  misc_feature (100)..(121): n is a, c, g, or t
atatatataaagtactttgcacagtgcctggctcctggttggcgctctgtgaagcttaactgcactccagcctgggcgacagagcgagactcttgtctcnnnnnnnnnnnnnnnnnnnnnngaacacagattccttgcctgggtcccaatgctgactgtgccccttaccagctgtgtgaccttgggccccaagcaaagtgccccaagcaaagtggacataatgaaagtacatatagt

SEQ ID NO: 361858 - DNA, 903 bp, Homo Sapiens
  misc_feature (19)..(19): n is a, c, g, or t
  misc_feature (110)..(111): n is a, c, g, or t
  misc_feature (122)..(122): n is a, c, g, or t
  misc_feature (139)..(139): n is a, c, g, or t
  misc_feature (221)..(221): n is a, c, g, or t
agtatcatgggccccaggnttaccttaggttccggtctgttgtgtgggaattgagcgataccattcaccagacccagtaggccatgatacgattaatcgctcacattagnnaattggccctnagccaagattcggcacnagtcttaacccgtgccggggtgagattcaccctcgaagttttctttctgacttttgattttacattcctagtacagtggagnaagcccagccggccctagaatccagtgtcgtccgtgagtgcttggctgggtgttcaagtgcattcttccagcctgagaccgcgtgaactcgctcatcgtgagggcgagaggaggataagcccattgggctgtcggctgagagtgaggtgcgggattgctgatgaaatccttggcatcgtcggagatctcatcgaatgcctcgtcgtcgaagtcccaggtggctgaggtaacgttggccaaggtttcgttatcgttgtctcccatgaagggggaaaggccactgactctggagagacaagagcaggacagcaggtgtggctaggagagggcgcgacgaccagatgagggaattgaggcacagcccaggctcaagtcacctgcccaaagattcacagccagtgagattggaagccaggtatctgcctctagagcctgtcctcttaaatgctatactatcctaacatttctgtaaagatgaagtaaattgcagtgttcagcactggcaccaggcctggtccacagtaaggaggcggtccatgcccggagatctcatgcagttctgctgggttccctccactgccttaccaagctgtgagtgcaggaatgactttgtgaccagcagcttaagccaaataaactttataaggtaagaattccaagaaaaaacaaaactctccagcgc

SEQ ID NO: 361859 - DNA, 440 bp, Homo Sapiens
cgggcgtgaaggcagggtgcgagctctgcccttggcccagccctgcgtgggcgccgtcccagattccgggcggtgcggggtgcagagatctggagagacttgcgggctccccagcgcaggctgctctgggatttcgttggaagatccggcagagccttggaggagagggcccgggaggctgtgtgtgcagcggaaacttgtacgaatgcccccacagcggaaatggtgcgcacgagtaatttctgcggtgcacccttttaaaaattgacaagtgaacaagatcaattttttaagaaagcaaaggtagaaaacaaaaggcgtgcgacttcttgactggcttgttcccgcctttcttccttctctatactcagatcagaaacttttctttaattgctcttattcagtgcgacaacttttaataaaagcatttgcattttaaa

SEQ ID NO: 361860 - DNA, 497 bp, Homo Sapiens
ccttgcggccgccaggatgtgcccccggccccgtcgtcgccgcgcccgcgcccctcgccccagtacgtcttttttcgtttcctaaatttcttatttttgtccttgcaagtggtcctgtctggtgtgaaccgtcagcacagatggcctcctggagcttccccgagtcgttcgctgggggaagcgggcggtgagcggccagcccgggcgctccgcaggccgcgagctcccggcagggctggtggcgggggtccgcctgggggaggaatccccgcctgctccatcggacccggcctggcgcggctcgcggcgctcggcgggctcccttccattctagaatcttcccgcttgcttcccagcccgcgttcttccgcctgcctttaattgtgtaagtttgacgaagtcagagctttgggttccaggaaaagcgcaggagggtcatagaggaagggagggcgcaggttggagtcaggtccaaacagtccctatcgccacttttg

SEQ ID NO: 361861 - DNA, 557 bp, Homo Sapiens
gcggccgccaggatgtgcccccggccccgtcgtcgccgcgcccgcgcccctcgccccagtacgtcttttttcgtttcctaaatttcttatttttgtccttgcaagtggtcctgtctggtgtgaaccgtcagcacagatggcctcctggagcttccccgagtcgttcgctgggggaagcgggcggtgagcggccagcccgggcgctccgcaggccgcgagctcccggcagggctggtggcgggggtccgcctgggggaggaatccccgcctgctccatcggacccggcctggcgcggctcgcggcgctcggcgggctcccttccattctagaatcttcccgcttgcttcccagcccgcgttcttccgcctgcctttaattgtgtgtggacgtggggaggatcttctaagtccctccaacgaaggcaagtgtgagactctggccctttatttgtaagaagcaagccttcagattgcagaagtgtcgcgcgggtcgccgtgcgttgcgcgagtgggaagatggaggaggccggcacgctgctttcgtggacgcaagtgaa

SEQ ID NO: 361862 - DNA, 150 bp, Homo Sapiens
agttaaaatgctttacctcaatggttgagatattttgaatggatttttcaagggggggaaatgcttattataataataaaccaaaatacttaacagaaaattgtcagctattctgacaaaaataaacattttgagagactttaaaaaaaa

SEQ ID NO: 361863 - DNA, 343 bp, Homo Sapiens
gggtctgaaaccagaaaattctttattgcaaaggtacaaaagcagtcacagcagcaggacccacggcaataaattaggggggggccgcagggacggggcagggcggcggcggccaaacacgggcccacatgtgatctggtttcaataatttatatcatgataaaaagcagcacaaaaaataaataatgaaatggaactgccaagtagcacaaaagccagggtgaggcggtgtggcggcgtggcggcatagggggccggggtccccacgccctggaaacgcaaagacctggatctctttgggaagccggaggcacggagaccgaaaacaaacccacgtgacaaa

SEQ ID NO: 361864 - DNA, 1182 bp, Homo Sapiens
ggtccggaattctcgggatgcaactacctgtaaatgtcacgtaacacccaaggagactgtgttacttatctgctcaccagtgggaggagaagattgtctgtctcagctttgttaaccagctttcttgggatttctccataggcaatggtggcttgctatccgggaaatggaacaggttatgttcgccacgtggacaaccccaacggtgatggtcgctgcatcacctgcatctactatctgaacaagaattgggatgccaagctacatggtgggatcctgcggatatttccagaggggaaatcattcatagcagatgtggagcccatttttgacagactcctgttcttctggtcagatcgtaggaacccacacgaagtgcagccctcttacgcaaccagatatgctatgactgtctggtactttgatgctgaagaaagggcagaagccaaaaagaaattcaggaatttaactaggaaaactgaatctgccctcactgaagactgaccgtgctctgaaatctgctggccttgttcattttagtaacggttcctgaattctcttaaattctttgagatccaaagatggcctcttcagtgacaacaatctccctgctacttcttgcatacttcacatccctgtcttgtgtgtggtacttcatgttttcttgcccaaaactgtgttgatcttcagatactctctttgccagatgaagttatttgctaacctccagaaaattcctgcagacatcctactcggccagcggtttacctgatagattcggtaatactatcaagagaagagcctaggagcacagcgagggaatgaaccttacttgcactttatgtatacttcctgatttgaaaggaggaggtttgaaaagaaaaaaatggaggtggtagatgccacagagaggcatcacggaagccttaacagcaggaaacagagaaatttgtgtcatctgaacaatttccagatgttcttaatccagggctgttggggtttctggagaattatcacaacctaatgacattaatacctctagaaagggctgctgtcatagtgaccaatttataagtgtcccatggggcagacactccttttttcccagtcctgcaacctggattttctgcctcagctccattttgctgaaaataatgactttctgaataaagatggcaaccc

SEQ ID NO: 361865 - DNA, 1064 bp, Homo Sapiens
  misc_feature (154)..(221): n is a, c, g, or t
  misc_feature (224)..(233): n is a, c, g, or t
  misc_feature (350)..(421): n is a, c, g, or t
  misc_feature (478)..(539): n is a, c, g, or t
  misc_feature (869)..(908): n is a, c, g, or t
ggtatcattcacttagaaatcaataataatttcaaaaatagaaaaattctattaagttcataaattaagaaatacacttttaaataactcatggatcagacaataaattacaatgaaaattagaatatatttgaactgagtagtgaaagtgctnnnnnnnnnnnnnnnnnnnnnnnnnnnnnnnnnnnnnnnnnnnnnnnnnnnnnnnnnnnnnnnnnnnnttnnnnnnnnnngattgaaaatgaacctagtagttaaaatattctaagaatagcaaattaaacctgaagaaaataaaggaaataataaagaacaagaattaatggagtagaaaatgaagataaagtggnnnnnnnnnnnnnnnnnnnnnnnnnnnnnnnnnnnnnnnnnnnnnnnnnnnnnnnnnnnnnnnnnnnnnnnncacaaacaaccaatatcaggaatgaaaggatattacaaatcctagagtcatctgacnnnnnnnnnnnnnnnnnnnnnnnnnnnnnnnnnnnnnnnnnnnnnnnnnnnnnnnnnnnnnntaaactatggaagagccaaaattgacaaatgaaaaaatagaaaattcgagtagttccctatctgctaaagaagtggaacctatagttactttatttgcttttccatagtgaaacaacaagcctagatggattgattcgtcaatggaaagacaatcttaaattcttacaaagagcagtagaaatgcaggaaccctccccaactcattttatgatgccagaaaacctagataccaaaacctggcaaaaactttatgagaaagggaccgtatttcattccccccaacatcaatgcaaaaatcccaaacaaaatactagcaaactaaactacgnnnnnnnnnnnnnnnnnnnnnnnnnnnnnnnnnnnnnnnnaatcccagtgtctttttatgcatgtggtgagatgaaattgtgatctttgtgtgacctccagctgctgtcttgtcttgtaaaatatgtccaaatgtttaagaatttctaagcaaatggtcccttaatgaagtctgcagagttcaataaaaggtatgg

SEQ ID NO: 361866 - DNA, 466 bp, Homo Sapiens
  misc_feature (357)..(398): n is a, c, g, or t
gcggccgcgccctggtcgtgcgcaaggtgccccccggctactccatcaaggtgttcgacttcgagcgctcgggcctgcagcacgcgcccgagcccgacgccgccgacggcccctacgaccccaacagcgtccgcatcagcttcgccaagggctgggggccctgctactcccggcagttcatcacctcctgcccctgctggctggagatcctcctcaacaaccccagatagtggcggccccggcgggaggggcgggtgggaggccgcggccaccgccacctgccggcctcgagaggggccgatgcccagagacacagcccccacggacaaaaccccccagatatcatctacctagatnnnnnnnnnnnnnnnnnnnnnnnnnnnnnnnnnnnnnnnnnncttgtaattatggagtcatttttacaatgtaattatttatgtatggtgcaatgtgtgtatatggacaa

SEQ ID NO: 361867 - DNA, 456 bp, Homo Sapiens
atttttctggctttggtctgttctccttccttacaggctaagccctggctccatgcaactgcattctttgatttcacttgttccttcatctacatgttttgttcatttgcagccagtttttactgagtttgtggcaatcaggaatgcatttgctaagcaagtatgactttaattccactccatggctcaatcattcacatgaggtgagcttcagcctgagatagcaggcgacagacttcttgcgtttcaaaactgccatgcccccctgtgatgctcccgtgaaggaatgcactttgccttgtaagttcctgggaaaggggtatgttttctctccaggtgcagccagatctcacaaagtacaaaacgaatgcctttcttttcttgtttataatggtcactcactgtgtttggttactgtcaagaaatcaataaatgtgtttaacaagttacccagta

SEQ ID NO: 361868 - DNA, 489 bp, Homo Sapiens
  misc_feature (32)..(32): n is a, c, g, or t
  misc_feature (59)..(59): n is a, c, g, or t
  misc_feature (67)..(67): n is a, c, g, or t
  misc_feature (348)..(348): n is a, c, g, or t
aaacgagttaaattccaattttcctggccttnggtctggtcctcccttcccttaaacgngcctaaanccccccggctcccatgcaaactgcaattcctttgaatttccacttgttcccttccatcctacatgttttgttccatttgcagcccagtttttacctgaagtttgtggcaatcaggaatgcatttgctaagcaagtatgactttaattcccactccatggctcaatcattcacatgaggtgagcttcagcctgagatagcaggcgacagacttcttgcgtttcaaaactgccatgcccccctgtgatgctcccgtgaaggaatgcactttgccttgtaagtncctgggaaaggggtatgttttctctccaggtgcagccagatctcacaaagtacaaaacgaatgcctttcttttcttgtttataatggtcactcactgtgtttggttactgtcaagaaatcaataaatgtgtttaacaagtt

SEQ ID NO: 361869 - DNA, 878 bp, Homo Sapiens
atcaggccaaatcggccgagctcgaattcgtcgagagcggaggctgctctagcaggcactcccaatgccagactaatcagctggatgtgtgcagtgagctctatagaggagcaatgcagagcatcagtttacaggtactatggaaagaacatctccttaactctgtatgatgaagcaaataccaatacaatgaaggccacggaaaggtatgatatatttgatccaagacagtccattcaagtccgggaatctacagtggtgacaaggacatgggactcctcctgccagattacagatggttcactacagttgacatcctggctgacaactgtgaaaaagaaccttggattattttattttatttttgtgggacaccacaatcccaaatccaaaggacgcatcaggcttcaagctccctgtagaattcgaaaataaccttttctaatgaggatgtctgatactgttactgtaaaagatgaaactgcaacaatgaaggatttggaggcagaagtgaaagatacaaccagagttgaaaatcttatcaaatcagaaaactatgggaagattttggtagagaagaatgaacattgtattgagaacaatatagatttgcaggtaaacaggaatttttctctggctacaaatactaaatattcagtatatatttatgtttattttcatacaaaactcacttctcaaaattctaaaagggtaagttgacccttcgtgacatgcttactagctggttttggagccagttggattagctttgctgtgagtctttaacttggcttgtatcatgtaatatacttctttattcggatgtggctaagtgcatttaatgggttctacttctcattcaccctttccctattccg

SEQ ID NO: 361870 - DNA, 1219 bp, Homo Sapiens
  misc_feature (937)..(952): n is a, c, g, or t
gggacatttcctaatcaagaagttggcgtgcagctgggagagctagactaagttggtcatgatgcagaagctactcaaatgcagtcggcttgtcctggctcttgccctcatcctggttctggaatcctcagttcaaggttatcctacgcagagagccaggtaccaatgggtgcgctgcaatccagacagtaattctgcaaactgccttgaagaaaaaggaccaatgttcgaactacttccaggtgaatccaacaagatcccccgtctgaggactgacctttttccaaagacgagaatccaggacttgaatcgtatcttcccactttctgaggactactctggatcaggcttcggctccggctccggctctggatcaggatctgggagtggcttcctaacggaaatggaacaggattaccaactagtagacgaaagtgatgctttccatgacaaccttaggtctcttgacaggaatctgccctcagacagccaggacttgggtcaacatggattagaagaggattttatgttataaaagaggattttcccaccttgacaccaggcaatgtagttagcatattttatgtaccatggttatatgattaatcttgggacaaagaattttatagaaatttttaaacatctgaaaaagaagcttaagttttatcatccttttttttctcatgaattcttaaaggattatgctttaatgctgttatctatcttattgttcttgaaaatacctgcattttttggtatcatgttcaaccaacatcattatgaaattaattagattcccatggccataaaatggctttaaagaatatatatatatttttaaagtagcttgagaagcaaattggcaggtaatatttcatacctaaattaagactctgacttggattgtgaattataatgatatgccccttttcttatnnnnnnnnnnnnnnnntaatgaaacacagtgaatttgtagagtgggggtatttgacatattttacagggtggagtgtactatatactattacctttgaatgtgtttgcagagctagtggatgtgtttgtctacaagtatgattgctgttacataacaccccaaattaactcccaaattaaaacacagttgtgctgtcaatacctcatactgctttacctttttttcctggatatctgtgtattttcaaatgttactatatattaaagcagaaatataaccaaa

SEQ ID NO: 361871 - DNA, 813 bp, Homo Sapiens
  misc_feature (699)..(707): n is a, c, g, or t
  misc_feature (752)..(753): n is a, c, g, or t
  misc_feature (760)..(760): n is a, c, g, or t
gggaagggacagagagcaccctgctacatttcctaatcaagaagttggcgtgcagctgggagagctagactaagttggtcatgatgcagaagctactcaaatgcagtcggcttgtcctggctcttgccctcatcctggttctggaatcctcagttcaaggttatcctacgcagagagccaggtaccaatgggtgcgctgcaatccagacagtaattctgcaaactgccttgaagaaaaaggaccaatgttcgaactacttccaggtgaatccaacaagatcccccgtctgaggactgacctttttccaaagacgagaatccaggacttgaatcgtatcttcccactttctgaggactactctggatcaggcttcggctccggctccggctctggatcaggatctgggagtggcttcctaacggaaatggaacaggattaccaactagtagacgaaagtgatgctttccatgacaaccttaggtctcttgacaggaatctgccctcagacagccaggacttgggtcaacatggattagaagaggattttatgttataaaagaggattttcccaccttgacaccaggcaatgtagttagcatattttatgtaccatggttatatgattaatcttggggacaaagaattttatagaaatttttaaacatcctgaaaaagaaggcttaagttttatcatcccnnnnnnnnnctcatgaattcttaaaggattatgcctttaatgctggtatctatnnctatggntcctggaaatacctggcattttttggtatcatggttcaaacaacatcattatg

SEQ ID NO: 361872 - DNA, 831 bp, Homo Sapiens
gggcccattgggaaatctcaatttaaaattcccataatgggttgttggtttgaaccatggatacccaaaaaatggcgggtattttcatggaccaataaggttggataacagcctttaaagcatatcccttttaagaaattctggagaaaaaaagggatgttaaaacttaagcttctttttcagatgttaaaaaatttctaaaaaattctttgtccccaagattaatcatataaaccatggtacataaaatatgctaactacattgcccgggtgtcaaaggtgggaaaatcctcttttataacataaaatcctcttctaatccatgttgacccaagtcctggctgtctgagggcagattcctgtcaagagacctaaggttgtcatggaaagcatcactttcgtctactagttggtaatcctgttccatttccgttaggaagccactcccagatcctgatccagagccggagccggagccgaagcctgatccagagtagtcctcagaaagtgggaagatacgattcaagtcctggattctcgtctttggaaaaaggtcagtcctcagacgggggatcttgttggattcacctggaagtagttcgaacattggtcctttttcttcaaggcagtttgcagaattactgtctggattgcagcgcacccattggtacctggctctctgcgtaggataaccttgaactgaggattccagaaccaggatgagggcaagagccaggacaagccgactgcatttgagtagcttctgcatcatgaccaacttagtctagctctcccagctgcacgccaacttcttgattaggaaaatccgct

SEQ ID NO: 361873 - DNA, 675 bp, Homo Sapiens
  misc_feature (109)..(180): n is a, c, g, or t
cttggaatcattggtttaatggttctgaataaatggttaagattgatgtttccagccaagtgagatttgggtttagatatagtttgggcttaagtatcctttatctcannnnnnnnnnnnnnnnnnnnnnnnnnnnnnnnnnnnnnnnnnnnnnnnnnnnnnnnnnnnnnnnnnnnnnnntttggtcattcttaaacattttcacttctgccaccaccctttatgcagtctggcacatagctgtcactcagcaaatgtgagcaaacaaacactagagactttagtctgccaggtctctaacatgcaaagccatggggccaggtccatacactccctccactgagaaaaagacaaatggcttaggctacaaggtttgggtcaccaaggaaagctgtcaaataatgaagtgggtaagcagattcctaaaaattggaaccatttcagcagcagtttcatccacagggagacagagtaaatgctctctcaaatctgtctcacatctatagaaaccttactctatttatggtcttttggcatcttgctctgctatctcacttgagatcactcctatagaactaatagaggaataaatcaaaagcaaaccagtataagtagagacgcaataaaatttggatgtcttgagttctgaggggcttgcacacacttgttaaggca

SEQ ID NO: 361874 - DNA, 539 bp, Homo Sapiens
agtatccacatgcacagtttaaattccactacactcatgaaaaaaacaaaggtcttaggtcagattccctagttattaggaattccataactacctatttcccaatctcttttgccaatatttttcatcttaggcttcctgtgaataatacattctccttctagttctcctccctgacatacactttcctcccccagtgtccataattctcagaggattccttgaccagcacatccagatttttcttgctctccacaaaaaaggatcaactgtaggttccagacatcaaagttctcagcaaaatacaaactataaagagttatatggagataaaagacccaaaatacaattcagaagagagaagcatactcaaggtctcttttataagaaaacagtaaaagaggaaagaaaaccagaggtggttgacaggggtaagaaaaccacactgattgctctaagcatttgcataaagcacttgcaaaacatgcattataacattttggccatacgtaaggtgaatcaataactgatattagatc

SEQ ID NO: 361875 - DNA, 1084 bp, Homo Sapiens
ggtcggattcccgggatcatgggggacaccttcatccgtcacatcgccctgctgggctttgagaagcgcttcgtacccagccagcactatgtgtacatgttcctggtgaaatggcaggacctgtcggagaaggtggtctaccggcgcttcaccgagatctacgagttccataaaaccttaaaagaaatgttccctattgaggcaggggcgatcaatccagagaacaggatcatcccccacctcccagctcccaagtggtttgacgggcagcgggccgccgagaaccgccagggcacacttaccgagtactgcagcacgctcatgagcctgcccaccaagatctcccgctgtccccacctcctcgacttcttcaaggtgcgccctgatgacctcaagctccccacggacaaccagacaaaaaagccagagacatacttgatgcccaaagatggcaagagtaccgcgacagacatcaccggccccatcatcctgcagacgtaccgcgccattgccaactacgagaagacctcgggctccgagatggctctgtccacgggggacgtggtggaggtcgtagagaagagcgagagcggtcagacctcccaccttacggggctccttcccctggtgctcaggaacccacagccacaagccccctgccaaggctcaggcagccttgcccctgggaggactccggctctgttaggggccctaaatgtcctccccacactgtgggtcgccttctgtcttagtgtgcaccctgtggtggctgtgggcatctgtgcatggcaggccggggcggggcatgtctgcgtgtcctgtctgcatgggtatgggaccgttctgttcattatgaaatggggctcagaagctgtgatttctgtgagcatgggtgcatgccatgcctggggaccctcattgcccagtgtggatggaaggggaaacttttcccaaatctgaaccattgggacacatcagggggtcctggggccccctgggttccttccacattccctggatggtctgccaaggcaacacgcctgggggcccttggcccccttcagtttaaccttttcccgcaccc

SEQ ID NO: 361876 - DNA, 2031 bp, Homo Sapiens
  misc_feature (1566)..(1574): n is a, c, g, or t
ggggagcactggaggccacccagtcatgggggacaccttcatccgtcacatcgccctgctgggctttgagaagcgcttcgtacccagccagcactatgtgtacatgttcctggtgaaatggcaggacctgtcggagaaggtggtctaccggcgcttcaccgagatctacgagttccataaaaccttaaaagaaatgttccctattgaggcaggggcgatcaatccagagaacaggatcatcccccacctcccagctcccaagtggtttgacgggcagcgggccgccgagaaccgccagggcacacttaccgagtactgcagcacgctcatgagcctgcccaccaagatctcccgctgtccccacctcctcgacttcttcaaggtgcgccctgatgacctcaagctccccacggacaaccagacaaaaaagccagagacatacttgatgcccaaagatggcaagagtaccgcgacagacatcaccggccccatcatcctgcagacgtaccgcgccattgccaactacgagaagacctcgggctccgagatggctctgtccacgggggacgtggtggaggtcgtaaagaagagcgagagcggttggtggttctgtcagatgaaagcaaagcgaggctggatcccagcgtccttcctcgagcccctggacagtcctgacgagacggaagaccctgagcccaactatgcaggtgagccatacgtcgccatcaaggcctacactgctgtggagggggacgaggtgtccctgctcgagggtgaagctgttgaggtcattcacaagctcctggacggctggtgggtcatcaggaaagacgacgtcacaggctacttcccgtccatgtacctgcaaaagtcagggcaagacgtgtcccaggcccaacgccagatcaagcggggggcgccgccccgcaggtcgtccatccgcaacgcgcacagcatccaccagcggtcgcggaagcgcctcagccaggacgcctatcgccgcaacagcgtccgttttctgcagcagcgacgccgccaggcgcggccgggaccgcagagccccgggagcccgctcgaggaggagcggcagacgcagcgctctaaaccgcagccggcggtgcccccgcggccgagcgccgacctcatcctgaaccgctgcagcgagagcaccaagcggaagctggcgtctgccgtctgaggctggagcgcagtccccagctagcgtctcggcccttgccgccccgtgcctgtatatacgtgttctatagagcctggcgtctggacgccgagggcagccccgacccctgtccagcgcggctcccgccaccctcaataaatgttgccttggagttggacccgagggctcctgcaggaaatgcaagggaggggcccgggcctcccgccccccaggggtgtttttccggaggcggcgggaagacggcgttctgggagccccgatactacgccttgctcccggccccgctctccgggcccccttgtggagaacacgccttctccctagaacgccctttctctccttcttctgacgccctgagcgcccggggnnnnnnnnnacggtcacgggggggcatcgaaaatgcgagaaaatcacactgcgtcgatttcccatctaagacaagtgttgcgagttcccccccgttagccgcgcgcgaataactccctcgttgaggcctacaattttggcaacctacacgagtggcgcttcgggggagaatctcgccgcacgaccgcgcttatatgacagcaattaaaccctgcccccgcgggacacggagacgacatcaccgcctcctgggggccgcctcttaaagccccgagacatccccctcacgtcacggcgcgccctccaaccctaggagcgggggactctgaggcgccggcgcgcgcaatgcgcagattctgccacgcgccggcacgctccggcatacgggacggagcacccgcccgctctagctcagcgccgggtcgcgtcctcgcacagcggggtgtattcaagtacacaatatacta

SEQ ID NO: 361877 - DNA, 311 bp, Homo Sapiens
gtatcccccaattcatttgttgaggtcctaactcccatttcttttgaatgtgactgttcggagatgaggcctttaaagaggtgacttaagttcaaaaggaggctgttagtctaatccaacatggtgtcctttggacataagagatacccagcaatgtgtgcacagaacaaagaccaggagaggacacagtgagaaggcagttatctgcaagcaaagagagaggcttcagaagaaacaaaatcaccagcaccttgatctttgacttctaatctccagaatagtgagaaataaatttctgttgttaagccgtc

SEQ ID NO: 361878 - DNA, 506 bp, Homo Sapiens
cttcgctgtattgaaactggttcagtgttaaccaggcaagcatagttattcacaggttatttactttatgtttactaattctgcttagttattgttgaatatgttctgttccagattatttttattgttttgatgtttaaaacattttgcatactgtttatcataaaacttcatgaagtaaataattttgcatataattgcaataagcactgacttttgaactgaaaagaaggaaagtgtttttttgtgcagtgcttctgaggttcatataatagtcttgtactataatgtgctttactacacgataaatgacaaaaacaagccctgtttcatgtttcatttagtgcaaaaagtcagatttccccagtgttttgttgtctgttgtacctgctgaaactacagtagttgaatattgcggtagcatttcagttctctttttttattaaagtgctcaaaaattgttttttaaatgttttcaaaaacaattaaaaacattttatattaaa

SEQ ID NO: 361879 - DNA, 1106 bp, Homo Sapiens
ggaccggtccggaattcccttgcatgtggaaaatggcgctgacgtgagcgcgaactcgcactgcccagagggtggccgccgcctaagctgcagccgccggagccgcagaaacaagaggccgagccgtgtcgaagatggaggagaaaccctcagggcccatcccagacatgctggccactgcagagcccagctccagtgagaccgacaaggaggtgttgtccccggctgtgccagctgcagccccttcctcctccatgtcggaggagccaggccctgagcaggcagccacaccgccagtgtgggaacgtggaggggctggagggatgcggcagggctcctccccagccccagacagctgccagcctggccccggacccagccctggcctgaccagcatagtctccgggaccagcgaggacctgcggcctcccagacgacgcccacctccagggaagcaaatcccttgctccagccctggctgctgcctcagttttcccagcgtccgtgacctggcacagcatctgcgaacccactgcccgcccacacagtccctggaaggcaagctcttccgctgctcagccctgagctgcaccgagaccttccccagcatgcaggagctggtggctcacagcaaactgcactacaaacccaatcgctacttcaagtgtgagaactgcctcctgcgcttccgcacgcaccgctcgctcttcaagcacctgcatgtttgcgcggagcatgcgcagagcccagccccgccgccacccccggccctggaccgagagccgcccgcgccggagcgccccccggaggttgaccccgcatcagcgccgggcctgccgttcccgctgctggaacccttcacgacccccgcccctgcccccaccggaccgttcctgccctacttgaaccctgcgccctttggcctaagccccccgcgcctgcgccccttcctggccgctgcacccgggccgccggcttccagcgccgccgtctggaaaaagagccaaggtgctggcagcagcccccgaagaccccagggcggctccgacgcgccctcagggcacgcggccccgagccgcatcgtgtgggagcacacacgcggccgc

SEQ ID NO: 361880 - DNA, 550 bp, Homo Sapiens
cttatgaagaggttacaactgagttagaagaatataaggaagcctttgcagcagcattgaaagctaacagttccatgttaaaaaaattaactaaatcgaataagaaaatagcaatgatcagtatcagctctttatggagaaagagcaggtgaaatattttctcagcactcttcctgcaaggcgaggtcgagagtcaccttgtgttgaaaatcttactagtataggactcaacgaaaatatattccccaaatgcccgtaagaattcctacttcaagcctcagacttcaaataattgccagaactacttgactgaggttagttatatgaccgtttctctttagggtttcatttctctagcgtaattcttgtttataatttggtgaaatactgagttgttctgttgacttttgcatgtgaagtaaagatcataattagctgtgttaacacagaaaggaaatgggaactttacattttttaattccctggagctctcattttcaagagatatccatttgctaactttattcaataaatgtgactaaactgaaaa

SEQ ID NO: 361881 - DNA, 1397 bp, Homo Sapiens
  misc_feature (1100)..(1100): n is a, c, g, or t
gcggccgcctgtggtgctgcacaggtaacagcatcatggtcatgaaaatgaatggatccctccatcaagaattgaagattgaggagaacttcaaagacaccagtacctccttcctggccttccagctccttcctgaggaggagcagctgtgggcggcctgtgcaggacgcagcgaggtttacatctggagcctgaaggacctggcccagcccccgcagagggtgcccctcgaggactgctctgagatcaactgcatgatccgggtgaagaagcaggtctgggtgggcagccgagggctggggcagggaacacccaaggggaaaatctacgtgattgacgccgagaggaagaccgtggagaaggagctggtggcgcacatggacaccgtgaggacgctgtgctcggctgaggacagatacgtgctgagtgggtcgggcagggaggaggggaaagtcgccatttggaaaggcgaataaacgtggctgagtctgccaagtggaactgtgccctatgtgtggggactggctgccccctagagcctgccaggagcagaagcctggaggggtggcagggcagagcagcccaggctcagcatggagcccacttaccgtgtggccagccgcgagacccatggccacgcaccttctctcaggccttcgggccccctggttaaactgcaccaagggtgtttcctgttgggggtgtgtctcaagcaggcagctgcgtcttgttggtgataacctctgctgggaggttacttttgttgcctaaaaagttctggaaatccacaaccaggggctggcactggagccagcagcttggccgagtcacaggggacccgtgggccctcacgtctctgggttttaacttttccttacttcatttcattcacccacccagtccttacgaatcaccgaggaacactgggctgagcacatgacagggagcctggagccccggggcctccagcgaggcctgagaagggtggttcgggtaaccactgtgggctctctcccatcacagaaggtggacagggcctacccaggtggaggggaccaccctgcgatcaggtgtttgcgacaggggttgggccagctgangcaagctgtcttttttcccttttctttttatagatgcaacatttttataataatcctagagacctttttttctaccaaagatcacagaccagaaaaagttccatctaaaatatcatgccccaggaaagcacatggggatcaaaagtaaaatagcatccatgtgtgatcttcgtccttccagccgtgcccgctcagttcccccggaatccgtgttgcacaccgtgtggattctccgtccttccagtggggcccgctcaagtttccccctgaatcccggggggcaaccacggcgggtat

SEQ ID NO: 361882 - DNA, 521 bp, Homo Sapiens
cgaccatgagagcccctggccctggcccctgcacaccagtaggcccagaataaccgccacccttgccatcctgcaacagctggactcaagtttccaggaagtggagatgtgtttctagaagtttcctgtggaacctggaggctcctgacgcctttgactccaggctgggcgattccgatgctgacccgtcctcctgggctccccacccccgctccccaagtgtcacacaggcactttgtacacatcctggttttctaagaagggaacttgccatcaagattcctgtaccaggcccacggccgtctcgggcagagccacctgggccccgggtgcagccggagaccccgccgagcccctcctcccagtattcccatccccgcatgcttctagggagcgcctcttttccgttcttgaggaatttctgttctggggcttgtccttcctttgcagctgttttgaatgtagttttccttttctatttatttgcacattaaagttaataattgaatattgaaaaaaaa

SEQ ID NO: 361883 - DNA, 497 bp, Homo Sapiens
tgtgaggcgccctctgagctaccaacaaggaagcgagagtaactgaatggagtacagaaggaacagaaagcaggttttgagcacaggaagcttggaaacatgactgtgacggtgaagaagactgtcccctctcctgaggctgtgcagatcctctaccagcggatgagatacgagtacgagttttaccactacgtcaaagagcagttccacctgctgaagcgcaagtttggacttaagtctcacgtcagcaagccccccctgaggccacacttctttatcccaactccactggaaaccgaggagccaatcgacgatgaagaacaggatgatgaaaagtggctggaagatatttataagaggtgatgtgactgtgttgcctctatggctttatctcccttttccagaaagttctttgtttggggaagtaaaatccttaagggactaaattaatgcttgggtgcattaaaaagaacaaaacattcccacatgttggggtc

SEQ ID NO: 361884 - DNA, 479 bp, Homo Sapiens
aggagcgagggtgattgtccacttacaacaaagtttgcaactccctggatagtcctttctacaccttaagagaaccccttcccctcttcaaaattggtgttccaaggcaagaagttattttcaccagggaagcctgtgaacagaaagagctcctgagactacacctgcttttaatttggtgtcagtaggaaagatggagatgaaaacctcatcaagaccagcacggatttgggaatcaccaatagagtcaacccctcactctaagatgaggaaactaaggccccctaaggtgaactgtgaactgaattgatgaaagctgggatcaaagcccagatctctgggctccttgtctggtatttatcttccctgctttcttcataattaaattcagtgtaatgacgcagacgtagagcaagatcctggagtgtcttcttaatcatcaaatattgtcctctataaagttataatgtttagtgaaa

SEQ ID NO: 361885 - DNA, 447 bp, Homo Sapiens
ttgtcactgaatgtattttttatttttgaaggtatttttaaaatctgggcacaccatatctatctgtaggaccctgggtccaaaggtcctacataactgatatgaaccataattctccatattaacaaaggctcggaaattgaaaccaagatcacctaactcgctcactttggccaatatagtacgaatttcagcttctttacaagagaagagtcctgagatgttaatatgcagcaattctgctgatgtgcattttaactttatgcaccaaggaagaaaggctaaggaattcacaaaagtaaaatcaccccctgaaaaacagatgctggtgattggagaaaaaagagcagtagaattaaggtgttttataaaccagagagtgttttgtttctgataggtaaagggatttcttcatatgttattttaataaaagggaatttcataggt

SEQ ID NO: 361886 - DNA, 1648 bp, Homo Sapiens
gaaaaactacggctaggtacgaggctgggttgtaattcggcacgaggagggagcggctggcgctgcgggccgggccgggccggggctgaggccgagcgagccgcggggcccgcgcagccccggccggagcccaccatgcggcggctgcggcgcctggcgcacctggtgctcttctgccccttctccaagcgcctgcagggccggctcccaggcctcagggtccgctgcatcttcctggcctggctgggcgtctttgcaggcagctggctggtgtacgtgcactactcgtcctactcggagcgctgtcgcggccatgtctgccaggtggtcatttgtgaccagtaccgcaaggggatcatctcgggctccgtctgccaggacctgtgtgagctgcatatggtggagtggaggacctgcctctcggtggccccgggccagcaggtgtacagcgggctctggcgggacaaggatgtaaccatcaagtgtggcattgaggagaccctcgactccaaggcccggtcggatgcggccccccggcgggagctggtactgtttgacaagcccacccggggcacctccatcaaggaattccgggagatgaccctcggcttcctcaaggcgaacctgggagacctgccttccctgccggcgctggttggccaggtcctgctcatggctgacttcaacaaggacaaccgggtgtccctggcggaagccaagtccgtgtgggccctgctgcagcgtaacgagttcctgctgctgctgtccctgcaggagaaggagcacgcctccagactgctgggctactgtggggacctctacctcaccgagggcgtgccgcatggcgcctggcacgcggccgccctcccacccctgttgcgcccactgctgccgcctgccctgcagggtgctctccagcagtggctggggcctgcgtggccttggcgggccaagatcgccatcggcctgctggagttcgtggaggagctcttccacggctcttacgggactttctacatgtgtgagaccacactggccaacgtgggctacacagccacctacgacttcaagatggccgacctgcagcaggtggcacccgaggccaccgtgcgccgcttcctgcagggccgccgctgcgagcacagcaccgactgcacctacgggcgcgactgcagggccccgtgtgacaggctcatgaggcagtgcaagggcgacctcatccagcccaacctggccaaggtgtgcgcactgctacggggctacctgctgcctggcgcgcccgccgacctccgcgaggagctgggcacacagctgcgcacctgtaccacgctgagcgggctggccagccaggtggaggcccatcactcgctggtgctcagccacctcaagactctgctctggaagaagatctccaacaccaagtactcttgatggggccagtgaggggcctggccacccttcctggagctggccaggtgccagggtccaaccctccctcaaggaatcctgtcagaagatgtgaaatgcaactgtgttgcaaaatcactcccctaccgtcagggctctggattccagcaccacagacatgagaccccagctcggagcaaaggcgacatgacatcccggcataagtcctgaagggttgtac

SEQ ID NO: 361887 - DNA, 553 bp, Homo Sapiens
aacgacggcagtaccctcagggttataaggtagcgaggctgggtggcgaattcggcacgaggaaggtgtgcgcactgctacggggctacctgctgcctggcgcgcccgccgacctccgcgaggagctgggcacacagctgcgcacctgtaccacgctgagcgggctggccagccaggtggaggcccatcactcgctggtgctcagccacctcaagactctgctctggaagaagatctccaacaccaagtactcttgatggggcagtgaggggcctggccacccttcctggagctggccaggtgccagggtccaaccctccctcaaggaatcctgtcagaagatgtgaaatgcaactgtgttgcaaaatcactcccctaccgtcagggctctggattccagcaccacagacatgagaccccagctcggagcaaaggcggacatggacatcccggcaggagagtcctccaagggggtttgttactctgaagaacgtaatgtcaataaacagcttttatgtaatgcccagggctgagcaccctgagcccccattcg

SEQ ID NO: 361888 - DNA, 470 bp, Homo Sapiens
gaagctttcccgaccagtttagcaccggcgaaccccccgccctggacgaggtgcccgaggtgcgcgccctcatcgagtggatccgcaggaacaagtttgtgctttctggaaatctgcatggtggctcagtggtagcaagctatccttttgatgattctccagaacataaggccactggaatctatagcaaaacctcagatgatgaagtatttaaatacttggcaaaagcttatgcttcaaaccaccccattaatgaaaactggtgagcctcattgtccaggagatgaagacgagactttcaaagatggaatcacaaacggcgcacattggtatgatgtggaaggtggtatgcaagattacaattatgtgtgggccaactgttttgagatcacattagaactgtcttgttgcaagtacccacctgcttcacagcttcgacaggaatgggagaacaatcgtgagtctttgat

SEQ ID NO: 361889 - DNA, 621 bp, Homo Sapiens
tactagtcgtgcctcataagtctgtagaaaagcaatatgaaatctgtcgtagcctgtagataaacctacagccaaaggaaggaaagccacgaagaatgcagaagtcaaaccctcatgacaaagtaggcacaagtctacaataagctaaatcagaatttacaaatacaagtgtcccaggtagcattgactcccgtcattggagtgaaatggatcaaagtttgaattaaggcctatggtaaggtaacattgctttgttgtacttttgaacaagagctcctcctgatcactattacatatttttctagaaaatctaaagttcagaagagaatgtatcactgctgacttttattccaatatttggatggagtaagttttagggtagaattttgttcagtttggatttaatcttttgaaaagtaaattccttgtttactggtttgactataattctctgttatctttacgaggtaaaactgcaagctgactagcatgttctgtgaatctgccattcctaaaaattttataaacacttgatacttttcactgataatggatcgctccaataaacatatattgtgaaaatgcatccacaataaatggaattccttcctgcaaaaaaaa

SEQ ID NO: 361890 - DNA, 805 bp, Homo Sapiens
  misc_feature (609)..(609): n is a, c, g, or t
ggatgagctccaggttttctttgggccgatgcttcgtgtcctccaccagcttatagacgcgatgtcgccggtgcaggcgcggcttccggccctccccggccagcggtaccttccaccagcgctccacgatgaccgtgccctggcggccaggaaagcgacgcatcacttataaggaagaggaggacttgacactccagccccgttcctgcctccagtgctcctgagtccctagtaggcctccaggagggcaaaagcaccgagcagggtaaccacgaccagcttaaagaactgtattcggctgggaacttgacggtgctggctactgaccccctgctccaccaggacccagtacagttagactttcacttccgccttacctcccagacctctgcccattggcacggccttctctgtgaccgtcgactcttcctggatatcccatatcaggccttggatcaaggcaaccgggaaagtttgactgcaaccctggagtacgtggaagagaagacaaatgtggactctgtgtttgtgaacttccagaatgatcggaacgacagaggtgccctgctgcgggccttcagctacatgggctttgaggtggtcagaccnagatcaccctgccctccctcccttggacaatgtcatctttatggtgtatccccttgaaagggatgttggccacctgcccagtgagcctccttgaacatgcttattccaacgctttgaggggctggaagccttgacacatggaatcaggggcccgggatgtgattcaggacactttccatcctaggaataaagggta

SEQ ID NO: 361891 - DNA, 1241 bp, Homo Sapiens
gggcctcaggtctcattctgtgcctgtgaacatggcggcgcccgttgtcacggccccgggcagagctctgctgcgggcgggcgctggacggctgcttcggggaggcgtccaggagctactgcggccgcgacatgaagggaacgcccctgacctggcctgcaacttcagcctttctcaaaatcggggcacggtcatcgtggagcgctggtggaaggtaccgctggccggggagggccggaagccgcgcctgcaccggcgacatcgcgtctataagctggtggaggacacgaagcatcggcccaaagaaaacctggagctcatcctgacgcagtcggtggagaatgttggagtccggggtgacctggtctcagtgaagaaatctttaggccggaatcgactccttcctcagggactggctgtatatgcatcccctgaaaacaagaagctgtttgaagaggagaaattgctgagacaagaaggaaaattagagaagatccagaccaaggcaggtgaggcgacagtgaaatttctaaaaagctgtcgcctggaggtagggatgaagaacaatgtcaaatgggagctgaaccctgaaatagttgcccgccacttctttaagaatcttggtgttgtggttgccccacatacattaaagttaccagcagagcctatcacacggtggggcgagtattggtgtgaggtgacggtaaatgggcttgatactgtgagagtgcctatgtctgtcgtgaactttgagaagcccaagaccaaaagatataagtactggttagcccagcaagctgccaaggctatggcccccaccagcccccagatctaaatctactctccctccaaggcagcaaagcagaatcgggagcagtggagcagaaatgtgcaagcaccctgatctcactcccagctctgaccaaatacagaattttagagaacatctgaagacatcagactgcactgcgtatacatgttgaattcttcatttttgccatctttaactgtcatcactggggcagggaagtcctgttccagaagtaccaggctgtagatttgataagctagatgcagtagaccgaaaccatccaaaacctgtttagcttcttcctccattggagtttattgggacaaacaggagagccagccattgtctccagtacttgcctcattctcatcatccaaactgaacatttgtatcccaagcagaaataaagagaatatgttctttttaaaaa

SEQ ID NO: 361892 - DNA, 1095 bp, Homo Sapiens
  misc_feature (247)..(247): n is a, c, g, or t
cggtccgtagggaccagcactttcagatattttgttttaagactaaaggttgtaggtttacttttatcttttttaatgtatttttcatcatgtcatgtattagcagtttttaaaaactagttgttaaatttggttcaagacattaaattgaaatagtgagtataagccaacacttcgtgataggtttgtactgtgcctaatttactttgtaaaccagaatgattccgtttttgcctcaaaatttggnggaatcttaacatttagtatttttgggtcttggtttttctccttgtatagttatgggccttggtttttagaattaattttccaaaccactatgcttaatgttaacatgattctgtttgttaatattttgacagattaaggtgttgtataaataatattcttttggggggaggggaactatattgaattttatatttctgagcaaagcgttgacaaatcagatgatcagctttatccaagaaagaagactagtaaattgtctgcctcctatagcagaaaggtgaatgtacaaactgttggtggccctgaatccatctgaccagctgctggtatctgccaggactggcagttctgatttagttaggagagagccgctgataggttaggtctcatttggagtgttggtggaaaggaaactgaaggtaattgaatagaatacgcctgcatttaccagccccagcaacacaaagaatttttaatcacacggatctcaaattcacaaatgttaacatggataagtgatcatggtgtgcgagtggtcaattgagtagtacagtggaacctgttaaatgcataacctaattttcctgggactgccatattttcttttaactggaaatttttatgtgagttttccttttggtgcatggaactgtggttgccaaggtatttaaaagggctttcctgcctccttctctttgatttatttaatttgatttgggctataaaatatcatttttcaggtttattcttttagcaggtgtagttaaacgacctccactgaactgggtttgacctctgttgtactgatgtgttgtgactaaataaaaaagaaagaacaaagtaaaa

SEQ ID NO: 361893 - DNA, 296 bp, Homo Sapiens
  misc_feature (25)..(25): n is a, c, g, or t
  misc_feature (174)..(174): n is a, c, g, or t
gtgactgctaaaaatgacaatcagngctttcgccattttgtttgtaaaaaatctgcttttaaatgtaattcaagctacatattgctcgctctgtattccctggttcaactagattcaaacagcattttctaacttgtaaaaggcagtttgcttccctgatactataaaaagagnaaaaataaaaatcccgttacaaaagtgaagttccgttgttactcctggcgtcatttcgtagtggcctttcatttactcaggctctttgggattgatttccaaaattgtgcccattcccctca

SEQ ID NO: 361894 - DNA, 244 bp, Homo Sapiens; identical to SEQ ID NO: 349
  misc_feature (99)..(137): n is a, c, g, or t

SEQ ID NO: 361895 - DNA, 1011 bp, Homo Sapiens
  misc_feature (950)..(960): n is a, c, g, or t
atgcgccgacccggcgccattttggtggccgggcgcggaggtgattccacactgaggcgagcgcggcggccggggtggtagtggcagtgttcgtgtgctcaggtctgaatcgccgagggaggaggcggtggaggaagaggtggcggcggtggcggtggtcgtagcggtggcggaggaggcgggtacgaatcagctgcgggcggagacatggccaacatcgcggtgcagcgaatcaagcgggagttcaaggaggtgctgaagagcgaggagacgagcaaaaatcaaattaaagtagatcttgtagatgagaattttacagaattaagaggagaaatagcaggacctccagacacaccatatgaaggaggaagataccaactagagataaaaataccagaaacatacccatttaatccccctaaggtccggtttatcactaaaatatggcatcctaatattagttccgtcacaggggctatttgtttggatatcctgaaagatcaatgggcagctgcaatgactctccgcacggtattattgtcattgcaagcactattggcagctgcagagccagatgatccacaggatgctgtagtagcaaatcagtacaaacaaaatcccgaaatgttcaaacagacagctcgactttgggcacatgtgtatgctggagcaccagtttctagtccagaatacaccaaaaaaatagaaaacctatgtgctatgggctttgataggaatgcagtaatagtggccttgtcttcaaaatcatgggatgtagagactgcaacagaattgcttctgagtaactgaggcatagagagctgctgatatagtcaagcttgcctcttcttgaggagcaccaacatctgttatttttaggattctgcatagatttcttttaaactggcattcttgcctaatgatgttatctaggcaccattggagactgnnnnnnnnnnntccctgctctgtaaataaagctaattaaacgtctgtgtaaatttaaaaaaa

SEQ ID NO: 361896 - DNA, 557 bp, Homo Sapiens
acattttttcttctgaagattcttaaaaattgaatgtggctgaagttgaacatgggagcttattgctaatttagagataggaaactgaagcataaagaattaatgacttactttaattactggaattcttctgcaacatttgacaaaactaaccttgaataaggcccactgtaatacgtagctctcttaaatataacacttaggactagaagattagaaactaccaatcccaactacgtaataggaaaatgtaggatcaaaaggcccatgtatataagtactgaccactgggccataatgttgcttctcaggctatatgcagtcctttagtcagaagtcaataggcctatttattaatattttacagaccatattacctggattaccagggactatctttgctgcagagatcaagggttaagatctatgggaagatacttatttttctgaggtccttatgtcctgtcatataattaaagactcaagagaatttatgtgaaatgctttctgtatgcccaaatctttagattaaaattatatagctgctcctgaaaaaa

SEQ ID NO: 361897 - DNA, 511 bp, Homo Sapiens
ggtcatctcaaatggcgtctaaacccagtttctttgcattccagaagtttccattccctccaattccacctaatttttcatctgtcctagttactggctctttcttcatgtcttatttctcttgctttggggagcttaaaagattttacaaagaccctaattttggggttccttccttggagccatagttaccctgccaagaagagtagaaaatgggttcaactcctgtttcgctccaccaacacctctgtgagtctcatcatcagctgagcgatgatgccttacaggttgcatagcactggaactttcctagagtaacggctctgctgccagggtttctctgggctcattcttccactgacttaattatgatctatgcctaacagagccccagtacaactattttgcagaatggctgttaccctagaattactatagcacatattgagatatagttgtactccctagtagataggaactgaccccaacaataaactttgataataaagac

SEQ ID NO: 361898 - DNA, 616 bp, Homo Sapiens
aggaaggaacccaaaattaggtcttgtaaaatcttttaagctcccaaggcaagagaaataagacatgaagaaagagccagtaactaggacagatgaacaattaggtggaattggagggaatggaaacttctggaatgcaaagtagctgggtttagacgccatttgagatgaccaagaatacagtacaggtaaaagcaaatggggcaacaattcaaatattgagttgttcaaatactagaggttaagtaaaatttccccccttgggggaaaactggttgaaaaggatcagaaaggtgaatcagtaacaggacaatgagtacctgagtagaaataggtgtttcaagatgccaagaacagtttaaatatacaggtgagctgagtctacaagaaggaaaagtggttatggcagcctgtttccagatctgatcattggaatgacatatctagcaatggctttgtctgtgaggtcctggcatattttgtgtagcacagatccctttaaaggaatgttttcgtaacactcaaacttatgtgggaatgcaaattactatagtgtaaaaattcaatgacttcccacctattcctgcagggcaggagatcagaagtcttaaaacag

SEQ ID NO: 361899 - DNA, 515 bp, Homo Sapiens
taatgtttgttacagaaatgatcccagagacctacaagatgtgggaatcagcataacagggcaatgcagcaattaaccccacatcgttttctgtagttcctttttgtttcattttcttctgtctcacctcgttagaaaattcctcccagtcaggggtcgtccagtgcaggacgggggacccaagggtctcaagcctgcaagtccagaaggtgacaaacccaggagcactgggagttaagctttccttggggagggaagagccttgatgtccagcacacagcctggctataaagacacgaagcgacctacccactgtacagtccacttcacaggatcagctgaatcatgacctttaaaagttccgagttgaaactgaaggctctcctcagacctggctttttcctcagtccctgttcataccatctctgcacccacaatcacactgatttttcaaattcattttgtttttgctgtttcatttctggcattaataaaagtcttataaggagaaaaaa

SEQ ID NO: 361900 - DNA, 809 bp, Homo Sapiens
  misc_feature (19)..(19): n is a, c, g, or t
  misc_feature (32)..(32): n is a, c, g, or t
  misc_feature (51)..(51): n is a, c, g, or t
  misc_feature (56)..(56): n is a, c, g, or t
  misc_feature (66)..(66): n is a, c, g, or t
  misc_feature (500)..(508): n is a, c, g, or t
aaagcaatagctgtattangcggtgccttttngaaggtccgggataactangttanctcaattccngcatttaattaatagccccgagtattaaaagccccactccccttccaagaaaagctttggattttccccccagtcatgaaagccccttgtttcaaattctttaatctctgaacctagtatcataagaatttcctcttttgataacatctgtactttcatattctgctcactatcaaatgtattgttaacacttagtaagtttgaaaatgaaggggttttatctgcatttgacattgaaccttgaagtactttaagtactccaaggggaaaattaaagtggaagtttcttcggatcttgtttagaaaaaactataaataaaaaattgatgctaccaaattgtgccttcctaaataacatttttgagagcattttaacagcagtttacaaatatgtaaataatagattaaaaccaaatcttgattctcttgtgaannnnnnnnncattttaaaaatatgtttttgggctgttttcaaagaaagatgttgatagaacccttagagtgacttgggagaaaacaaagtgtcacatcaaaaagttgagaaacattttgaaagaaaaaattcgaacatgcccatgaaaaaagcatacagcttccacattaacactgggctaggattaaactctagtcaggaaaaactcaggcactttaacaggacattccatgtcctattatcctttaattttggatgttttctggacttaaacaatatactcaggttggtatacgggcctttccacctt

SEQ ID NO: 361901 - DNA, 1384 bp, Homo Sapiens
  misc_feature (163)..(163): n is a, c, g, or t
  misc_feature (279)..(279): n is a, c, g, or t
  misc_feature (693)..(693): n is a, c, g, or t
ccaggaaggcagggtgaaatgtccagaaagtgccaagaagcagtgccttattgcatcccaaaccacgcctcttgaccaggctgcctcccttgtggcagcaacggcacagctaattctactcacagtgcttttaagtgaaaaatggtcgagaaagaggcaccanggaagcccgtccccggcgccccggcagtccgtgggacgggatggttcctggcctgtttgagattcctcaaaggagcgagcatgtcgtggacacacacagactatttttagattttncttttgccttttgcaacccaggaacagcaaatgcaaaaactctttgagagggtaggagggtgggaaggaaacaaccatgtcatttcagaagttagtttgtatatattattataatcttataattgttctcagaatcccttaacagttgtatttaacagaaattgtatattgtaatttaaaataattatataactgtatttgaaataagaattcagacatctgaggttttatttcatttttcaatagcacatatggaattttgcaaagatttaatctgccaagggccgactaagagacgttgtaaagtatgtattattcacatttaatagacttacagggataaggcctgtggggggtaatccctgctttttgtggtgttttgtcagcttgactgtttgtttttggggggttttncttgccttggttgtctggcaaggactttgtacatttgggagtttttatgagaaacttaaatgttattatctgggcttatatctggcctctgctttctcctttaattgtaaagtaaaagctataaagcagtatttttcttgacaaatggcatatgttttccacttctttgcatgcgtttaagtcagtttatacacaaaatggattttattttttagtttaactgtgtttctccgacagctcacctctctctgaccacccagccatttccttcctgtgctccacgttcttctgtgtgattaaaataagaatattatttttggaaatatgcaactccttttcagagatcaggagggatttatgtagcagctatttttactgcaaaagtaattcactggaaaaaaaatgtaatttgtaagaaagctttatttttatctcagctctatgtaaagttaaagttactgtacagagctgaaggacggggggcggtaggggtcttgatgaaacctcttgaacgaagcacagtttgtcccatctttgttcactcgtgtgtctcaaccatcttaatagcatgctgctcctttttggctcagtgtccacagcaaggatgaacgggaatccctaatttccctgggaaaaccgaaactaattcttgagggccccaaaagcggggggaaactttaaaaatgggggg

SEQ ID NO: 361902 - DNA, 1218 bp, Homo Sapiens
  misc_feature (494)..(584): n is a, c, g, or t
  misc_feature (1202)..(1202): n is a, c, g, or t
gggttttataaggctgatgtcaatttctgtgttgccaagctccaagccccatcttctaaatggcaaaggaaggtggatggccccagcacagcttgacctgaggctgtggtcacagcggaggtgtggagccgaggcctaccccgcagacaccttggacatcctcctcccacccggctgcagaggccagaggcccccagcccagggctcctgcacttacttgcttatttgacaacgtttcagcgactccgttggccactccgagaggtgggccagtctgtggatcagagatgcaccaccaagccaagggaacctgtgtccggtattcgatactgcgactttctgcctggagtgtatgactgcacatgactcgggggtggggaaaggggtcggctgaccatgctcatctgctggtccgtgggacggtgcccaagccagaggctgggttcatttgtgtaacgacaataaacggtacttgtcatttcgggcaacggcannnnnnnnnnnnnnnnnnnnnnnnnnnnnnnnnnnnnnnnnnnnnnnnnnnnnnnnnnnnnnnnnnnnnnnnnnnnnnnnnnnnnnnnnnnccaaccacacctccccccacaaacccaccatagccctccacctgtctcctccgcggcgcccatcggcgcttcgttgaatgcttcggactacaaaaccccgctaaacatcgctaccaaggcccccaaccccgccaacttcccaaaccctcacctccacagacctgctccctccccgacacgcaacctttggctgtgagaatatatacgacatatttgaaacaccccctcccgccgcggagaatgactccacaaccgaatacccacacaccagtgatgcaacccgcccaataccctcggggaatcggcgcgccgaccaccacatcctcacagctcacgcctgtgacacaccactcgcgcaccgaggtctcctcctccaccgcctgctccgctcgctccggaacagtctggtgatccacctcactcaacacgttctccaccacagaacgtccacataatcctcagacgtagccaaaatatatttgatacccccttctccaccactcggcgtccgcgccacacacacggtggaagttctctctctccacaccaactctcctgcgctccactactgagatatcacatgcactcgtcgcgacgatcacgcgcgcaactctcaanacgcaacctgatgatt

SEQ ID NO: 361903 - DNA, 941 bp, Homo Sapiens
  misc_feature (16)..(16): n is a, c, g, or t
aattccttgggatcangagtctctaaaggatcaaggtcctaggattcctgagcctgtgaagaatcaagctcctcatggtccgcagcaccatgatcaatggacagaaggtcccatggtctcagcatctgtcaaggatcaaggtcccatggtctcagcacctgtcaaggatcaaggtcccatagtcccagcacctgtcaagggtgaaggtcccatagtcccagcacctgtcaaggatgaaggtcccatggtctcagcacctatcaaggatcaagatcccatggtcccagagcatccgaaggatgaaagtgccatggccacagcacccataaagaatcaaggttccatggtctctgagcctgtaaagaatcaaggtttagtggtctcagggccagtcaaggatcaagatgttgtagtcccagagcatgcaaaggttcacgattctgcagttgtggcacctgtaaagaatcaaggtcctgtggtccccgagtccgtgaagaatcaagaccccattctcccagtactagttaaggatcaaggccccacagtcctacagcctccaaagaatcaaggtcgtatagtccctgaacctctgaagaatcaagttcctatagtcccagtgcctctgaaggatcaagatcctctggtgccagtaccagcaaaggaccaaggtcctgcagtccctgaacctctgaagactcaaggtcccagggaccctcagctacctactgtctcacctctaccccgagtcatgatcccaactgccccccatacggaatacattgagagctccccttgacactcaccccttgacacaccaatgaaggagctgacagtgagagtgctcccctcccaggggcagtgaagacacatatttaatctgcatgaaacatgtacagtagtcttgctggaatctaataaaaatggtccctctggctcaaaaa

SEQ ID NO: 361904 - DNA, 505 bp, Homo Sapiens
ggcaagaagagaagaaaatgcatttaagtggaaatcggacctctaatccaagcatattgcttgctattaatcgccaaaacaggactgctgatgaggaatgtatttgcatatgtttgcaaaagctgaatcattgaaaacgtaccttgaaactctctatctctggacactccagggtagagaatgaagggtatggaagtagtccggcttttgaaacttaggtattttatatttttcccctcaagaacttttttttaagagacagatttgccatcctccttaatttgcaggactgccttggtggctttgtttgctgggacaaggcccacaacctgtgcctctcctattgacccttactttgaattcaaagaatctatttaagagtttaatatatgaggctttctttgattcctcctcagttctacctagtttcacagaggaaaaaaatactctttgaataaagtgaacagaggctcatttgtttgtgcctcactttactgaaaaaaaa

SEQ ID NO: 361905 - DNA, 748 bp, Homo Sapiens
tttgatgattacttggagttattcctgcagtttggttatgtgagccttttctcctggtgtttacaccataagcagctgcctttgctgtgttaaataacttcactgaagtaaattcagatgccttaaaaatgtgcagggtcttcaaacgtcccattctcagaaccttcagccaatattggtgtgtggcagttggcttttgaaacgatgagtgttatatctgtggtcactaactgtgcgctgattggaatgtcaccacaagtgaatgcagtctttccagaatcaaaagcagacctcattttgattgtagtagcagtggagcacgcactcctggctttaaagtttatacttgcatttgccatacctgataagccacggcatatccagatgaaactagccagactggaatttgagtctttggaggcactcaagcagcagcaaatgaagctcgtgaccgagaacctgaaggaggaaccaatggaaagcgggaaggagaaggcaacctgagtgcccagcgtgcccagctgccctgttggcagaggcctgtgtctgtgccacacctgccacggtggcagggggggtacccggggcagcatcgtggctcctgaacccagacccaatgcttagcctcagttgagagtgagcggggtacagtaaggcagtgcttcccacactggacctctttcctggttctcttttgcaatacattaacagaccctttatcaacataaacaatagtaactgagctatt

SEQ ID NO: 361906 - DNA, 969 bp, Homo Sapiens
gtaggcagaaggagtcagagaggttgcctttaatagctcagttactattgtttatgttgataaagggtctgttaatgtattgcaaaagagaaccaggaaagaggtccagtgtgggaagcactgccttactgtaccccgctcactctcaactgaggctcctgtgatgagcacagtgggcacacaccccatccccaacctgtccacgggtccctgggccatggtggggttgggagtgacactgctatgaggggaacgtggagagctggtggctcactcatggtgagaggctcaagggcggcagtggctctgcagcaaagttggcagctggagcagcgtgtggggcccgggaaggaactgggaaggagcagacagggtggggctgggggaactgccaaggatcccgagccaagccactgcgaaactgagaagggtgcttgccacatgggagccacttcgtttggctaagcattgggtctgggttcaggagccacgatgctgccccgggtaccccccctgccaccgtggcaggtgtggcacagacacaggcctctgccaacagggcagctgggcacgctgggcactcaggttgccttctccttcccgctttccattggttcctccttcaggttctcggtcacgagcttcatttgctgttaagagaaaacaggacaccaggtgagccacagaagcctaagtagtggccgaggcctctgctctctgtggaagcctggccagcggctttgaccccagggaagtggtgactctgatgctgcctgcagcttcctgcaagtcctgggtctgactctgaggagatgggagacagttggtgtggtggaaatgcaatgtcgcactgtgtgagcccagaccagcagggattttaaggacactgaaatgagaagcagctggcgtctcctcctcctggatggccaggatgaggggaataggcggacagggcctgagagaggacgg

SEQ ID NO: 361907 - DNA, 532 bp, Homo Sapiens
ctgactgagtagcccccagggagtggagacgggtccctggggagggagcagctgacaggtcagcagtgcccccagccccacccaagaggagggcagcgtgtgcctgtggtctgggacgtgggctggatggcagcccagggtcacaggcataggataacatgtgctttggacctgacaagggagtaccttgggggtctgatggggtcatggccagccgagcctctgtagagatggaggctacagccctcagaagggaggggaggaaagagactgagggccctggcctggggcgtcgatggggaagcggtggcccccagtcctcttctgctgctcccagccccctcctcctggggccctcagggatctcatgaagtcttccttggcccaaccaggcagatgccccgggctccagtggggggaggggtctggggtctggtccgggttccccgctttctctatgtcccccctccctctttctccgcagtgcggataaaaattggactcgaataaaacccttggtgacccggatggt

SEQ ID NO: 361908 - DNA, 1063 bp, Homo Sapiens
ggcctgggtggcgaattcggcacgagggccgtgtgtgcagcgcccgtccccagcaaccatggcatgggagcgtctggatctgtgggcggacagcatatctctgggtagttggtgcagctgtggcagaaatcaggcccctggggaagtcctgtgacatggatgcttccctgaagcagcagcagtgtgtggctcaggggtcctcagaggccggtggtgcccgcgggtggcacggggcactctcatgggcagcacttggtcttgtgtttacagtattggagggattcacatcgttattttctggattaagctgctaggagtatcatgtacttagaaattcagtgtttatagtaagatgtattaaacattgctaatgatgtatggttacaatgtataacaggttttccattgtcataactgtatggaattttcttggaggatgtcattagcttctgtttgcactgacttgtgagctgtgtgtacgctgtggtcagatttctgaatgctgtagagcacttaccagctctgaccgtgtcttgctggggccagcaggctgcgtgtgcagcagggccagctgtctcagggctgatatgtagacgtgtattctgtttacaattagttccccaactctgtggggaagaacttaagcggttttagtgttttataatatggtgaggcaatgagggtcagggcgcgtggtccctgagggagggtcttcagggcaagacccatggccctggcctggaactgtgctccccagggcgtggtgcctccctaaggggatggtcagtgttcctgggactgactgccaggccagcccgtctgcagactcctgtggtgggagttccctgggacgggaagcccctcggccccttccctccaggggcaggaactgagccagcatgggcggggccggccgagcttccaggcgtgttttctctgttaaatgtacctctgtctttaagctgtctcattttctaatcgctggcatgtcttgcctagaaaagcatttggaattgcttatgttcaattacagaaataaaatgtctttaacttggccatttgt

SEQ ID NO: 361909 - DNA, 434 bp, Homo Sapiens
aggattctgttttgctgttaggtaagctaaactcagaaattgaaaaggaaaagactggataatcacaggattttcagtaagaaaacaaccccagtcttgtcttagaagccacttgttgaggagtctgttgggggaaaaaagaggatatgcttttaaaggtagaacaaaccttcttctgtgttaaatcaaaaggatgttcaaaatccaccaggacagatgctacttgggtttaaatggagccatagatgatacaaagtcctcttggggctgaaaatcacttcctatttgcatggctttactaactggtttctgttttccattatctttttcacagaaagtcttggtcagtatttttccagcatttaaattgaaacggtcagtattagaccactgctaggttatgtagtcaagaaataaaaatagaattacatgct

SEQ ID NO: 361910 - DNA, 1318 bp, Homo Sapiens
  misc_feature (761)..(795): n is a, c, g, or t
  misc_feature (935)..(935): n is a, c, g, or t
agtcggttctaccatcgagcagatcaacgagattggaggcctgctgcagacccgcggccacgagtggggagtgaccacaggcaggaagaggcgctgcggctggctcgacctgatgattctaagatatgctcacatggtcaacggattcactgcgctggccctgacgaagctggacatcctggacgtactgggtgaggttaaagtcggtgtctcatacaagctgaacgggaaaaggattccctatttcccagctaaccaggagatgcttcagaaggtcgaagttgagtatgaaacgctgcctgggtggaaagcagacaccacaggcgccaggaggtgggaggacctgcccccacaggcccagaactacatccgctttgtggagaatcacgtgggagtcgcagtcaaatgggttggtgttggcaagtcaagagagtcgatgatccagctgttttagtcacagactgagctgatcccaacaggccctggcagcgtctggacttgtgtaaacagcagcagtcacgttcctcggccgccacaaccaacaccaaagcaggaaaaccattttctgtacttttatatttctgttcaacctgttggtttctacaatgattttaaacattggaaagccagccttgtgtatatttttaaaaattatattcaaaatgagccaaagtgctcagagaccttctatgacacattagtgtcacatggttgcgtgtccagccgaagcagtgtaataaacatctccaatggccactggnnnnnnnnnnnnnnnnnnnnnnnnnnnnnnnnnnngggcggccgcctctagagtatcccctcgagggggcccaaagcttacgcgtacccaggctttcttgtacaaaagtggtccccttatagtgagtccgtattaataagctaaggcactgggccgtcgttttttacaaccgtcntgaactgggaaaacctgcctagcttgggggatcttttgtgaaagaaacctttctttctgtggggggggacataattgggaccaaactaccctacaggaaattttaaagctcttaggggaaattatttaaaaatttttaagggggaataaatgggggtaaacaacaaactggcataaggcctggcctgccttggaagaattttggttttcaggggggattggattttttggaaaatatttattccccggggaagctagggggatcctcaaatgggctggggggtattttagaaattccccggtcccccagaggtttatttttcaggggcccctcccagtcccttaccggaactggggttccggaaaacacaacaccgcctacac

SEQ ID NO: 361911 - DNA, 547 bp, Homo Sapiens
  misc_feature (537)..(537): n is a, c, g, or t
caggtagatcgcggtgccagttgccatggagccggccgggccctgtggcttctgcccggcgggggaggtccagccagcgcgttacacctgccctcgctgtaatgcgccctactgctcgctgcgctgctaccggacgcatggcacctgcgcagaaaacttctaccgtgaccaggtgctgggagagctccgcggttgcagcgctcctcccagccgcctagcaagcgccctacgccggctgcgtcagcaacgcgagaccgaggacgagcctggggaagcaggcctcagctccggcccggcgcccggcggcctatcgggactctgggagcggctggcgccgggcgaaaaagctgccttcgagcggctgctgagccgcggtgaggccgggcggctgctgcctccatggcggccgtggtggtggaaccgcggagccggaccgcagcttctggaggagctggataatgccccgggtagtgacgccgcggagctggagctcgcccctgcgaggaccccgccggattctgtgaaagatgcctccgncgcggagccc

SEQ ID NO: 361912 - DNA, 462 bp, Homo Sapiens
gagaaggaagccctggccagggaagaacgtgcaaggggcacagaactatttcgagctgggaaccctgaaggagctgcccgatgctatggacgggctcttcggctgctcctgactttacccccacctggccctccagaacgaactgtccttcatgccaatctggctgcctgtcagttgttgctagggcagcctcagttggcagcccagagctgtgaccgggtgttggagcgggagcctggccatttaaaggccttataccgaaggggggttgcccaggctgcccttgggaacctggaaaaagcaactgctgacctcaagaaggtgctggcgatagatcccaaaaaccgggcagcccaggaggaactggggaaggtggtcattcaggggaagaaccaggatgcagggctggctcagggtctgcgcaagatgtttggctgattaaaagttaaaccttaaaagaga

SEQ ID NO: 361913 - DNA, 682 bp, Homo Sapiens
  misc_feature (170)..(170): n is a, c, g, or t
atttctatgcctctgcatatgtcatcttggattataatgaagtacattgttgtcatgaatggattcccagatcattctcaggcctaattcctcgcttaatacaaattgctcctgcttgtgccattatgatcagtacatatgaatttggaaaggcttttttccagaaacanaatgttcgaaggcagcaatactagtgatgctgtttcaacttgaaacaacaactatagccaaagaagatggagactcttaggcaagaatgtttttcaccattattctctcacaatgattttatgtctttctttcctataatttaaataaataatttcagctctacctctaaatcataattttaaaataaattttatcttatttttggtgatattgaaaaagatattctagaaatcaccaccattgagcattcttgtaaaaatagattactccttagcatcaaaagcagtctcttgaaagtttaatattatatgtttcagtgtaacataatcttactgggagtgtgttgaatacaccagaactttttgaattgtgtgctgaatgatgtacatagtctagaagaaaaaagcccaagtcttgtgcacatttaaatcgtgtacataagtatttccgtatttcagtaaagtagataaagcactccttaaatagcattgtttacatcgaccaaaaaaaa

SEQ ID NO: 361914 - DNA, 1810 bp, Homo Sapiens
ggccggcgcccgcccccgccaaaggcggcggtgcgccagccgctggtaccggtccggaattcccgggatccgcagtcggcaaggagagacgtcgctgaggggcttgcctgaagcgaggggattctaacattttcagagaaccttttggaaagaacaagcctacttcaataaatgaaggagaataaagaaaattcaagcccttcagtaacttcagcaaacctggaccacacaaagccatgttggtactgggataagaaagacttggctcatacaccctcacaacttgaaggacttgatccagccaccgaggcccggtaccgccgagagggcgctcggttcatctttgatgtgggcacacgtttggggctacactatgataccctggcaactggaataatttattttcatcgcttctatatgtttcattccttcaagcaattcccaagatatgtgacaggagcctgttgcctctttctggctgggaaagtagaagaaacaccaaaaaaatgtaaagactactcatcaaaacagctcgcagtcttattaaatgatgtacaatttggccagttgtggagatgacccaaaggaggacacgtaatggctctggagagaatctctactgcagaccatcaagtttgatttacaggtagaacatccatacccagtttcctaactacaatattgccaaagcaaactccaaacgggcggattcaacaaaccaacaatttccaacaaggtcgggtcccaccattgggcattgggccccttctcggctcaacttggaccaaggcacgtctggcaaccaacactatggtccgccctggccatgtcggcgaaacccacgacgatccataagcaagtacgccacgtagatggactactcgtcagacaaggcacccgtagtgcccacaactccgcgcacacagcacccacacactacaatgggaacccaaaccacaaaaaaccaccaatgcttactacggcgaacgaactgacgcggcgagaacgcaggtcccagccccaacgaaatggctccccagacgaacagaaccgcatcaagcggaccaacgaacaactccgtgcccccaagcacaggagaagtaccgcacggggcggaactccctctccaacccttacccagcacacaacagcggaagaacacaaccaaaagcgaaggaaagttgggcccctacgcactaccacacaaagctccgcaccacgaacaagttcaagggacagttggccaaaaccaaccgcacccacgccaccaaaagtcgactaccagtagccagagcgcaggtaagcaacccccaaacgatgagggatgggcccagccgaaaagggttacgcagaggccacgacatacaacccaacgaggacccggtacattacaacaaaaaagaccgtcccacgcgaccaagccccaacttaccacccaaggcccccacccaaggcgccaaggacaaagcgggcagcgccacacccaaaaaggcgaaactcacacagcgacaccaagtgccaaggccgcagcaacgccgcgagggatgccgcaacaccaagcaacccacaacaggaaaagaaccgcgcgtacatacaagacgaagacaaccaaagggatatcattcacacccggaaagaaagggaacataaaaggcgcggaaacgaccccagaagagtaacgggacagtacgcataccccaaacaccgcacacaaccgacgcagccgctcaaccaacgccgaacggcagacagaagacacacgcaacagcagcagcatacagcataacaacacacacaccccacaacctaa

SEQ ID NO: 361915 - DNA, 493 bp, Homo Sapiens
gcaagcagcagtttggcgacgaaggagagttggaagccgggagggggagccgcgccggcgtggccgtgcgcgcgccttcccccgaggagatggaggaggaggcgatcgccagcctcccgggggaagagacggaggatatggactttctgtctgggctggaactggcggatctcctggaccccaggcaaccggactggcacctggaccccgggcttagctcgccggggcctctctcctcgtctggcggaggctcggatagcggcggcctgtggagaggggacgatgacgatgaggccgcggctgctgaaatgcagcgcttctctgacctgctgcaaaggctgttaaacggtatcggaggctgcagcagcagcagtgacagtggcagcgccgaaaagaggcggagaaagtccccaggaggaggcggcggtggcggcagcggtaacgacaacaaccaggcggcgacaaagagtccccggaaggcggcggcggccgc

SEQ ID NO: 361916 - DNA, 580 bp, Homo Sapiens
taggtgccatagtaaatttaatgtaatttgcatagagtacaaacttctgggctagctcttcagtccacaaatcaccatggtaataaaagctcgtcatgatcagtaaccagtcatgttgtgtctttcaaagtctgttggtgattggtccctatggctctcctactcaaacagcaaagcctatagttgggttgcctccttgcctcccagtgatgagcccatatgacattttacagaaatgaataattgaaagaggaattttgcaaccaagatgaaagtgcagtgaagaaatgagaagtgaaaatgctgcaagtgaggttcaaattgaatgtgagtggaattctagaagtacaaatagttgactgtggcaatgtagaccctgatgcaggaacttcagataggcagccagagggaggtagtaaacgcaaactgccacaaatgggagaggagtggtaataaaagggctgaagatgtcccaaaggttgaaatgccagcaaaaaacttcacatgaaaggatcttctggagtgattccacaatattgaaaattcaagggataagatgttggaagctagtccaaactta

SEQ ID NO: 361917 - DNA, 391 bp, Homo Sapiens
cctgtgcccagctttaaaaatattaggtaaatgagtgaaaaaagaaaatgtactatagttgcctctgttagaatgtttttctcccatgcaattccagatctacaagcagacctgcttattgagtttattgaatttccacctttttttctgaaaatcagaatatctcagggtcccataaatctgtgagaaactcgtgggaagcagagcagcacataacagcaagatgattttccccttccttttgtctttaggggtcaagaattcttgtctcatggttcaggcattgtgttaactatttctgtgcattctttaagcatagttgtaactgtagttttgattgaaatattaacctataagtgatttggaatatcaaaataaacattcatatccc

SEQ ID NO: 361918 - DNA, 304 bp, Homo Sapiens
cccctaattaataacttttaaataatatttagacacatggtgggcggcctccatttgttctcttgttccagggcccagaggcatcgagagccagcccaaagacctctgccgatggcaaagtgttgtactgactctcacacctctcctttcgagaggcttcaaggcatgatgggacaatcactgcatttgaaacaagatgacccactttagcttaattttcttccatcatcataagtcaaaagcgatcctgcctgcctcccggcactgcttagaaatcccatgaaagagtgcacaggtggcccgg

SEQ ID NO: 361919 - DNA, 400 bp, Homo Sapiens
  misc_feature (179)..(221): n is a, c, g, or t
atggctgtttcatgtgagacaggaatggaagaagttatgaatagggatcagatgggggagtgagaatccctgtaagtaaaatgtgaggaaaagaacaagctgagaacaagattctcctttcaaaaaggcgtcttactgtaaatagtccaaggtgacatttgttagttttgaatactgcnnnnnnnnnnnnnnnnnnnnnnnnnnnnnnnnnnnnnnnnnnncaaagaacaaagacttatgtagttttcttttattctacacaatccaaattaaacagcttttggtgatgcaattgtacactttcttaagaatatatctaataccacattttagcagaaccaagcaatgactgacattattcattgggatctgaccactaaataaaattcttttatgcaaa

SEQ ID NO: 361920 - DNA, 465 bp, Homo Sapiens
ccgcgccgttaccgctccctctctgctgactgctccccctaggggcagagacggtcccgacgcccgccatcccgccccggcctcacccctccccgccaggcggaacgacgcggggaggcgggcgctcggggctcgcgcccaggggccccagaatccttcggggagagtgggtgggaggaagctgtgtgggcggggagccccctctgccttagggagcggctgggcacccattcgccccattcaggggctgcactttatagacgttccctaggctgtttctaggctcccccaagtccctcctccagcctcgtcgggtccctcagaccccagcccaggacctgcggagggccgcagcgaggagaggccaacaggcctttccctagagttgaacctgggccgggtggtgcaacctggaagaacccccgatttcctggggacccagcagggcaggcggcctggctcgcg

SEQ ID NO: 361921 - DNA, 527 bp, Homo Sapiens
gatcctctgcaggtggaaaaataggaccttctcagagttggctgtcacatacaaattaacagggactgtgggtgacgtttctaacaataataattaaaaaacaacaaccctgcagcacatgtcagcctggcgttgggcaagtctgccacacttcttttatttcgatgtgtaatggttcacatgatttggatgagaaaaggagggatcaaactttatagacaaaacccagctgtgtgaaaaacaggattaatgccagtgattggggatgatcaaagagaaaccttactttttctcccccagtactcattccactaaagggcgaattggcagagttcggcatccctggggggaaaaagaagtgctagaatcatgcaacgtgtgagtgacgataattccaagatcaaaacttacacacttaatctgctaactcttatggtgagggtttcttgccatagatgctatgtgggtctgtttctaagtagaatcactatattaccccagttaataaagaaacatggatttagcaa

SEQ ID NO: 361922 - DNA, 1685 bp, Homo Sapiens
  misc_feature (582)..(602): n is a, c, g, or t
gggtacacaatttaagttgccacttattgatgacagaatttctggatagtaggattttaataggcgagcaaataaaattcaaatcaatttcaaggaaaaacatctggccaggggtagcttgatttcgcccccaaaaatactgaagactaatccattgacattcataatgggacagctaagtaccaaatagctaactactccctatggaggtttatgcaagcagagtaccaggggttccatcatatcaacctggcaatgcacttggtggttgtgtgaccttgagaaagtctcttactcttgtttatgtgttcttactttagaaactgagactttatttgtggttttcacactatttcagcagcaaaaactttttcaaggaaaatcttacagaacctttaaacacgtgtgcatacacacataccctataccccactatataaaagtcatattattataaatttccttattatataaactttatatactataaatgtgattaagtcaatgaataaaaacattaatgcattggtgatatccagcatgtttgaatttggtgagtaacacacatatagtgggagtcgnnnnnnnnnnnnnnnnnnnnnaattaaattcaagtcaaatttgcagaaccctgtatctcctccatagattcttagtattccatggaacatattttgaaaaccttgggatagatgatccactgaaatcttttccagctctaagattttaaattgtccttttagattagacttgctgagtttaattcagattacctaattttaaaatgtttctgaaaagtgaacagagttaccttacagagttttggatctttccagggatagccaatgattttatcccccagaatccttcacctttcaaggagttatttaacaatgagcccagtgactcaatagggcccaaacctttttattttacaatatgagctccaagacacttgctgatctactgtgaatataaaatgttattagccttatcaaataaataaatgagcacagctctttgttcgctctattgaactgggtgataattatttagatgtgaatgttaggtcagttctactgtaataactaatcgtaaaagttgtaaatttgtttaatggatgaaatgtacactttttgtattctgtacagctttgtcttttttaaatatgaagtacttaaatgtacttactatgataggaaatataatgtgtgccttctaggatttgtgaagtggtttcatgaactctaaggaatttgttttccctatcctaactcagtaacagagggtttactccgattatgtatagaaccttagtttgagaaaatgaattttactatgtactgaatttagaggttgagaataataggatctgtgttattcttagtacccactgataaattgtgcaataaataatctttcgcaagtgattttagctaattgaagagattattttcctatgtaatttcacattctaatatactaaatgtttatattccttagagaactattttatattgtgcgctgggggcttgtgatgtttgtgtgctgttttaaaattcatttcaaattggactcgatttccttatatctaatatatatctgggagaaaaggctgcttgaaaatatcttttgattcagtgatttttaacattgggaagttgagtttattaaaaggtagtctg

SEQ ID NO: 361923 - DNA, 441 bp, Homo Sapiens
  misc_feature (30)..(30): n is a, c, g, or t
  misc_feature (42)..(42): n is a, c, g, or t
  misc_feature (51)..(51): n is a, c, g, or t
  misc_feature (77)..(77): n is a, c, g, or t
gggccacggcccctggtccgcccccaatgnaaccggggtganaaataattnagatgtgaaaggttagggtcagtccnactgtaataactaaccgtaaaagttgtaaatttgttaaagggatgaaatgtacactttttgtaacctgtaacagcctttgtccttttttaaatatgaagtaccttaaatgtaccttacctatgaataggaaatataatgtgtgccctcctaggatttgtgaagtggtttcatgaactctaaggaatttgttttccctatcctaactcagtaacagagggtttactccgattatgtatagaaccttagtttgagaaaatgaattttactatgtactgaatttagaggttgagaataataggatctgtgttattcttagtacccactgataaattgtgcaataaataatctttcgcaagtgatttt

SEQ ID NO: 361924 - DNA, 249 bp, Homo Sapiens
  misc_feature (107)..(127): n is a, c, g, or t
ggctggtaagcggtccggaagttcccgggatatcgtcgacccacgcgtccggctttttaaattacaaagtaataaaaagctttgctctttaattactttgtaatttnnnnnnnnnnnnnnnnnnnnnctgaagaactttggggggaattttgtacttttttcctgtgtaaatattggacttttttgagctttatcgtggttgttaatttgaagtaataaagtagaaaagataaagtgaaaaaaataaaa

SEQ ID NO: 361925 - DNA, 649 bp, Homo Sapiens
ccttagggctcatgactctacttggtgctagatgatcagcagcatggggccagcacttcacaggagccaaaaagtgtctagtcacttaattgagaaggtggcaagttatggtgtgaagccaagatatggtctagtgacatatgccacataccccaaaatttgggtcaaagtgtctgaagcagacagcagtaatgcagactgggtcacgaagcagctcaatgaaatcaattatgaagaccacaagttgaagtcagggactaacaccaagaaggccctccaggcagtgtacagcatgatgagctggccagatgacgtccctcctgaaggctggaaccgcacccgccatgtcatcatcctcatgactgatggattgcacaacatgggcggggacccaattactgtcattgatgagatccgggacttgctatacattggcaaggatcgcaaaaacccaagggaggattatctggatgtctatgtgtttggggtcgggcctttggtgaaccaagtgaacatcaatgctttggcttccaagaaagacaatgagcaacatgtgttcaaagtcaaggatatggaaaacctggaagatgttttctaccaaatgatcggtagggagatacaagggaataaagaacacaactctcaaaaa

SEQ ID NO: 361926 - DNA, 1860 bp, Homo Sapiens
  misc_feature (1516)..(1518): n is a, c, g, or t
tttggcatacaaaaagacaatatttattttactcaagctttcctataagaagttaaacagaaacaatccctggttgaagactaccaaaaatgttaacattgtttcacatatcccttcagtgcccagatgaagggaaaaacttaactgaacgaaagaataagaattaccatcctgacactgggtttgcttaggtatgttaggaaaaaatccacataggctagacctaaaacagtaaatgagcctactaatttcccacaggggatgggaaatccactgatacagacacctccaagagctcccaagacctagggatcacaaccaccacaggtattcccataacttccttttccctcccttttccctcagctattttactgctaaaagaagaggatgggaacaaaagatcacttccccactcccagactgcatgactgtcagcatcaatgtttgttgggaatttcacagcatcctcttcatggccatctaaataggataacagtaaaaatggctagggggaggcatgggttttgcttcccagaattataaaatacctggaaaggaattaatctcattcctataccggaaaacccaatattctttctagagaacagcagaaccaagtagaacatctactacggctgttctcccagcctcaatctgacttcaagaataactttacatctgccattgtcatgaaccccagcttcctcagagaagccagggcaccatgcttctacacggccatggaagccaggttgccacttgtaccccaacctgtagagagtgagggtttcttatctcccttcccctaggagcaggaattgcaaatagcatcattgtattaatatgattggtaaatgtttgacaactttggaaataaagttctcaagttcctaccagtaatatgagtctgtgtgtgaggagagaaatggggtgggggaaatgcctctcatttcccatacttctttaaatttgggggaagtaagagtagaggggatatatacggatatgttgtgtggataggtgagaatggaacccaatatatgccccccaaaagcataaacagagccttggctggctggctaccaatgtaagacacaaaagctatttaattaatcatttatggcagagaaaagaggaatcctggacccatcttgtaaagaaagagaaatagggttcaactattctttttttctcaagcgaataccaatgttctacgtgaagataccacctcatctctgtttagaaaatgcacaaatatcaatgctgaaaaccctcacatggaagttacaaaatatgcaagaattagtcattgtttctcagattactcacacttaacctgagatgctaattatcctctgctcctccaggtctcctgagcagatttacatcctaatttccaatgaaagtcaaaaggctacaaggaagggaaggagggagaatgcaaaaggggaaatcagtgttggaattgaggagttaaaaggtctgaaaaatgactggtggagattaaaaaaannngtggcaagaactgaggagtctcaaatagactgtaaacccctggaaggggtctgtgcttcacacccgggggcctagcacaaaccaaagacacagtaaatgctacttgagtagcagaggtgaagaaaatacattgttagagacttcatggttgaaactctaatacccaaggagtcattctacctccactgcccctaacagcctaaaatggctttgaaaggtcttggcaaagaagctgcctctggtttttctgtagttgtcatcatggccaacactgatttctggggctttcaaagcagaggaaaatgctgtcgaagggaatgatgactccagaatattaagagg

SEQ ID NO: 361927 - DNA, 536 bp, Homo Sapiens
tgagggcacctggttaatatctaactgcaatctcgcctccagcctggctcgcagttctgtgaacccggtgaggaggctgcacggtgatgacaggtcaccaggcagactcgtgtgtggggtttgtgtgtgggaggagttgtggtctgtgtggtcccctgtcccttctttcttcccaagggtgacccgttcgccttcgagtcttccaaagatgtgggcagcagggtctcaagtccaccactgtgttctctcatcctaactcctcctagggccgacagaaaatcccttggcttccagagccttcctcaggctttctctcctcaattcacagcaactttatgaactccttgtcccccagtttatttttcaaacagaggctagtattttaattgtcattttgtttatacatagcaatatatggctctttgtaaaaggttttgtgtttgtgaacatttcacatgagaggaagcagagaaaaaccaccagacatttcgctgtaaaaaaaatgaatattaataaataaaatcttagtaactgtc

SEQ ID NO: 361928 - DNA, 681 bp, Homo Sapiens
gcggccgcgcgcgacccagccaggcctccagcgcgtggaacagctccagttcatcctgcagcaccaggtccgagcgttgcaggagctgccagagcagctcggggctcacggcgccccactcggtgctggccgccacggccgacaggttccaggccaggaactgcaggcagctctcgcgcagggcctcgtccccggtgcccaccgcgtagtggtaccagcccaccgccgggcccgcgcctcccgccaggtgcgcgcgcatgtagtcggccacgccgcgctgcagggaggacacgccgtacttggtggccagtctgtgcagggggatggcctgggtcagcagcacggtcagctccccgcagtacaggtacctgatgaacttgtcgaagacagcggcgcagtcctgtggctcctgcagcaccgcctcgctctggttacttagcagctccaggaacagctcactgtgcagtcccagcagcaggcggtgggcgtggaatacccggacctcatcggtgcccgcagcctgcacccgcagaaccacatcgctggcgttgccctgccgcagcagctcctgcaagcgctggagcaccgcctgggagtggttgatggaggtgccagctgcctccccgccaacatcggctctctgtgctgcatgggtgaccaggcccaccaaggtcagcatgg

SEQ ID NO: 361929 - DNA, 522 bp, Homo Sapiens
cagtttccaagtgaatttccatgtaataggacattcccattaaatacaagctgtttttactttttcgcctcccagggcctgtgggatctggtcccccagcctctcttgggctttcttacactaactctgtacctaccatctcctgcctcccttaggcaggcacctccaaccaccacacactccctgctgttttccctgcctggaactttccctcctgccccaccaagatcatttcatccagtcctgagctcagcttaagggaggcttcttgcctgtgggttccctcacccccatgcctgtcctccaggctggggcaggttcttagtttgcctggaattgttctgtacctctttgtagcacgtagtgttgtggaaactaagccactaattgagtttctggctcccctcctggggttgtaagttttgttcattcatgagggccgactgtatttcctggttactgtatcccagtgaccagccacaggagatgtccaataaagtatgtgatgaaatggtaaaaaaa

SEQ ID NO: 361930 - DNA, 326 bp, Homo Sapiens
gcttgattttgtcttttctctacagtttagttttgtcacaattacacatatagttttcaaaatcatgcactttctaaaatggtgtcatcctgaaaaacaaaacccagtgtttgcacacacacaaaatcttgaccccgttatctatattttaaatgctttttgcccaacactgaccctatgttcaactttgtgtcatttaccttataatttgaggaggggtttccctttgggcctcagtgttacaaattactagtgctattttcattattattgtaatggaaaaatctgtggactagaataaaagagtttattgaataagaaatatg

SEQ ID NO: 361931 - DNA, 295 bp, Homo Sapiens
ggcacgaggcttggttctatagtatgttacttaggatctatgtaccatatatttgtatgagaaatcctcacccaagcattcaacctaaatctttgaaaagttgggtgctgtctttagtaacttttaaaatagtttaaatctcccattttaatagtgataaggaaacctgttaaaatcatggctattgatgttatagtatggaaagttgaactttatgaacccatacttttaaaaagcatttttaaaaatctaacactgactatagaaacaaattaaaatgtctacctttaagtat

SEQ ID NO: 361932 - DNA, 487 bp, Homo Sapiens
  misc_feature (27)..(27): n is a, c, g, or t
cggggcctgaatggggttttcaactcncggggttcacctcgcacgctgcttggtctttagaataaagattgaggttatcaagacctagaaaaatgacttttctgaacttgaaatatttcctttgaatgctcaggagtcaatatacttttgttattcagaacacggattccaagttagatatactcaatttgaatctcacctgtcattgatagaattatccgtgtaactttgtgaaaaccacctaacttccctgtaccttagtttcattgtcaggaaaaactatggtaataattataactaccttgtattgttgtttcaaggattaaatttgaaatgcacaaaaatcctttagtacagtcccaggtagagaataagtgctgttattattattttaaaaattttgtccccaactttttattgtgaaaatttcaaaattatagaggttgaaaaaatagtgcaataaacatccatatactctactgatatt

SEQ ID NO: 361933 - DNA, 445 bp, Homo Sapiens
gcacgagggcgctcggccaggccggcaccatgcggcccctgctctgcgcgctgaccggactggccctgctccgcgccgcgggctctttggccgctgccgaacccttcagccctccgcgaggagactcagctcagagcacagcgtgtgacagacacatggctgtgcaacgccgtctagatgtcatggaggagatggtagagaagaccgtggatcacctggggacagaggtgaaaggcctgctgggcctgctggaggagctggcctggaacctgcccccgggacccttcagccccgctcccgaccttctcggagatggcttctgagccctggagctggagcccagcagttggaggtggtgcacctgccaggcagcgcccacagaaccagccctgtcctctcgacttccttccttagcttcatgtgaaataaaagctattctggtctc

SEQ ID NO: 361934 - DNA, 809 bp, Homo Sapiens
  misc_feature (410)..(410): n is a, c, g, or t
gtgtgagccatcacgcctggcctaatacttgaataatattttaaagcaattggtgctcttggtaattctatatgttttattttttgcatttaaggcattattctgagaagaggtctgtaggcttcaccacactgccaatggggtccatggcatacacagggaaaaaccattaagaaccctgagtaaatttcaaaatcccaaacctgtcatttggcagagacaccaccagggagcagaacaacaaaaagaatgtgagctccaggctgcaaagtccaaaagggagaaggtaatctacacgcgcttcatccaaacctgtgactaagtgccaaaaaagaaggagccttagagagcaagccccataggatattgtcatctggggaaactgaggcaggtaaggggcagagcccgangtgaggaaaacccaaggtcacttagcgcccagtcctttcccactgcaccgcacctggaccgccaagctgctctcttaggacctagctgatgaagcggaacgtggaaccacttctgtcctcgactttaccccacttcccactctagatggtagagaagaccgtggatcacctggggacagaggtgaaaagcctgctgggccggctggaggagctggcctggaaactgcccccgggacccttcagccccgctcccgaccttctcggagatggcttctgagccctggagctggagcccagcagttggaggtggtgcacctgccagcagcgcccacagaaccagccctgtcctctcgacttccttccttagcttcatgtgaaataaaagctattctggtctcc

SEQ ID NO: 361935 - DNA, 657 bp, Homo Sapiens
gcggccgcggcggtggggcgcaggccgccgcgcgagtgaatcgaggcggcgggcccatccggaaccggccggccatcgcccgcggcgcggccggcggaggcggcaggaaccgaccggcgccctacagcaggccaaaacaacttcccgacaagtggcagcacgatcttttcgacagtggcttcggcggtggtgccggcgtggagacaggtgggaaactgctggtgtccaatctggattttggagtctcagacgccgatattcaggaactctttgctgaatttggaacgctgaagaaggcggctgtgcactatgatcgctctggtcgcagcttaggaacagcagacgtgcactttgagcggaaggcagatgccctgaaggccatgaagcagtacaacggcgtccctctggatggccgccccatgaacattcagcttgtcacgtcacagattgacgcacagcggaggcctgcacagagcgtaaacagaggtggcatgactagaaaccgtggcgctggaggttttggtggtggtggaggcacccggaaaggcacccccggaggcgcccgtggaaaaagcaaaggggccggcaggaatttaaaacaacagcttttggcaaaggagctggatgcccagctgggcgcctataatgcgagaatgg

SEQ ID NO: 361936 - DNA, 544 bp, Homo Sapiens
gcggccgcctggctgcagcatgcgcgcccgccgggggctgctgcggctgccgcgccgctcgctgctcgccgcgctcttcttcttttctctctcgtcctcgctgctgtacttcgtctatgtggcgcccggcatagtgaacacctacctcttcatgatgcaagcccaaggcattctgatccgggacaacgtgagaacaatcggtgctcaggtttatgagcaggtgcttcggagtgcttatgccaagaggaacagcagtgtaaatgactcagattatcctcttgacttgaaccacagtgaaaccttcctgcaaactacaacatttcttcctgaagacttcacctactttgcaaaccatacctgccctgaaagactcccttccatgaagggcccaatagacataaacatgagtgaaattggaatggattacattcatgaactcttctccaaagacccaaccatcaagctcggaggtcactggaagccttctgattgcatgcctcggtggaaggtggcgatccttatccccttccggaaccgccacgag

SEQ ID NO: 361937 - DNA, 1344 bp, Homo Sapiens
  misc_feature (1136)..(1164): n is a, c, g, or t
atcaggccaaatcggccgagctcgaattcgtcgagagcggctttttctagccaggctctcaactgtctcctgcgttgctgggaagttctggaaggaagcatgtgctccagaggttgggattcgtgtctggctctggaattgctactgctgcctctgtcactcctggtgaccagcattcaaggtcacttggtacatatgaccgtggtctccggcagcaacgtgactctgaacatctctgagagcctgcctgagaactacaaacaactaacctggttttatactttcgaccagaagattgtagaatgggattccagaaaatctaagtactttgaatccaaatttaaaggcagggtcagacttgatcctcagagtggcgcactgtacatctctaaggtccagaaagaggacaacagcacctacatcatgagggtgttgaaaaagactgggaatgagcaagaatggaagatcaagctgcaagtgcttgaccctgtacccaagcctgtcatcaaaattgagaagatagaagacatggatgacaactgttatctgaaactgtcatgtgtgatacctggcgagtctgtaaactacacctggtatggggacaaaaggcccttcccaaaggagctccagaacagtgtgcttgaaaccacccttatgccacataattactccaggtgttatacttgccaagtcagcaattctgtgagcagcaagaatggcacggtctgcctcagtccaccctgtaccctggcccggtcctttggagtagaatggattgcaagttggctagtggtcacggtgcccaccattcttggcctgttacttacctgagatgagctcttttaactcaagcgaaacttcaaggccagaagatcttgcctgttggtgatcatgctcctcaccaggacagagactgtataggctgaccagaagcatgctgctgaattatcaacgaggattttcaagttaacttttaaatactggttattatttaattttatatccctttgttgttttctagtacacagagatatagagatacacatgcttttttcccacccaaaattgtgacaacattatgtgaatgttttattattttttaaaataaacatttgatataattgtcaattaactgnnnnnnnnnnnnnnnnnnnnnnnnnnnnnccttggtcggccgccttcggccccttgagaaagctttctaagaaccattccttttgggccgccccggcccccaggaagggtaaagtggaaacatggggccaaaaacctggttttcccctagggggaatccccgggggcccagggaacctaaggggctttgggaaattttttccccccaat

SEQ ID NO: 361938 - DNA, 855 bp, Homo Sapiens
  misc_feature (29)..(29): n is a, c, g, or t
  misc_feature (62)..(62): n is a, c, g, or t
  misc_feature (259)..(315): n is a, c, g, or t
  misc_feature (338)..(363): n is a, c, g, or t
  misc_feature (754)..(754): n is a, c, g, or t
aaaacccctaaattccaattgaacctggncccgaaacatggtggcctcaatcccctgtaaancccccaccaactttgggtggcccgaggggggcaaaattaccttgggcctccaggagtcggagaacccaccccgggcaaacatggccaagatccctgtcctcctgcaaaatatacaaaaattagcctgggtgtggtgtccagatgccctgtagtccccagcctacttgtgaggctgaggtgggaggatcgtttgagcnnnnnnnnnnnnnnnnnnnnnnnnnnnnnnnnnnnnnnnnnnnnnnnnnnnnnnnnntgacagagtcagaccctatctcnnnnnnnnnnnnnnnnnnnnnnnnnncagttgaactatatggaaacttctgtacctgtgtcaacggtgcatcttatctaatactatatgatactgtaatctaatattatctctgataattcaaaaatgctaataaactctgctcaaatgtgttagtttttcatacttcatcctatgccaggaaatgttttgaacttcaccaaagctttgctaatgtctgcctaccataaggctgtcagctgaaaatagcaaattactgcccgactcccattgaccataatatccattccgcgtgatcctagttctttaatttactggaagtctttactgttttgtggtacctactaatcagagactcaaagcctatagatacagaaatgtaacagtaaatctcaacctaaggctaatttgcaaatanaattacaaaatcaacttagaacccaaagactcactaagtgatatgcttttgatgttttgaaggttttaaaaggttataaattccattaaattttagcatac

SEQ ID NO: 361939 - DNA, 363 bp, Homo Sapiens
  misc_feature (316)..(317): n is a, c, g, or t
ttttgggccttctggttattgcattttggatactcagtgaatgttaattaaccaggaaacttaaaagttatttcaattatgaacctcttcaatccttcatcaattattttgagtattctggtcttaaaaacatctctttcttctacaaacttctgaaagagatgaacacctccacctacaccaaaataatgtgctttgctggccaaaagtacacgtccatttttacttaacagtctaaggaaagtctggtcgcaaattactataataatctgggttgtaaatggtttctgaggtgaaaatgagatcatatttacannaagtttttcactctttagtacaagcttacaaaactcagaccactca

SEQ ID NO: 361940 - DNA, 1106 bp, Homo Sapiens
agacggcagtactatacggtactaaggtagcgaggcctgggtggcgccgggcggccgtgtggcgcggctgctcgccccactaatgtggcgcagggcggtttcctcggtggcggggtccgcggttggagccgagcccgggcttcggctgctggccgtgcagcggcttcccgtaggagcagcgttctgccgggcttgccagaccccaaactttgtccgcggcctgcacagcgagcctgggctggaggagcgggcggaggggacggtcaacgagggacgcccagaatcggacgcggcagatcatactggtcccaagtttgacatcgatatgatggtttcacttctgaggcaagaaaatgcaagagacatttgtgtgatccaggttcctccagaaatgagatatacagattactttgtgattgttagtggaacttctacccgacacttacatgccatggccttctacgttgtgaaaatgtacaaacacctgaaatgtaaacgtgaccctcatgttaagatagaagggaaggacactgatgactggctgtgcgtggattttggcagcatggtgattcatttgatgcttccagaaaccagagaaatctatgaattagagaaattatggaccctacgttcttatgatgaccagttagctcagatagcacctgagacagtacctgaagacttcattcttggaatagaagatgatacttcatctgtgactccagtggagttaaaatgtgaataaaatattttatgcactgcgttagtcatttcagatttggattgagtcacttattggaaaatacagctcctaaagtccgtctccttggttaggctgctcttaggacaaggcttgtgtacctcatgggcactcctgctaactggcatgcagagactgtcgataagtgagctatacctgcaaccaaaaatcagtacattctacccaaaacttataacacgctgcctttatcctggaaatgtcatcagaatttcctggagttagcactggctcctgtgcttgacttctctgctcagatttttattaatttaatttagcttaaatgtaaatcttaaccctgtttgtttaatggaatggcaaaaatttt

SEQ ID NO: 361941 - DNA, 801 bp, Homo Sapiens
  misc_feature (664)..(664): n is a, c, g, or t
  misc_feature (760)..(760): n is a, c, g, or t
caggctggtaccggcctgggatgtaaggatgccgacgcaaggctgctgctatggggccgggcggccgtgtggcgcggctgctcgccccactaatgtggcgcagggcggtttcctcggtggcggggtccgcggttggagccgagcccgggcttcggctgctggccgtgcagcggcttcccgtaggagcagcgttctgccgggcttgccagaccccaaactttgtccgcggcctgcacagcgagcctgggctggaggagcgggcggaggggacggtcaacgagggacgcccagaatcggacgcggcagatcatactggtcccaagtttgacatcgatatgatggtttcacttctgaggcaagaaaatgcaagagacatttgtgtgatccaggttcctccagaaatgagatatacagattactttgtgattgttagtggaacttctacccgacacttacatgccatgggccttctacggtttgtgaaaattgtaacaaacacctgaaatgtaaacgtgacccctcatgttaagatagaagggaaggacactgatgactggctgtgcgtggattttggcagcatggggattcatttgatgctttcagaaaccagagaaatctatgaattagagaaattatggaccctacgttcttatgatgacccagntagctcagatagcacctgaagacggtaccctggaagacttcctcctttggaataaaaagatgaaaactttccttctgggaactccccgggggaagntaaataggtggaaataaaatattttttatggcacctggccc

SEQ ID NO: 361942 - DNA, 1476 bp, Homo Sapiens
  misc_feature (1101)..(1188): n is a, c, g, or t
agcgggagcacaacttccggccccactgagcggtgtcctgagccgattacagctaggtagtggagcgccgctgcttacctgggtgcaggagacagccggagtcgctgggggagctccgcgccgccggacgcccgtgaccatgtggaggctgctggctcgcgctagtgcgccgctcctgcgggtgcccttgtcagattcctgggcactcctccccgccagtgctggcgtaaagacactgctcccagtaccaagttttgaagatgtttccattcctgaaaaacccaagcttagatttattgaaagggcaccacttgtgccaaaagtaagaagagaacctaaaaatttaagtgacatacggggaccttccactgaagctacggagtttacagaaggcaattttgcaatcttggcattgggtggtggctacctgcattggggccactttgaaatgatgcgcctgacaatcaaccgctctatggaccccaagaacatgtttgccatatggcgagtaccagcccctttcaagcccatcactcgcaaaagtgttgggcatcgcatggggggaggcaaaggtgctattgaccactacgtgacacctgtgaaggctggccgccttgttgtagagatgggtgggcgttgtgaatttgaagaagtgcaaggtttccttgaccaggttgcccacaagttgcccttcgcagcaaaggctgtgagccgcgggactctagagaagatgcgaaaagatcaagaggaaagagaacgtaacaaccagaacccctggacatttgagcgaatagccactgccaacatgctgggcatacggaaagtactgagcccatatgacttgacccacaaggggaaatactggggcaagttctacatgcccaaacgtgtgtagtgagtgtaggagataactgtatataggctactgaaagaaggattctgcatttctattcccctcagcctacccactgaagtctttgggtagctcttaagccataactaaggagcagcatttgagtagatttctgaaaaacaatgttatttgttgatttaaaaagaaaactgtatttttattaaataaaatttaaacatcacttcagnnnnnnnnnnnnnnnnnnnnnnnnnnnnnnnnnnnnnnnnnnnnnnnnnnnnnnnnnnnnnnnnnnnnnnnnnnnnnnnnnnnnnnnnactacactcctccaccctccacccctcttatctatactctcccgcagcccccactaccataaccccaccaccccatcaccaaatcgacaagaagcgggggaccccagggcggcgggtagccacgtctaggaccaactgaggccgggacgggcgcggccgagaaagaagaccgatgcgagcggaggcgacacaagacagcgcgagaggagagaggtgcaaggggaccaggacagccccagaggtgggagacaagaacaaagcgaccacgcagcgaggacgacggccagg

SEQ ID NO: 361943 - DNA, 469 bp, Homo Sapiens
gcggccgcggggcccttgcagctgcagctgccctcggcgctcacgctgctgccgccctccttcacctcgctgtgtctgcccgcgcagaactggtgcgccaagtgcaatgcctccttccgcatgacctccgacctggtgtaccatatgaggtcgcaccacaaaaaggagtatgcgatggagcccttggtgaagcgccggcgagaggagaaactcaagtgccccatctgcaatgagtccttcagggagcgccaccacctctccaggcacatgacctcgcataattgactcggaaaggaccccagctttccacgcgcgcgcaagcacagttaagccacctgcaggaataaacacgcgagaacatccaccgcttccttgcaccccgaaaccctgcacaaagacacatacattcaccgcccccccgcgcccccaacgcgcacacacacgtcctctcctcccaggaacctcattc

SEQ ID NO: 361944 - DNA, 1520 bp, Homo Sapiens
  misc_feature (665)..(674): n is a, c, g, or t
gggggagtcctgataacccaggcctgtctgactactttgccttcttttgtagcatataggtgatgtttgctcttgtttttattaatttatatgtatatttttttaatttaacatgaacacccttagaaaatgtgtcctatctatcttccaaatgcaatttgattgactgcccattcaccaaaattatcctgaactcttctgcaaaaatggatattattagaaattagaaaaaaattactaattttacacattagattttattttactattggaatctgatatactgtgtgcttgttttataaaattttgcttttaattaaataaaagctggaagcaaagtataaccatatgatactatcatactactgaaacagatttcatacctcagaatgtaaaagaacttactgattattttcttcatccaacttatgtttttaaatgaggattattgatagtactcttggtttttataccattcagatcactgaatttataaagtacccatctagtacttgaaaaagtaaagtgttctgccagatcttaggtatagaggaccctaacacagtatatcccaagtgcactttctaatgtttctgggtcctgaagaattaagatacaaattaattttactccataaacagactgttaattataggagccttaannnnnnnnnncatagagatttgtctaattgcatctcaaaattattctgccctccttaatttgggaaggtttgtgttttctctggaatggtacatgtcttccatgtatcttttgaactggcaattgtctatttatcttttatttttttaagtcagtatggtctaacactggcatgttcaaagccacattatttctagtccaaaattacaagtaatcaagggtcattatgggttaggcattaatgtttctatctgattttgtgcaaaagcttcaaattaaaacagctgcattagaaaaagaggcgcttctcccctcccctacacctaaaggtgtatttaaactatcttgtgtgattaacttatttagagatgctgtaacttaaaataggggatatttaaggtagcttcagctagcttttaggaaaatcactttgtctaactcagaattatttttaaaaagaaatctggtcttgttagaaaacaaaattttattttgtgctcatttaagtttcaaacttactattttgacagttattttgataacaatgacactagaaaacttgactccatttcatcattgtttctgcatgaatatcatacaaatcagttagtttttaggtcaagggcttactatttctgggtcttttgctactaagttcacattagaattagtgccagaattttaggaacttcagagatcgtgtattgagatttcttaaataatgcttcagatattattgctttattgcttttttgtattggttaaaactgtacatttaaaattgctatgttactattttctacaattaatagtttgtctattttaaaataaattagttgttaagagtcgagcaacgg

SEQ ID NO: 361945 - DNA, 1621 bp, Homo Sapiens
  misc_feature (1223)..(1223): n is a, c, g, or t
aagaaaagaaaaagccaaaacaaaagggagaaccttctcccggtagcagcggcaggaactgcaaacatgatggcggcagctcccatccagcagaacgggacccacactggggttcccatagacctggacccgccggactcgcggaaaaggccgctggaagccccccctgaagccggcagcaccaagaggaccaatacgggcgaagacggccagtattttctaaaggttctcatacctagttatgctgctggatctataattgggaagggaggacagacaattgttcagttgcaaaaagaaactggagccaccatcaagctgtctaagtccaaagatttttacccaggtactactgagcgagtgtgcttgatccagggaacggttgaagcactgaatgcagttcatggattcattgcagaaaaaattcgagaaatgccccaaaatgtggccaagacagaaccagtcagcattctacaaccccagaccaccgttaatccagatcgcatcaaacaaacattgccatcttccccaactaccaccaagtcctctccatctgatcccatgaccacctccagagctaatcaggtaaagattatagttcccaacagcacagcaggtctgataatagggaagggaggtgctactgtgaaaggctgtaatggagcaatcaagggcttgggtgcagctttcccagaaacctgatgggatcaacttgcaagagagggttgtcactgtgagtggagaacctgaacaaaaccgaaaagctgttgaacttatcatccagaagatacaagaggatccacaaagtggcagctgtctcaatatcagttatgccaatgtgacaggtccagtggcaaattccaatccaaccggatctccttatgcaaacactgctgaagtgttaccaactgctgcagcagctgcagggctattaggacatgctaaccttgctggcgttgcagcctttccagcagttttatctggcttcacaggcaatgacctggtggccatcacctctgcacttaatacattagccagctatggatataatctcaacactttaggtttaggtctcagtcaagcagcagcaacaggggctttggctgcagcagctgccagtgccaacccagcagcagcagcagccaatttattggccacctatgccagtgaagcctcagccagtggcagcacagctggtggtacggcggggacatttgcattangtagcctggctgctgctactgctgcaaccaatggatattttggagctgcttctcccctagctgccagtgccattctaggaacagaaaagtccacagatggatccaaggatgtagttgaaataacagtgccagaaaacttagttggtgcaatacctgggccaaaggagggaaaactttaatgggataccaagaagttgactggtgccagggatacagaatctccaaaaaaaggaaaattcctaaccttggcacaaggaaatcggaaagggaacccttttctgggaaaacccagccttgcaaacacagggctgctctccaatttttaaatttaccccaaaggggattcccccttttgaagccccagggaagttttccggggcttggtcacattcccctac

SEQ ID NO: 361946 - DNA, 972 bp, Homo Sapiens
  misc_feature (71)..(71): n is a, c, g, or t
caccttcagattgaggcatggatcacgcaccaggggcaccagcacgcccagatcgagcaggcgcacgtctntgatgaccaccacagagtactatcggcactcggcctccagggcgcgtatcgccacgggtgggcagctgcgctcgcaggcggtgtcctcgacgaggcccacctcggcccgggcacggggtgcgccaggacacagtggcggcgagcagatgaccttgttagtccgccagcggaagagggcggccgtggtaagattggccgtgtccggggcgcgcgcagcggggtcccccggcggcgcgtacagccgcagcacggagaagtcgcagcggaagagcgaacgcagcatgtcgcgcagcgcgccctgcaagctctcggcgtcgcccggatacagcgcctgccatagatgccacatgggctcatacaagtagaaaacgtccgggtgctggttaaagagttcgcccaggaaggacgagccggtgcgccaggtggcatgcacgtagatgtgctgcttctcgcgagacactgcctccccgacagcgccgctgaggttgcttgggaaccgaggagactggttcgcgcccccttcctcggcggcccgcgcctccgctccctgctcgcgttcgccggccgccgccgcctccaggctccacactcccaggctgcgctgcaggccggggcagtgctcggcgcccttgtccccgtcgcggccgccgtccaatacggaggggacgagcaacagcaccagcgtgtacagcaccaacagcagcgcgaacttgcagtactctcggcgtcgccgccgccggcccttcatcgttcaccgaccctccagagcgggtcgggcgccagtcttctcccgttcctcagaaatcccgtgccaggtccgctcctgtggcctctcccggcccctctgcgccgggaggagcagagccgcggggccgcgcatccacaaggggaaacttccgct

SEQ ID NO: 361947 - DNA, 829 bp, Homo Sapiens
  misc_feature (493)..(503): n is a, c, g, or t
  misc_feature (505)..(512): n is a, c, g, or t
  misc_feature (515)..(515): n is a, c, g, or t
  misc_feature (518)..(583): n is a, c, g, or t
  misc_feature (588)..(588): n is a, c, g, or t
  misc_feature (611)..(625): n is a, c, g, or t
acaaaattggtgtttagattctggaggagaaaaaatgagttacaatgtcaggtgtttttaaaaattccttttagagacagtcttttgggaaccaaagtattttactgtaaatctttaaaataacagaattcagtgctctttcatttgttaatgctgtccagatttttcacacagttatactcagttaatactagttttcagaacattagtccaaggctatttcaagttttccattgaatatatgcttatggttaaaagaaaaacgaatggttttataattctgtgtattttgtcatatgccttagcagagtaagtcatttttccattttacttaggaataagctttttcgaactgaaaattcatggtaaaataggatttctatctaatgttaatccattgcttatttgtattcaattccattgtctacagtttgcttaaatgttgactaagaatgattggagtcaataaatttgtactgtattttgcttcgannnnnnnnnnncnnnnnnnnccnccnnnnnnnnnnnnnnnnnnnnnnnnnnnnnnnnnnnnnnnnnnnnnnnnnnnnnnnnnnnnnnnnnnaaaancctttcacaaactcttccttcgnnnnnnnnnnnnnnnaccaaaacacaaaaggcgacaaaatcgggttccccaaaaaaacttcgggggattggcgtggggggtggggaccctcgagaaataatatatacaccctctgcggccaccgggcggtcctcccacaaaaaaatcgcagagcggagtgtcctcacgctctttccatcgggaggcatctccccgcggtataccatagccggcgcctaa

SEQ ID NO: 361948 - DNA, 579 bp, Homo Sapiens
cattaacacagcgcttagaagaaatgacacagagaatggaagccctggaaaagtcgcctgagatacagatgaagattagaaatcgcgacacatttgtagtcattgtatcacggattacaatgaacgcagtgcagagccccaaagctcaggctattgttaaatcaataatgttgtgaagtaaaacaatcagtactgagaaacctggtttgccacagaacaaagacaagaagtatacactaacttgtataaatttatctaggaaaaaaatccttcagaattctaagatgaatttaccaggtgagaatgaataagctatgcaaggtattttgtaatatactgtggacacaacttgcttctgcctcatcctgccttagtgtgcaatctcatttgactatacgataaagtttgcacagtcttacttctgtagaacactggccataggaaatgctgtttttttgtattggactttaccttgatatatgtatatggatgtatgcataaaatcataggacatatgtacttgtggaacaagttggattttttatacaatattaaaattcaccacttcagagaatggta

SEQ ID NO: 361949 - DNA, 307 bp, Homo Sapiens
gctgtggcctgaatgtttgtgtcccccaaaaattcgtatattgaactctcatccctaaggtcaacagtttagggaagcgattaggtcctgaggactctgccctcttgcatagaattagtgctcttataaaagatgcccgagggagctcttttgcccctcctgccatgtgaggacacagctagaagctaccatctgtgaaccaggaagcccccctcaccagacactgaatctgctggagccaccatcttggacttcccagcctccagagctgtgagaaataaatgcctgttgtttaagctaaaaaaaa

SEQ ID NO: 361950 - DNA, 532 bp, Homo Sapiens
gagaaatacacctgtctcttattcttatctcttaagaattttggttcttcccccagtgattgctggttgaattcttatatggacaggtttcccttcccccagtatcgcacatggttctagttagaatcctgttagatagtgagcatctgctgttagctagacactgttgaatcaatacagtgaaacagacaggtaagcaggtggttttaatgcctcattctaagtgctatttaaattggatcttgaaagatgaataaggcctgccttaagttctgctaaaggcaatgttgttattaaggacgggtgaggaaggaccaagaagtctggctcctgcttttctacatgcctgtgaaggagacttttcatgaaactgaataaaagaaatcctttccgagatagaggagatttgtaggtgaatgcagaagtgtatccagctttgaaccatgcattccatctatattcctcctgtctgaactcatgctcttttgattatgttttgaaataaagggctgcattagttcttttaaaaaaa

SEQ ID NO: 361951 - DNA, 901 bp, Homo Sapiens
  misc_feature (28)..(28): n is a, c, g, or t
ttgggaactacccacttaactaacgccntggctgaggcaatcttcctccctctgtgcctcaggccccttccacctgtgaaatggggtccacagcatcctgcctctcagggtcactgtgaggtgtcgatgtgagcaaggcctgaggcttggcaagaagtcaatgtctgcaactcagcagggagcaatggcaggggcagtcaggggtcggctcggataggggtgggtgggctcctgaggttggaagggtaggaattacagagctcttgttactattgttgttactgtttttaaagatacgatatttcagataattcaggagcacgtaaggatgaaacttaggataacctaaaatcacacaacctagagagaagcgcatttttgtcttcccccattttctaggcaaaaatgaaagtactttgtcctcttgaaaaacaattctctaatgaatatcctatgttacatagaggcctgtgtaatgcatttgtgtggccacatggtgtcaatttcatgaatatacaataatattattaattccctgctgaggacattaactggtttccaaggctgcttgttgtttttgctactacaaataatgcattgatgataaatacttttacatacatggttgtatgtttatctgaactattttcaccaatatattcacctagtgtgtatggaagtgtccatttttgtcatacccctggtaaccctgtgatattatttttaaacattttgctaatggatctctgttcttgtttgaatgtatttaatttccagcagaatgagccccattccttattttgattggccatttatcatgtacatatggtgaaatgcctattcgtgacttagccaatgttgtttctttttcttactgattactacagtacatttttatatg

SEQ ID NO: 361952 - DNA, 500 bp, Homo Sapiens
tgctggcaggagagtgattatctatcacagaaatgcttttagcagaatgtacttggtcgtttagaattgcttatggttaacaaagtagaaggttgtggatttatggggctccctggaaaatgtcacatataccacatatgtaactatctgcataaaaattaagatatttgataattgagacaggtatctccatgtaaataaattgtctgcatacctctctagaagtctcatctatctgcctgggcaagggagtatctaatgacagaaccaaggatctaaagaatcagattaagagatctaaataattctctgatttgcctatgcctaatgattacctgagttcgtgaaattactagtaaagctttatattttgtaagatcttagattctgataagtctaatgtcacaatccaatcagtttttcctatctcaaggaatcatgtccatataatggaattaatcctgaaactctgaaaagttttaatattctggggtcagggt

SEQ ID NO: 361953 - DNA, 1023 bp, Homo Sapiens
cggtccggaattcccgggataggggactcgccgcagatccgctgtacttgcgtccgctacagtatgtcaatcgcttgccccagcacagctgtcattcttctctacagaagagcttctcctcatcaactggggatgattacagttcttcctaaaaaaggatggctgctctttttctaaagaggttaacactacaaactgtaaagtctgaaaatagttgcattagatgttttggtaaacacatcctgcaaaagacagcaccagcacagttgtcccctattgcttctgccccaagactctccttcctaattcatgcaaaagcctttagtaccgctgaagacacccagaatgaaggaaaaaagacaaaaaagaataaaacagcttttagtaacgttggaagaaaaattagtcagcgagttattcacttatttgatgagaagggcaatgatttgggaaacatgcaccgagcaaatgtgattagacttatggatgagcgagacctgcgactggttcaaaggaacaccagcacagaacctgcagagtatcagctcatgacaggattgcagatcctccaggagcggcagaggctgagggagatggagaaggcgaaccccaaaactggaccaaccctgagaaaggaactgattttgtcttcaaatattggacaacatgatttggacacaaagactaaacagattcagcagtggattaagaaaaaacacctagtccagattaccataaagaaaggaaaaaatgtagacgtgtcagaaaatgaaatggaggagatatttcatcaaatactccagactatgcctggaatagctacattctcatctaggccacaagctgttcaaggaggaaaagctttaatgtgtgttcttcgtgctttgagcaaaatgaggagaaggcatataaagaaactcaagagacccaggaaagagacactttgaacaaagaccatggaaatgataaggaatcaaatgttctgcatcagtaattttaataaagaaaagcatgctctgagag

SEQ ID NO: 361954 - DNA, 648 bp, Homo Sapiens
  misc_feature (52)..(52): n is a, c, g, or t
atatataaaatgcagatctctatgctacagcaatccacctgtgactgggatntgcagcatgtgcccatcattgaactgtgggacagccacctcagagggtggggcgcatccgagagcacatgctgtcagccaacatcatcgaggagctcaggcaatttcagcgcctcactcgctcctacttcaacatggtgttgattgacaagcagggtattgaccgagaccgctacatggaacctgtcacccccgaggaaatcttcacattcattgatgactacctactgagcaatcaggagttgacccagcgtcgggagcaaagggacatatgcgagtgaacttgagccagggcatggttaaagtcaagggaaaagctcctctagttagctgaaactgggacctaataaaaggaggaaatgttttcccacagttctagggacaggactctgaggtgggtgagtttgacaaatcctgcagtgtttccaggcatccttttaggactgtgtaatagtttccctagaagctaggtagggactgaggacaggccttgggcagtgggttgggggtagaagttcttcctttcctaacccgggcccctgcccagctctccaaagtctttcagaaaagtaaatcctaaattcagtgatgaaaaaa

SEQ ID NO: 361955 - DNA, 619 bp, Homo Sapiens
gcggccgcaagccgccagggggcgccgcagagcgcgtgcgcgcaacggggaccactgtccgctcgggcccgggcgttgctgccgtctgcacacggtccgcgcgtcgctggaagacctgggctgggccgattgggtgctgtcgccacgggaggtgcaagtgaccatgtgcatcggcgcgtgcccgagccagttccgggcggcaaacatgcacgcgcagatcaagacgagcctgcaccgcctgaagcccgacacggtgccagcgccctgctgcgtgcccgccagctacaatcccatggtgctcattcaaaagaccgacaccggggtgtcgctccagacctatgatgacttgttagccaaagactgccactgcatatgagcagtcctggtccttccactgtgcacctgcgcgggggacgcgacctcagttgtcctgccctgtggaatgcgctcaaggttcctgagacacccgattcctgcccaaacagctgtatttatataagtctgttatttattattaatttattggggtgaccttcttggggactcgggggctggtctgatggaactgtgtatttatttaaaactctggtgataaaaataaagctgtctgaactgttaa

SEQ ID NO: 361956 - DNA, 529 bp, Homo Sapiens
cgatttaatttattctaattagattaaccctattaatctatggattgggtatcaaaatgaatgccagtccagatgtgcctagacacgaaattggagctgaggactctcacgatatgcaagttcatccaacgtgaagataccataagctttttctctgaaccagagaaatgaaagtccagtttaagaggcctgaatagatccttggcccctgttaaggcatcccacttcacagttctgaaggctgagtcagccccactccacagttaggccaagaattagattttaaaacttcatctgtctgtcccagttaactgttaaataaggcctcatcctccactgaagagtatggattgaaggattgtgaactatgtttagtgtgattgtgaacttggtgcctaatgttccatgtctgaagtttgccccagtgctacacgttggagtatacctatgtgtgtgctttgccactgaagtaagattttgcctgtatggtactgttttgtttgttaataaagtgcactgccacccccaa

SEQ ID NO: 361957 - DNA, 450 bp, Homo Sapiens
acacaacctcaagaaaggaagcgtgaacccccagggaacagcgggtcccttccctcctcagacacaagccacctcagcttgtggctcttggcccccagccccaccaacccacctgttcatttattcaacagacaatgacagctgatatttattggacatttgcaccatgccaagcattcggcttggattatcccatttgtttctcacagccggtatttattgtctgctcctctgtgccaggtgctgtgctctgggcaggggcactgcatgggctgcctgccctggtggagcttgtggtctgatgggtgaggctgacccaagcccaccccattgccaacagggccagggcaagagtacacacaggggcctcataccatatgtctaaatatttaaaagttatcaatcaagctaacaactgttaaataaaatatgttctattctcctactttg

SEQ ID NO: 361958 - DNA, 747 bp, Homo Sapiens
gtagttgttgtccttgtatgagtgactccagaggccttcacaaagggcagctggagtggggaagtaggactcaaaggtgcggcagagagccccagctgggcacttgttaactcctgaggtccagtcccatcctctgtgccagttgctcttgcacgtgtgggaggtgtgacaatcctcccaccagcgctgacagtcctctttgcataagggcacatccaggaagcgttctttgcgccagctctgattcacctgctggatccagggccccaggttgggtgagcactcatagagacaggtgtcctggatgaagtggcgcttgcaggcgggctccatcttgccgcagtggtcccagttaaagttgtacaggcgggaggtgtccttgtgcagctcctggctggtgctggctgtgcagcaggcattcttcttccagggactgcattggtcatgcagcttgtcctcaggacctggctttgtcttgtggtgcttggcatccatacagacattgaggagatcagtcctgtcctgggcactgcacatggtggctacacagaccagaagcagcagaagtggcatccatttccagaccatgtctttctgtccctgcaggcggagctgaacctccgttgctgctgggagcatacacggctgtgtctgagttggcctctctctaagtaggcaatagatccaggcccctaggctgtccccacagcctctgtcttcggtacagggtagacaacgcgctctccc

SEQ ID NO: 361959 - DNA, 1118 bp, Homo Sapiens
ttcacaaaacactggtctttatgtataacactaggggcagatgtgataacagacccaataattagatcctcagtacaatctgggctaaaattatgagtcttcacacgaatcatataatcctttccatttgactgaaggacaaatttgactaaactgctcagcttaaagctctccggcaatgtctgggtcagcaggctatctaaaatgcccttcagatgatccagcagggattgaagacagccatccttcagattttgattaaccccaaggataaataaagtttcatgaaatgctggcattgtgaaaggcaaaatgtggcacttctgaaagacaggtccactgaggatgtgcagagaacctgagaggaagtctggtacttcgatgacatcctgaacatgcactaggagagaaggtctaaggcagatcttggcctggccacaggttccttcacaagcttcttctttaccatctcttccaggattcttgagaaggctaagttctgaaaatgacactagaaagtcttccacatcttgtgatgtcccaccagtcagggactcagaatttgagttatcttcatggagactaatccaaaaagcagctgacagaaagtcacaattccaaaaaggaagaacactggtaccttcctgtggcagcaaagggaaggaacacttcagcctttttagcgggaaaactttgcctaattcagcaatgagtttctcatttatggttttgataggatgacatgaaggtgcttccaggaaacccctgttcaactttcctacaagtgcttctggttctggaaaggaaaaccactggttacccagtttgatcctgaagattctgggttgagaaccttcaaaaggtaagctcctggtgaagatatggttcaaagcaccttctacatgaaaggacttatcttgactcctatatccagtgcacttgtaccctgccacagccttacagctgaatggatacacgtcgcttaaaatgagcccccccagggctgccatggcaaccacttgccaactgttgtgccattctctctggggcttatccgcaggagttccaccttgtcctctacataatgccacgtggacttctccttcctctgcaagaac

SEQ ID NO: 361960 - DNA, 706 bp, Homo Sapiens; identical to SEQ ID NO: 264492
  misc_feature (196)..(239): n is a, c, g, or t

SEQ ID NO: 361961 - DNA, 1375 bp, Homo Sapiens
gaggcaagaattcggcagagggttacaggaaacttgataatgaagatctccaccctggtcaagaacagaggaaagacctaaagtgaggtcagctaaaaacaagaaagaaatttaaagcatcctgggaagtcatcataccctttttctccaagaaaatctagttttgcttgtttttgtatatcccacaacacctgtgtttgactatctttttcactttggatttggattttggtgtgatatacacagttccaaaaaatcaatggatagaaaactcaatggcataaataagtgcttaaaacaatacttcaagaaatgttcaacattccacgagaacaatatccacgtgagatgaaaagaaaagtctaagttagttcctgattcctggaagctgggaaagtctcattccagtaactacttaataccccctgtcagtctccttcaaaggctgaagccagcctctgactgaagcgcagccgcaatgtttcctgtctggtgccagcacagcttgcctggacttctgaaaattgcaagcgcttgctccttgctagtcaccacactccccctttcttagttgcagactccctcttgctgtggtttaccaggtgcccttattgcccctcatgcttgtgtgccactttggacttaatctggcacacttaactcccttcatctacgcctgaagctggacaagctgaagtgactgcgtcactttctcaattctggctcctgcccaccgaccttgctctgctaggaggaattagctctgcctggccagaacccaagaagtgacaaatcaaactcgctcaataggtggtaattaaacttctggctctaaagcccagaataggttgtcaatgggatttcacagtggctccctgacactaagcaaggatgtatttctacatctagttttaaatcttaaactctaataggattctcagaaaagacagtaaagactaaggccaaaaaaagttgtttaaaggggaaaatgacagtaagtacaaaagataatctggggaagacctggcaattctgaaatcaaaacatctgttactaagtggatcatgactgcttagtttctagtctagaatctttaagtaagccattcagaagatgtgatactatagaatgataccaactgaggatagagtggagaggaagggctgaagatgacttcagaaaaaggcctgaggcgtgacaaatgttgatctcactcactgatctatgctgtatttcttttaagaatgtattaatataaatgtccttttcttcccacatccaatccctattactacaccaaatacttgttcctctaggaaatgtgaagttgaaaaaaatttcccccattaaatgagaattattctgcttatgaaaa

SEQ ID NO: 361962 - DNA, 499 bp, Homo Sapiens
ttcattgccccttcaatgtgggaatccagccagaccctattcttggacagcatcagtgaaaggggcttgggaaagctcttgggcgtagcagcagaggcatgtcatatatggaaaccttccatgagggtgacctcaccactggaacccgttcaacataaaccttgctgcaagaactagcagagctctttggacaaaacgtgctcaccaagatggaggaacagagcccatggcccacttactacatggattcccactttacagtggagaaggagcttgcagtaaccacaaaagtttctgtataagcaaatttagggaattgaacttcagacagtgtggttgtctccttacttatgaacttgggaatacttacttaggtaacaactaacatcagaggtttttgatctgtagcctttctttctgtccataattagctaatagcttttgctgtacaaacacaaaccattccctgtccaagaaaattaaactatatcatcagaat

SEQ ID NO: 361963 - DNA, 813 bp, Homo Sapiens
tgaccaagaacaaaatttgaatctggcatcacgccagaagtaggagagtagagaatctcagaaaatatagtatgcaactatatatacctatgagcgtgaaaatagcaccccgaacgattaatcctggatagagaatgtactaacagacgatagtcgcacgactaggagtacagcagagcgcacgttgctacagcgccagattaggtgggtctcacatctgtctatgacggataaccctttcccgacaaggacccgccaaaagaatcgacttgcgataattagctgagtggcttctcttatcgactttggacatctcagtgtagagcaggttcaagcctgcaaccaccaaagtgcagagtgtggagtgattgtgccccctctttcctccaacatccatatcctgccatgtgagctcagggaatgcaaatgcatttaaatatccatctaaagcaaacataattagaaaaatcaatcagctggaggaccccccaaagtttaatacattttcaataccaccaggaatggatttttggtccctttctgcaggtctgggttgccagacgttttatttctggggaggagggctctgggctgaggagctcagtgggtgggaggagggaatgggactgttgctgatcctcaaaggcctctgtaggatggagggaggggaccttactcccttccccaccccagatgcaggagtcacccagcttccttctctgcgctgtttccttcacaaattagacattggtttgggaaacaatgtagcctcgttaaacatttaatgaaataaacaaataatcacactgtgaa

SEQ ID NO: 361964 - DNA, 466 bp, Homo Sapiens
  misc_feature (49)..(62): n is a, c, g, or t
ttcatattagcaaatatgaaattctgtgaaaaaaaaccctttgatcttnnnnnnnnnnnnnnccaccccccccttctgtagcaggaaacaaattgcttgttcttgagaactttcccatcaagaatttagtagaagcaggtatacttctatcattttgatgtttttgttaatgtttccaaacaatgtactttgaaatcagaatcacttcttatcgttttcatatacttctgatgctcttcatcacattagtgatcagaaatgaggtgtaattccccaacccctgcccgcaagagctaagtaggatcttactgtaagttgaagggagttttgccctaactcatggattgtgcaagaatgaactgctgttgggtttgactgactgtcgatggattgtggtgtggtgtatctgaaggctattgaatgcaacttacaatgcttaataaaaatctttattcttttagtataa

SEQ ID NO: 361965 - DNA, 613 bp, Homo Sapiens
gggatagccggacggggatctgagctggcaggatgaatgtgggggtggcacacagcgaagtaaaccccaacacccgagtgatgaatagccgaggcatctggctggcctacatcatcttggtaggattgctgcatatggttctactcagcatccccttcttcagcattcctgttgtctggaccctgaccaacgtcatccataacctggctacgtatgtcttccttcatacggtgaaagggacaccctttgagactcctgaccaaggaaaggctcggctactgacacactgggagcaaatggactatgggctccagtttacctcttcccgcaagttcctcagcatctctcctattgtgctctatctcctggccagcttctataccaagtatgatgctgcgcacttcctcatcaacacagcctcattgctaagtgtactgctgccgaagttgccccagttccatggggttcgtgtctttggcatcaacaaatactgagggatgggttttgggacagctccatgggcatggggaaggcactgaaacagaggactataaaacatccttctcttattctccatactgtcttctacacctttaaagcctgagaactataa

SEQ ID NO: 361966 - DNA, 421 bp, Homo Sapiens
ctggggtgctgcctgccaccaagagctcccccacctgtaccaccatgtgggactccaggcaccatctgttctccccagggacctgctgacttgaatgccagcccttgctcctctgtgttgctttgggccacctggggctgcaccccctgccctttctctgccccatccctaccctagccttgctctcagccaccttgatagtcactgggctccctgtgacttctgaccctgacacccctcccttggactctgcctgggctggagtctagggctggggctacatttggcttctgtactggctgaggacaggggagggagtgaagttggtttggggtggcctgtgttgccactctcagcaccccacatttgcatctgctggtggacctgccaccatcacaataaagtccccatctgattttta

SEQ ID NO: 361967 - DNA, 556 bp, Homo Sapiens
tgaatatcaaagaagtttaatacgctgccataaaataagcgccttgaaaaagctcatggaatagaagtcagtgttagagaaacccctcccacacatcctctggctccacaccgcatccttcaaaaccaaacaagagaatctgaaacaacacaggacatccttccaagcttggatttcagtgagggcccctctaccaataacaagaacacagtttcctacatggcctgataggaaagcaaaacacagaagcacaagaagtctacaagatttcaatatttaagagacttggtacatattcaaagttaaaataactccaacttttatagctatacatattgttttaaagcaacttaatatattttaaaattttatatatacactctcaaaggttcttcaggtgaggtatgtaaacattgtctaatgaaaaatttcaatgtttcaaaccaacaaattcacagcatacattgaattttcatccattaaagacacagtatattcctacactcactaacatagtagaaatccaggcccaagagctacagactgatcttccggg

SEQ ID NO: 361968 - DNA, 549 bp, Homo Sapiens
aatatttcaggggaaaaggcacttccaccctggggatcttctgataagcacccaacagatatcattcgttttaattacctagacaaccgtgaccccatgaagactgtccagcaaggaagaagaaaaagaaaccaaatgacccaagacttcagccgacagtcacatgataagaaaaataaattgcaggacagaactaggctaagaaaagcacaatcaatgatgtccctaagtgccagctctcccctaaaagttccagctcatctagcctggcctccccctgagtcagtgggactcccagacactgccaccacagctgaaattctcatgcagcatcctcacaggcaccctgggccccaagcatgactcatccaggttccagagccaaagtggactgaacatggaaagacttttattatagaaatgacaagatgctttgcacagtggagagctgaatttacttggctcccattagaaactctttcagcttaagtacttattgtggtagtgagtcctacggtatttcagtaaaaaggaattcatggcaaaaaa

SEQ ID NO: 361969 - DNA, 289 bp, Homo Sapiens
cacccatctcatactgcagagaagtgaggtaagaaccttaagacatctctttggaaagtctgctcatctactcaccctatcagtgactcacttccaatctcaaactttcttccagatgggtctgtgtgcaaatcagtatgcccaatggtaacctctggggctttttttctgagaacaaaggctgagggttcccctacctgcagaagctagagtgtgaggggtatgtatgtgtgtatgtgtgtttataggcatttgagtcaatgacccagactaaatgtcaaataaatat

SEQ ID NO: 361970 - DNA, 332 bp, Homo Sapiens
cctgtattttggttctgagggatgagtaatgtgtttttagttcgttgagtttatccattcttcaatcccctaaagccttcagctgttctttcatatgtggccaacattttaagtacagtgtttgcttttataagtcggtgttacttggatgtcctataaaatacccactttttataaagatgatatttataacctaggaactcatgcctgtcttggctgcagtccctgtacatctaatatatactgatttgtttgcccccagagaatttttaaggtatctgcctatatcgtgatcttttgaaatggtaaataaatctggtgcattaaaaatt

SEQ ID NO: 361971 - DNA, 993 bp, Homo Sapiens
agcggccgcagcctctgagagcacgaacagcagcgcccccgcgtcccagccagccagccagccagactggactccggcccaccgacggccgctcgcgctccggccccgctcgcctgctctgccccggacctgcagctccccgctcccccgccgtgtccgccgcctcccggccagagagccaagcccccacgccgcgcccagcgctcgccgcgccagcatgtcctcgaccgagagcgcccggcgggacggcgggacaggtcgccgcgccagcaggtggaccgactactcgaggggctgcgctggcggcggctggaggagccgctgggcttcatcaaagttctccagtggctctttgctattttcgccttcgggtcctgtggcccctacagcggggagacaggagcaatggttcgctgcaacaacgaagccaaggacgtgagctccatcatcgttgcatttggctatcccttcaggttgcaccggatccaatatgagatgcccctctgcgatgaagagtccagctccaagaccatgcacctcatgggggacttctctgcacccgccgagttcttcgtgacccttggcatcttttccttcttctataccatggctgccctagttatctacctgcgcttccacaacctctacacagagaacaaacgcttcccgctggtggacttctgtgtgactgtctccttcaccttcttctggctggtagctgcagctgcctggggcaagggcctgaccgatgtcaagggggccacacgaccatccagcttgacagcagccatgtcagtgtgccatggagaggaagcagtgtgcagtgccggggccacgccctctatgggcctggccaacatctccgtgctctttggctttatcaacttcttcctgtgggccgggaactgttggtttgtgttcaaggagaccccgtggcatggacagggccagggccaggaccaggaccaggaccaggaccagggccagggtccc

SEQ ID NO: 361972 - DNA, 455 bp, Homo Sapiens
  misc_feature (37)..(37): n is a, c, g, or t
cagccctttgtgcaggcacacacatgcagagagaganaactgtcctggtaagatcactgggaaattagagaagagaaaatacaggagaatggggccagatgccaagcccttaggatcccttggcccttaacaatcagcaaagggcttagatacttgtcctcttgattactctgaactacatcttgtaattaccaacttcagtcaagaaacactaaacagtttatccttcagaagctcccttcaaaatcctctttggcctggctcctgccctcatcatgccattaaactgccctctcaaaagccaccagggctctcggtgattgtctcaagtttgcaaaaaaggagaccagcggtagccaaagagaagctatatccttaactaccgctgctcagctggctgggggcaaagctgagggcctcttgtttccttagtctagggattattgctacataga

SEQ ID NO: 361973 - DNA, 511 bp, Homo Sapiens
gctcaactttgctgcccaccctgcagtgacccctgaatgccacaccatgggaggactcattcattggctttgtagtggcaaatattcctctagttctataactcaactagacattttgtagtaaagaattcttgaaattctctaataaaaagcaattcttactgtaatatttttagtttggggacacaatttcctaaggggggattaatgaacatttttatgcattagcccaatttatgaattccatgtttattatatggtagtactgatgaaaagtacctttctatctgtatctttgcagtttcttcgttactcatatgtaagcttcatggtaagcagtgctctagtaactgcttctctgtacaaatctcatcgttctacttacctgtcaaagcacattctacatgtactgtaaacagatacactttagtaagatttagtcttaaggatttttccacttttgtcagtaacagatatttatggattaaaaaataaagccgtttcaacatag

SEQ ID NO: 361974 - DNA, 449 bp, Homo Sapiens
ccccaaaccttttcatggggaatgtgtggcaaccttgccaaacagcaccactcagagtgtgactctgactgtgaccttggccttaatgaggaacttcttaggagagtttgaggacaaggccaacatcgtcatctgggctcgctgcgtcccagcacatcaaactctgtccagagacaaggccaactgcaaatgaaagccagggaacattgctaagggtctgtggctctgtggtggtgttcatcgccttcctgagataggatttcccttgccagtcccaacctgtatatattctgtacagaagacatccctgaatatactgtaggtgagtcgtccagccaaatttatatctccaaaacatttttagctttttctacatgctatgaattgagatgacatgctcaacttgtaaataagtctttttgtacattaaaaaagtaattttttcataa

SEQ ID NO: 361975 - DNA, 497 bp, Homo Sapiens
aaacctgtctccactgtgcctttgcaaatccagtgtttttcttactgggagcttcattttggtaagagacagaatgtatctgtgaagtagttctgtttggtgtgtcccattggtgttgtcattgtaaacaaactcttgaagagtcggattatttccagtgttctatgaacaactccaaaacccatgtgggaaaaaaatgaatgaggagggtagggaataaaatcctaagacacaaatgcatgaacaagttttaatgtatagttttgaatcctttgcctgcctggtgtgcctcagtatatttaaactcaagacaatgcacctagctgtgcaagacctagtgctcttaagcctaaatgccttagaaatgtaaactgccatatataacagatacatttccctctttcttataatactctgttgtactatggaaaatcagctgctcagcaacctttcacctttgtgtatttttcaataataaaaaatattcttgtcaaaaa

SEQ ID NO: 361976 - DNA, 534 bp, Homo Sapiens
gcggccgcggcgggtgcctcgctctacggtgcctctggccccttccagcgcgccgcgctgcctgtggcgcccgtgggactctacacggcccatgtgggctacagcatgtaccacctgacatagagggtcccaggtcgcccacctgtgggccagccgattcctccagccctggtgctgtacccccgacgtgctcccctgctcggcaccgccagccgccttccctttaaccctcacactgctccagtttcacctctttgctccctgagttcactctccgaagtctgatccctgccaaaaagtggctggaagagtcccttagtactcttctagcatttagatctacactctcgagttaaagatggggaaactgagggcagagaggttaacagatttatctaaggtccccagcagaattgacagttgaacagagctagaggccatgtctcctgcatagcttttccctgtcctgacaccaggcaagaaaagcgcagagaaatcggtgtctgacgattttggaaatgagaacaatctcat

SEQ ID NO: 361977 - DNA, 796 bp, Homo Sapiens
tgaccgtgttgtttctatctatcacagatagatctcgtagtttgactctggcccatagcaaaatctggctgagtgagaaggaaatactcccaagcccatatgcctcagaagcacatatcatttacttaggcatggcagtgtggcctccaaggagacattagtgtgtccccaacctatgttactgagcaagctctcaataactgaggccaggagtctatgctgtaaccagctccttcagtgagtctgaagcccggccaggcttgggaacacctggggaaaaccctccctttatgttcctaggttgcatctagattcttagcgaagaccttctgacatagtgtcacccaggcattgtcaactgccctgcacacagggagtgactctaatagtgaggagtctggcgtcaccatagaggatggggtaaagatttgaatggatcctgccagcagcctataagcataacatgaagatacttgtggcaaagattcttccttgaccgaactatacttgggttcctctggactgtcttctcaactaggccctgacttctgggcttccgtgtttgcctctgcattgtccaattttagcaagaatcctgctaaaccagtttaatcagaatccaccaccctcaatatttgattgatatctgatcagcttcctcaccctctaccatccccagatgatgtttggtaactttggcctgccttcagtaagaatcctgttaggttggtttagccagagtctacccttagccctgatgtttcctcttaataaattttcattcactgaccccgcc

SEQ ID NO: 361978 - DNA, 536 bp, Homo Sapiens
agtcgcttcccccaatcccgcgcagccccttcttctcccgccttagccatgcaaaatacctagaaagaaaacactaaaactgaacttttttccaaatacagcagtagctttgaaagcattctttgctcctctgttaacagcagaatgtaattctgaccactgcactgatggtttcttaatcatgcagtatgaagatcagcttcaaaataagtcttatgaatgaatgaatgaaagccagtgcagttagttcatcatgactgcagacattagaggactttgaaacaacctttggtgtacattgtactgtttttgttactgatattgtatgtattcatatgcattgtggatcatgcaccatgaaacttgaaaattgttccaacatctcaatggccacaacagtttggtagcttttgcctgtaaacgttgtatgtaaacatttgaacgtgttatactaaattactaaactcattttttactaaaatcatctggttcgacatagtaagtaacgtgcagtaagccaccacgtcgaaatgaag

SEQ ID NO: 361979 - DNA, 1292 bp, Homo Sapiens
aggtagcgaggcctgggtggcgaattcggcacgaggccgcgaagcgctgagtcacggtgaggcgactggacccacactctcttaacctgccctccctgcactcgctcccggcggctcttcgcgtcacccccgccgctaaggctccaggtgccgctaccgcagcccctccatcctctacagctcagcatcagaacactctctttttagactccgatatggggtcctccaagaaagttactctctcagtgctcagccgggagcagtcggaaggggttggagcgagggtccggagaagcattggcagacccgagttaaaaaatctggatccgtttttactgtttgatgaatttaaaggaggtagaccaggaggatttcctgatcatccacatcgaggttttgaaacagtatcctacctcctggaagggggcagcatggcccatgaagacttctgtggacacactggtaaaatgaacccaggagatttgcagtggatgactgcgggccggggcattctgcacgctgagatgccttgctcagaggagccagcccatggcctacaactgtgggttaatttgaggagctcagagaagatggtggagcctcagtaccaggaactgaaaagtgaagaaatccctaaacccagtaaggatggtgtgacagttgctgtcatttctggagaagccctgggaataaagtccaaggtttacactcgcacaccaaccttatatttggacttcaaattggacccaggagccaaacattcccaacctatccctaaagggtgggacaagcttcatttacacgatatctggagatgtgtatattgggcccgatgatgcacaacaaaaaatagaacctcatcacacagcagtgcttggagaaggtgacagtgtccaagtggagaacaaggatcccaagagaagccactttgtcttaattgctggggagccattaagagaaccagttatccaacatggtccatttgtgatgaacaccaatgaagagatttctcaagctattcttgatttcagaaacgcaaaaaatgggtttgaaagggccaaaacctggaaatcaaagattgggaactagtggaaagcggaagagcaggtcttgatgtgtcctagaattttgccatttctgagattgagccattgaaggcattccatttctaaagcttatttagccggtgcttctaaagaattccacactaacgtgataacatggtttttgtaacaataaatgtaggatatttcctggcacatgcaaataaacctaatcattgtttctacaaa

SEQ ID NO: 361980 - DNA, 1473 bp, Homo Sapiens
  misc_feature (1109)..(1109): n is a, c, g, or t
  misc_feature (1268)..(1268): n is a, c, g, or t
  misc_feature (1403)..(1403): n is a, c, g, or t
tacttttccacagtgaagctatttgaattcaaggactttaacctgggccggatctggtttggagacaaaggggacagctctgggtcagcatgaccttctttagagccactaaggcgaaaaataccgtgtgggaccaggctggcctagacccagggatgagaatgcaccctaaaataaatatacgggaagcagcagagggcttccctgtctagtgtgtgatcctaactaaaggcagctctcttggacagccttcccctggattaggtcacatacacctggtggccaagcctctgctgggtcccaaatacacacccgagtcctgccaaagaaaggagatttttaaaaagcacagacaaattgtatgcaagtggaaaatacccataggcctagacagctgtggagggaagacctcgtgggtacctggaggctgccagagctgggagctctgcaggtatgagtcagggaaggctcagagacaagcagaatctctctatggagacaacttgcagtgccttttaggttttccaaataacctcggagttcagagcattgggtttttttctcccctccccacccccagaaaaataattagaaaaatgtttaggagaaaggaaaagaattagatgcatcagaataccagctataagccaacactgtttccagaaactcaagaaaaagctcaaacagaagacagttcccctgagaggctggaggcgttggtgctgaaggaattttcctagctaaggggcactgggccttgctgcaccttggggctgaccttttttgcaaaacacccacccctgccctcctggcatactcaacagcaacgccagctttctggacccttggaaagatgttagctcaaacacccactttttccagatcttcctcttgctcttcactgaggaatttgtaattctgaggctagcgatgcccactcggatattccgcaggcccaggtgtttagattagaatttgtccagcggtaatcctgatgctggaaaccaacaaacatttgggcctcatattcacccatttaaaaactagagcccctggcaggtccccttagggccatgtgttcatggaatataagccaagtttgccctagngctggttcatggaatataagccaagtttacctctccccattttctgccctggcccacttcccactcacctccacctcattgccaggaagggatcaaaatgcctccatgccagttgttaaatggctacatatttgcccttcccaagggtatttgcatttntatttaggaacatggccttatattcaaggaaaatctagcatcaggattacgaggcatcacctctcaatcaggtctgggaggtatcttggggcattgctcttctgaacacctgcagaggcttcctcaggtgagtgngggagcccggaagggtggcctccctaaccactctgcctgcacatgaattctccaaagcagcggggccccc

SEQ ID NO: 361981 - DNA, 513 bp, Homo Sapiens
gcaggcgttgttatgtgctatgagggtagcaagtacgtctttgtcttaatgatctaaggctggtgtagaaacaaagggcctaatgagaaccaatcatcatggaagtcagttgcgggggcagcccataaggaaagggaaagtgagtggggttgggcataggctgagtgaggtggcctgaatgacacctcttagaggactgtgaagtacaggcacagcccgactgcagggagggatgcacccatcatttacccatgggagcatctgtaggaccatctctctcccacttcttctcccctcccccaccgcatctggccagatggactgtcctacagcaatcgtttccatctgtcaccctcttccctctcctttcataccagtcactatcttgggtaacaaatttatacaggacagtggtacagaaatacatctttgctctgagaatacagcaaatattaacttaaattattataactgaacaaataataaaacctgaattttaatatcttccaaaaa

SEQ ID NO: 361982 - DNA, 463 bp, Homo Sapiens
ttccttagcactccttcctttgccccctataataatcccgtcccctcacatagtattcccttaagaatggtgaaattaaatctaaatatagctctccccttttactcctattccagcatagatcattgcaagtaattaacctttgttattccatcaaatctagaatgcaaacctacatgctaatttacttaagtcagactcaataataaatctgcgtctatagcagctaaactcaatgaagatcctggatgttgttcagttatttggattactaacatcttctttttgaataatggcacttgactttttcaggcacaaaccatgttttgtattggtcttgacagccactataaagtactcccccaagtgtcagtaacaaagatgatttgtatgtggcttgcagtcttccagtgttctaatagctttctcattccaacccagaaacatggaacacagggcagct

SEQ ID NO: 361983 - DNA, 813 bp, Homo Sapiens
  misc_feature (55)..(68): n is a, c, g, or t
  misc_feature (642)..(642): n is a, c, g, or t
  misc_feature (653)..(653): n is a, c, g, or t
tttttttttaatgctccattggaaagctgtggaaattctgatgtctgaatagaannnnnnnnnnnnnnctaattcctaatttaaaagctaggcaggagacagcggtgagaaagaaagcatccaaaaagttcctttgttgtctaatttctaactcactatcatatataagtagcagaatgttaaatataaaaataatcatagtattaggtggtatgtactattttaaaaaatatatgcaatatggtttacaattaaattcctactctgaataatgttaataatgaacaaagaaaacaatacaactttaaaattgtattaccgaagaatcccatcttcatgagttgaattaggtaggacaccatcagatggactgacaggtaaatccacatctggttgcccaacttgggcatacacaggctttggttctggaagagaaggtgtttgtttctcatttctttcaactgtaacttcttccactgttttaggtgtgtgatcatcagcatgctttacaggagttgagacagccccaggtttagaaattctctcttcatctctactccggagactgtgtgtcattaaaataaaaaatcaagagcataagaatgattctggaaagcatctgtaagagaacagtataagaanaggcaatgcancttcaaaaacaatgacaacctgctctaacagataccaaaatattgtaaaaacctagtaattaaaaatagagcattaccacagaaaaaccaaatagattcatgtaataaaatcgaaaatgaagaaatatatctataatagcaaaatttatcatgaaagtag

SEQ ID NO: 361984 - DNA, 680 bp, Homo Sapiens
  misc_feature (459)..(460): n is a, c, g, or t
  misc_feature (462)..(463): n is a, c, g, or t
  misc_feature (466)..(467): n is a, c, g, or t
  misc_feature (470)..(479): n is a, c, g, or t
  misc_feature (575)..(638): n is a, c, g, or t
ggtgccaatcacctttttggagttggaagtgctattttcctatggacttttgcattatttcattgtgcatgcatccagtgattatacataagcaacatatgtaatctgcttatatatttttaaaaatccatccacacacatggtaaattaagtataaattcttttgcaaaattatagttcatgtcattgaaagtttaaattggtttcatttaaagatcaatatactaggtctgccttcactttatagaaaactagcttctataaagattttttcactgtttactagtgaaatgagaaaagcaaagctatttataaaaggccttatgtcgtgtacatacattgtctttgaaatatttgtgatctagtttattgcttgtaaaagagaaattatataatttatttagtaaatactactgtaaactatagttttgtgagagaaataaaatattttgttctccnncnncannatnnnnnnnnnnaaaccccaccgcctttcccccctacccacttccctcctcaatcccacacattactcaccccagaacccgccccataaataaaaactctttgtttgnnnnnnnnnnnnnnnnnnnnnnnnnnnnnnnnnnnnnnnnnnnnnnnnnnnnnnnnnnnnnnnnttcgtggtgggccccaaaagggggtaaataacatttttccac

SEQ ID NO: 361985 - DNA, 312 bp, Homo Sapiens
ttaaacagtaaaccttaacagatgcgttcagcagactggtttgcagtgaattttcatttctttccttatcacccccttgttgtaaaaagcccagcacttgaattgttattactttaaatgttctgtatttgtatctgtttttattagccaattagtgggattttatgccagttgttaaaatgagcattgatgtacccattttttaaaaaagcaaggcacagcctttgcccaaaactgtcatcctaacgtttgtcattccagtttgagttaatgtgctgagcatttttttaaaagaagctttgtaataaaaca

SEQ ID NO: 361986 - DNA, 674 bp, Homo Sapiens
atttttatccacagtaaatcttcagcaactcatgtctccaccagatagtatttttctgtaaatgaaatgctgacttcgcctcttcctgctgtatgctcatccctgcactgagcacagatatgacaagcagtagccatgggggaggtgggtgacaaagataggaccccgggaggcggcacaggtacatgctagtttcaattaccacagtattctagagacgggttgcaatgacaaggggggcaaatgaaatcaatgcaagatttcttaataatgggcagacagaaaaatgtaaaaccacacaaaacggactgctgataatattttaaaatatacttatttgtcttctttttgcattgtgaaaaaaacaaaataaattttgtgtgataattttgatgatgaaaggtggaagttctacctagatttgaatgagtgtttttttaagggaatgagaatgtcatggtgctaaacctgacaaataagagatcattgaaatgctgaaaattttaacagtcttcttaaaagtattgagggggcaaaaattaccaattatggtatacaaaaataagcctataaatgtgtttcacattgctaacttgagtttcagttgattcagtttgtaataactagtaatgagcttctgtttacaataaaaattctgtaaattgtttgctgtt

SEQ ID NO: 361987 - DNA, 893 bp, Homo Sapiens
ggcacgagggctgcctaggctggggtcccaggtggggcccagccaggaggtggggtgtggacccggccctggcggcggagtcagggtcccaagatcccacctgtatggtcgctggccagtgattctccttctgaagccgtgtttcccctctccctccctctccacgtgggcagggcaggccccatcgctttcctctgataaccacatggacacatcctgaagtcagcccaggcgccctgagcatcttggggcacctggaccccatcacaatactccttcttccttcaggtccctgggtgaaggctttgctgaaaccgaccccccttttcacgtcccttctgcctctgccccgttggatgccctgactgggggcaggggaagagacagggcacagctggccacagggctcagccactgagcaggctgttccgggcctttggctttgcatcctggacggggagtgtcctgtcagggaccagatgtgtcctgcctcatccctagctccaatcccttccccacgtgaccggggattctggttgcaataaaacatgctgctgctggtggcggagctccctgtccctttgccccaggtttcctcccggaggcagacagtctcccagagctgagggcttgcctctggagaccccagccccagagggctttgtggaggacaggccttgccctcaagaacgtcgtacctgacgctgagcctgtcatgagaatgcaacaggagcaaaccaagtgttgctgtgacattgattcagatgtttggcaagaggtggctgagcactcgggtgggcttggcactgtgccaagcctggggccaatcccttcccagtcagctggggtctggtgggggacacccaagaataaaagaataaccacaaagtgtg

SEQ ID NO: 361988 - DNA, 389 bp, Homo Sapiens
gtctccaatagttgcctggatgacttcatgggtcagtccacatgattgcaggatttcccattgctcatctgtgaatgttgattggccaacctgtctgagctttcagcagatgcatccttgagcttactttcaggaattcctcctgaaattggttttccttggtggtaatttctcatggtggagcttgtttctgaggcatggtacagtgctgcggaggcaaggcaaggctgtcatggtgattttcacagcatctggatggcaaattgccttcacgtagggaaaccacatgggactgatagctttctcaagggatctccaagcatctctgaatttggggatttcatcagttactccaacctgggctgacagagcaagactccatttcgaaa

SEQ ID NO: 361989 - DNA, 535 bp, Homo Sapiens
actgccaaagaacttggaaatagtgatttccacagtgactccactctgagtcccagagccaatcagtagccagcatctgcctccccttcactcccaccgcaggatttgggctcttggaatcctggggaacatagaactcatgacggaagagttgagacctaacgagaaatagaaatggggaactactgctggcagtggaactaagaaagcccttaggaagaatttttatatccactaaaatcaaacaattcagggagtgggctaagcacgggccatatgaataacatggtgtgcttcttaaaatagccataaaggggagggactcatcatttccatttacccttcttttctgactatttttcagaatctctcttcttttcaagttgggtgatatgttggtagattctaatggctttattgcagcgattaataacaggcaaaaggaagcagggttggtttcccttctttttgttcttcatctaagccttctggttttatgggtcagagttccgactgccatcttggacttgtcagc

SEQ ID NO: 361990 - DNA, 689 bp, Homo Sapiens
ctcttttctttcaagtgggggaaaggttggtaatttcaagggcttaatccacgattaatacaaggccaaaggaccaggggtggtttcccttcttttggtcttcatctaagccttctgggtttatgggtcaaagtccggctgccattcttgaacttgtcagcaaaaaaaaaaataataataataataaggcctgctgtgtaagctgacagtatttgtagctgatagggggttgggaggaaagtgtctactaggagggtggggtgagattctgtgttgatgtaggaggccgagaaggcccttaactcaaagtagcttatttatccaaaatgttctggatgcatcatctccaaccaaggaccccttatttatcatgcctttgttctcttttccctcagatgtatatttctttaaaaataattttcctaataacaaaacttatttctaaaacagcttaaaaattcaaagaaaaaccccaaacactgacattacctacacttccactacccaaagacaaaatgtgcccactgtgtgcttttgagtgtattttcttttagtttgttttttgttgggtgcatatttatgataataacaatgatggacttcaattgtactcactgttctattgttggttttaattagcagcaagttgtgatcactttcccaggtgaataaatcatttcaaagcatta

SEQ ID NO: 361991 - DNA, 547 bp, Homo Sapiens
aattaatatttctataatctattaaaaaaaatggagaatgttttctctcaaatttcctctgacccatgggaatgaaaatacttaaatactgtaaagcatatctattaataattcccccaattttttaaactaacaaaaatggaatgttaactgaatggaattaaacatagcaattgtcaagccatcaaaattatatatcgaaccacttaggcatgttacggggtaaagtcctcacccctgcatttgagaaatattttattatttttattttaaggcaaaacagtgtttactgtgatgggcagaacagccttttgtatctaggagtccatttgagttctttccaatatttccatatcgttcataaatgtgtctgggggcttccttgtttggaaaatatggatatcgctttgttttcctttgaaagtaattatatcttaagaacatagtatcatgaatggagtagacagggaggctgcagaagccatttctctttgtagataaaaagcattatctatgattgttgtataataaattgatttttacatta

SEQ ID NO: 361992 - DNA, 565 bp, Homo Sapiens
agttatttcacttataatcaaaaggtttaaataagtttagtgtatattttatgattagtattatttggtatcgattcagagagaggaaaactgcattcccatagacagggagacttggtgcattaatatccaaagcttagtttaagctggtgatgattagaaaagtggctttcatttgtgttctctggaagattctcagtagtcctgtgggcatgtgaacaagagcatgtgtaatcttcataatgtatgtcttgttagcagaaatgtctgaggcattgctgagatgtaggatgagctgaggtactggttttgtctttcatggttccctattatgttttttgagaaactgagcttttcctgacagtgtttagtttttcttggctatttactatgctattaatagtaacagtttccattatggagcctcagtaggttcttgacatacattaacccattgctattatgtaattttctaataaaatgatgtgataaaacatattttctgtaatatactcatagaatatgtgattataagtaaataaatagatgttggggtagtcctcca

SEQ ID NO: 361993 - DNA, 371 bp, Homo Sapiens
  misc_feature (43)..(43): n is a, c, g, or t
  misc_feature (59)..(59): n is a, c, g, or t
ctttgcccccaaatgtcctccccaatttccacaagaatgaggnaaactgaaggtttttnaaaccttccccctgaggactctgcaaaacgaggtggtgtctggtttggatgaaaagtggtcggtgattcctcaactccctgccctgccctccctctctcgttccctccctaacatgttatgctcttgttggggctgggatgccctaggcccaaggttaccaaatccctgggtttggaaaattgctgctgggggtggtatctaggaccagagaggaatctactatttctactgtgaaataattcagcagggggtcttcttacttcttccctttgaggacaaagtttctctcgaataaagagactgaagtcaag

SEQ ID NO: 361994 - DNA, 1499 bp, Homo Sapiens
  misc_feature (970)..(978): n is a, c, g, or t
gtacccgggagtatgtcgacccgcgacgtcggttgggtccgggatgcggggtctttgactgaaggggtaggccaagtggaggtatcatggacgtcgcgcggcacagacagaggaccagcctggacgccggggacgctgtcatgtacggcgcgagcgggggccgcgccaaacccgagaggcaaaagcggcgcgaaggaggaggccgggccaggcggtgcctggcggtgggggcagccgagtggtagctcttggttttcggctatgcctgcaagctgttccgggacgacgagcgggccctggctcaggaacagggacagcacctcatcccctggatgggggaccacaagatcctcatcgacagatatgatggacgtggtcacctgcatgacctttctgagtacgatgctgagtattccacgtggaacagagattatcagctgtctgaagaggaggcgcgaatagaggccctgtgtgatgaagagaggtatttagccttgcatacggacttgcttgaggaggaggcaaggcaagaggaagaatacaagcgattgagtgaagcactagcagaggatgggagctacaatgccgtggggttcacttacggtagcgactattacgacccgtcagagccgacggaggaggaggagccttccaaacagagagaaaaaaaatgaggccgaaaatttagaggaaaatgaagagcccttcgttgcccccttaggattgagcgtcccgtctgacgtggagttgccaccaaccgctaaaatgcacgccatcatcgagcgcacggccagcttcgtgtgcaggcagggagcacagtttgagatcatgctgaaggccaagcaggcccggaactcccagtttgactttctgcgcttcgaccactacctcaacccctactataagttcatccagaaagccatgaaagagggacgctacactgtcctggcagaaaacaaaagtgacgagnnnnnnnnntcaggagtcagctctgacaatgaagatgatgatgatgaagaagatgggaattaccttcatccctctctctttgcctccaagaaagtgtaaccgccttgaagagctgatgaagcccttgaaggtagtggacccagatcatcccctcgcagcacttgttcgtaaggcacaggctgacagttccactcccagcccacacaacgcagacggtgcgcctgtgcagccctcccaggtggagtacacggcagactcgaccgtggcagccatgtattacagctactacatgctaccggacggcacttactgcctggcgccgcccctcccggaatcgacgtgactacttactacagcaaccttcctgctggcgtgaccgtgtctaaactcccctggagttgacgagcaagcggccctagcagcctcctggggaaccaagaacaaccaacgggccccgcaagcgacgagcagagactaagcagcgggggacaggcttcagaaatcaggcacagcgacaacgtgccacattg

SEQ ID NO: 361995 - DNA, 408 bp, Homo Sapiens
caccactgcactccagcctggctacagagtgagaccctgactccaaaaacaaacaacaatgtgtacttgaaaattgcgaagagagattttaagtgttttcacaagtatgtgaggtcatgcatatgttaatcaacttgatttagccatttcactatacatattttgaacagtatgttgtacgccataaatatatacaatttttgtcaattttaaaaatagatttttaaaaactactggagcatgcatttcccttgccctgcctctccttctgttgaggtaggagtgagaattctgcagccatttcagacactgagagacaagttgtctgtcaagtttgacaaagcagctgtatcggctgtggaccactcacctctgtaatttgagaaataaacttttattgtgtttaaa

SEQ ID NO: 361996 - DNA, 994 bp, Homo Sapiens
  misc_feature (133)..(258): n is a, c, g, or t
aataatctatcctgagaatattaattgtggtattctggtgatggggtttagcaactttgatggaagaaaatattaggctataaatgtcctaaggactcagattgtatctttgtacagaagaggattcaaaacnnnnnnnnnnnnnnnnnnnnnnnnnnnnnnnnnnnnnnnnnnnnnnnnnnnnnnnnnnnnnnnnnnnnnnnnnnnnnnnnnnnnnnnnnnnnnnnnnnnnnnnnnnnnnnnnnnnnnnnnnnnnnntgagccactgagcccagcctacttttcagtttttaacataatttttgttttatccacaacttttcaagtattgaaagtagaataaaaacatgggttcttagtctttagctatctgttaaagcctatgaatgccttcttaaaatcatgtttttaaatgcataaaatatataggattacaaaggaatctaattatatcgaaatacagttattaaaatgttaaaagataagtttgttatatattaatatgcatgcttctttataaatgcattaaataagagttaatagctatcctaaatttgaaatagtgataagcataatgaaaatagatgcaaaaaactaatgtgatatgaaaatatctgggtttttcttttgatgatgaagtattgctaatattaccgtggtttatgaactatgttcagaattgaagaaaatcctaactttcagttagaggttagtgacggggttcaggacaccctacacaaaatacagcactttgacatattgaatattttaagctgaaggcatttgaggaaattgcagaagcaggaaggtgactctgaccttctgcctgctgttctccccagaagcagccataaaacctgggaaggattttctgaccttcccctgaagtagatcataagactgtcatgtaagaggtgctctcctggcacccagagaaaaggagcatccttacctccaaaagcacagggacacaaagaggaatctaaacaaacag

SEQ ID NO: 361997 - DNA, 564 bp, Homo Sapiens
gaggggtgggcacaggccccatgtgagcccagggtaggacgggctggagagggccccacgcagcacctgccctgccagcctgtctgcggcccacccaccctcccattaaagtcacgttgtctcgaagcatgggtttccaggtccttgagcatagcagtggccgcaggccacctgggagcagcaggcggggcccctggtgaggatgccttgtaaccttgcggcttggcttcaccgcagatccactctggaatgacacggttcccaccccgccaccttccccctcaaaacactgatcgggcgacgatccgctgggccggcagctggagcccagccgtggccctgcctgagccagtccagtttgtaaaataaatagcaagcgttgccggcttctgtacctcctccctgtgcctgccggccccgcccagccactcagacacttgtttccggggtgtgaaccacctccccgtttttctcaggctcagccttcaggaaatgctccacctcccgcaagtccacccccgagtctgcaggaggcttgtggagcttctcctcctccgcggccgc

SEQ ID NO: 361998 - DNA, 1375 bp, Homo Sapiens
  misc_feature (469)..(522): n is a, c, g, or t
gcggccgccagcgccaacggcgcggcgatcaagaagctgtccgggcctctgatctccgatttcttcgccaagcgcaagagatcagcgcctgagaagtcgtcgggcgatgtccccgcgccgtgtccctctccaagcgccgcccctggcgtgggctcggtggagcagaccccgcgcaagaggctgcggtgagccaatttagagcccaaagagccccgagggaacctgccggggcagcggacgttggaagggcgctgggcctcggctgggaccgttcatgtagcagcaaccggcggcggctgccgcagagcagcgttcggttttgtttttaaattttgaaaactgtgcaatgtattaataacgtctttttatatctaaatgtattctgcacgagaaggtacactggtcccaaggtgtaaagctttaagagtcatttatataaaatgtttaatctctgctgaaactcagtgcnnnnnnnnnnnnnnnnnnnnnnnnnnnnnnnnnnnnnnnnnnnnnnnnnnnnnnggggggggggccgatcaaaaagtattctccccgggagaggggcgcccacacattataatcgtatctacccaggatttcatgtcagaaaaagggtggtgccccaaatattataggtcgcgctcattttataacacctctatagacacgtggcagcattagttaaacacaactgtcaagactgtggagaaacacctcggttcacacctggggcggactctcctgtgtagcgaacagaacaccctataaatctggggcggggcgagccccacattctaggtgggcccacaacacccacaccacacacgatagtatctactacgaccccccctgagcggcggtacatcattagtaccacgtttgccaacgtgctgctctcacagtgttgacaagcacacaaacactcggtgtagaaatatattagcaggaacgtcgatcgtactagaaagaaaagtacttgcgctgtcctacacagtgtaagtgaattactctactaccttctaaacgaaacatctcattttaacaaccccgcgagggtcactcactttctttcaaatcaagccacgcacgccaaaataccagtaccgatatcgaacgctatacacagcggcgtgtaacgcagggaagaatataaagcaaacgactacactatttggcatcgtagatcatgcgtcacgagggacacttgaaagccacgtaatcttagcagctgtagctgagtcaagacaggacagcgcgtagtggtaggcgagtcagataggacatagagagagacacgtaacagcgagaaaactccaaacgacaaaatcacgcacgaccccaatgaacctgacatatgaatacgagagcgataccg

SEQ ID NO: 361999 - DNA, 360 bp, Homo Sapiens
ttgttttgcactggtggtctgtgttctgtgaataaagcaaagtaagaatttactaagagtatgttaagttttggattattgaaataagaggcatttcttagttttccagtaggatctaaaatgtgtcagctatgagtaagactggcatccaagaagtttatattatagatttaggtcctaatttttataaatcacaaggtaaaaaaatcacagaacagatggatctctaatgaaaaagggatgtctttttgtttatagtcatgtggcaagatgagagtaaaaccagagagcaaacctctataagtgttgagtatatgtatacatttgaaataaaccagaaatttgttaccttaaaaaaaa

SEQ ID NO: 362000 - DNA, 543 bp, Homo Sapiens
cgaaaacatggccaaaagaaatgccgagaaggaactgacagataggaattgggatcaagaagatgaagctgaagaggtgggaacattctccatggccagtgaggaagtcttgaagaatagagccataaagaaagcaaagcgcagaaatgttggatttgaatctgacactggaggagcctttaaaggttttaaaggtttggtggtaccttctggaggaggacgcttttctggatttggtagtggcgctggagggaagcctttggaaggactgtcgaatggaaacaacataaccagtgcccctcccttcgccagtgcaaaggcagcggcagatcccaaggtagcctttggtggagatgaagaagagaatgatgagccacccaaagtagtagttaccgaagtaaaagaagaagatgctttttactccaaaaagtgtaaactgttttacaagaaagacaatgagtttaaagagaaaggcataggtactctgcatttaaaacctacagcaaatcagaagacacagcttttggtgcgggcagacaccaa

SEQ ID NO: 362001 - DNA, 943 bp, Homo Sapiens
  misc_feature (867)..(899): n is a, c, g, or t
tccatgtcccggcacggaccagttgcagcggcccaacgtgcgtgtgaaaggcatttccgacacagctgtactggaagcaagtccagaggagtgaggcctgctgactgtcccgcagtaggttcttggatttgaaactttatcaaccagttggtagggccatttgcagcaagagaaccaaaggctacgttgggatctgccgctgcctttgcactggcgaagggaggggcactggttatgttgtttccattcgacagtccttccaaaggcttccctcccagcgccactaccaaatccagaaaagcgtcctcctccagaaggtaccaccaaacctttaaaacctttaaaggctcctccagtgtcagattcaaatccaacatttctgcgctttgctttctttatggctctattcttcaagacttcctcactggccatggagaatgttcccacctcttcagcttcatcttcttgatcccaattcctatctgtcagttccttctcggcatttcttttggccatgttttcgaacctcctcggcggccgccgctgcactcgctgggtcttggttgcggcgaaacccggggcgcagcggcgcaggggtctggagcccgcaggggtcgccgggctgagcgcgctcggccgcttccggtgctgcgctgcggaactcagaggacttagtgctcggcaagcccagagactcaaacaccatatccctgggggggctcctcacgctgtgttcggcagggaggcgagagcgccggttcagccagagacagctgggggaaccgcgccgaacacactccgggcggccattttgtaactcgaatctccgctctcgacgaattcgagctcggccgatttggcctgatnnnnnnnnnnnnnnnnnnnnnnnnnnnnnnnnnatgcgccgccacccgtaacccagtcccctatagtagtcgaacat

SEQ ID NO: 362002 - DNA, 1140 bp, Homo Sapiens
  misc_feature (435)..(519): n is a, c, g, or t
tgtatttttgtgaatattttaatacatctttttcaatttctgaattgtgttgtgtgctcattttgaccagaatagaaaaagagatatgcctttcactcatatcattccagctacacctgccttcttttcttcaaaaatgccgtccgtgggcctgcttctgggcctttgcacatgctgttccctgggcctgaagcatgccttctgccaatattcctgtggtttgctctctgacttcctttaagcctctgctcaaatgttacctcctcagggagaccttctgtgatatataaaagagcaagccccccaccccaccgcctcagccttcctggccccctcagttctgctctagttactctatttctctccctctttcccagtacacacttgtctgttctcccgcattagaacatagttaacaagagaccagaaccttgnnnnnnnnnnnnnnnnnnnnnnnnnnnnnnnnnnnnnnnnnnnnnnnnnnnnnnnnnnnnnnnnnnnnnnnnnnnnnnnnnnnnnaggtggaagcattcatccattcagcaacctacactgagaacaatcctgtgccaagcactgtgctaagcataaggaaacaaaacaagacaaagctcctcaaggagcttgccacagggtggaggtgacaggtgacatgaatggaagtaactagtagttaccaaatacttggtgtgagccaggcactttgcatttcttcctctattatttctgtgagttaacagtaattgtactaatcttaatcccattgtttgaaagattatatggcttacccggggccacttagctaataaaggaacagagaagaggggctgggcctggggccgctgtttgatccacagccttgttcctaaccactatgccctgtggcctctcacaccaaaaggaagtaccaaactgcttccttactcaaataaatgtgctgaaatgcagttgcagttttctcccagtcccttaggagctggttagagagtcccttaggaacttgagagggtagtgtagtctaggtggtaggcacagatgtctgagagctttaacctcagtctggaagacaatgtggtgacttaatttgttgagaactatgttacaaataatgtgttactaataaaacattgaggcttcgca

SEQ ID NO: 362003 - DNA, 552 bp, Homo Sapiens
  misc_feature (43)..(43): n is a, c, g, or t
  misc_feature (52)..(52): n is a, c, g, or t
  misc_feature (59)..(59): n is a, c, g, or t
tttcctgcttaccttatcatcccaggctctgattagccaggcntggtcaggntcctggnacggcacccagatatgcagagtcaccctgacactggtgccaggctgaccttcagctcccgaaggctcgcacagcctccccatccttccttcccagcccttgtggctctgtccacctgatcccaataccagcttcccccagcccctgccaccccagagggcggccacgacagggagaggtgtagatgccaccatctgagggagaggaacgtggaacaggagcaggctctgatgctgagaggcttgcctccgggggctggaagcctgggtggccggggcccctgaagaaggctcccctctgtatcccccaggtctcctcaacactgggctgatcctgaatggcacaggccaaggggaggccagcctcgcctttctacccaggccccctgccctgcccacctcaggcccccaccctccactcctccccacggtactgtgaacgtcgtgtgactcagtgcagagacagataatatatttaattcatgtacagaaagg

SEQ ID NO: 362004 - DNA, 660 bp, Homo Sapiens
tactgaggttgctcgttctcctcctcatctgtctgatcgggtgatgcctgtgggactctcattgctactgcctatcgggagtatgcctgagatcttgtggacttcttctctcaagataatttcaaaggagcatgtgtgaatgcagtgttctctctcaggatgagaagtcagttcaaagtacttgccattaagcaggaactgtcagagatcatggttcatgttactgaaaagactttaaggatttgtaaggttaatccatagattgctgagaacaatggaaatatttttatttttacagattttgcacttctgaattcaggttaaaaactaacttgtatttagtctgcttagaggactgtgacttgaaaatttttatataccaatgagctttttggtagcgtccacaatgtttaaaatatttcataggcgagatccgtgttctccatttattaatgcattgcagaccaatttaactgctgtgtttcaggaaaattcttcctagtttaataagcaagctaaaagttttattttttatatttagtgcttaatctttgcctcatgttatgtaaaattagcctgcagatattttctctcaattctgtagactctcgcaagataaacattcaaacagtgaaacaaacaataaaataaataaaccta

SEQ ID NO: 362005 - DNA, 1180 bp, Homo Sapiens
aatcatagaaataagtaaaatgatttgttttataatttatccaccatgtccagtttggttagcttgttatgcaatataagtgaaatatcaggtttttacccgtgtcccttttatcatgaaaattaacacaaaatgtgcattctcttttgtttcatacttagcgggatattgattgttttgaaattatgatcaatacttaatttatttttttctgtccttgaagtcactacaccttgatacagtctttctagtagtcaccatgattcaacagtctcaaaaatcttacaaataaaattctgagaagctttattattctataaattcttcagggtacaaagggtgacatattgaggtgaaattgtcagatttacttagcctggtgacatgaattagctgattgtggaactctcagcagcatttcacgtattgttaacatgtatggcatttattagcatattgtatattatataagattgagggatgtcatattttcagctttcttttaaataaaaattgagtatattttcctattttatatcaggtaactaaattatgctagttatgtggaaaaaattgcaaagatgctttgacagatataatccctttggtgctccatctgatcaaagttgaaaagttgatgttttttaagagacaagctttatcattgtctctgatttcagtagaataatggtttattgttagacaatgatgtttctgcttggataaatcaaagataaattaccgttacatggttagatgcctcttttgtcatctatattggagtttctacctaactgtaaacctgaaagataagaatacgcttcggcctggatttttggttaaaaccgatgaggactttcctaatggtctaaaacaaggactaaaaagcatttccggggaaaaaatactggggccaaagaacctatgaattgaaacaatattcttaaacccgaaaacgctccttcggggaatccgcaaagttataacgcccaaagattttctctttcttcccatttaatccccctcccctttcaaaccaacccaaatttaccaactgggtaaaacccggccccccctctcccacagtctttgttttccagccaaccacaaaacttctcatctttcaccaaatccacaccccagagatctcgttctgaattaaaaccctccacggtcagcg

SEQ ID NO: 362006 - DNA, 853 bp, Homo Sapiens
ttttttcccatcaaattattttattaggttaattaaacagcttaaagatgattccttttgtgtggtacccttctagaaaatatttcaagtttttaagtgaacttccaatacataaaacaaaattactttagcatacacaaatttcagatcaaaatacaacactctgtttctgttttcttacagttataaaatccagtcaatacaaactacataaaaaagataaaacactttcactgatccttggtacaagagaacagcatgatggcaaaatgttccccaagcacaggtcctgggttcgtgagaagggaccaaccccacaatatactgaagcatgtaaacaaagtgcgtgctacttaatttaggttaacaaatcctttttgcatcagtattacttgtaaaccataaagcaacttttaaaaagaaaggttattaattaaaaattacttctgactgctaaatttcttatcagcaagtgaacagaaaattattccacaaaacaaactagtacctttggaccacaggatgtgagacgtgacatttcaatgaaatcaacttagcacgacttctctactatcctactgaacttggggagtacaattttacaagttgcagccttctagcacttccaatattttgaactttctaaacctgcctatttagctatgattttcattgcaaatccctgtttttcagtagtaggactttattaaagataggataatatcacacacaatacaatcttcactgaatatgtgtctaagcagacctacttggaattctactagataataaagttgcaggatttaaaagaaatactattctgcaggtcccatgtcagaaaacacagatatcc

SEQ ID NO: 362007 - DNA, 539 bp, Homo Sapiens
ggggaatacattaattcttaaagcggctcttttcagtagtgtgacttttagaaagtgtctcagtagttaaggaagctaacagtcttagatctacttttaaaacggatggccttcttaagaataaagcaaaaggtgattttctacataatttttgctttccaaaagtgatgatatgctctcctacagcaacatatgagaagaaaaaaggcttatctagattcgaaaattaacagcaattatagtaatatatcccctccttctaaatagtaaaaagctctgattgtacaagaattacctgtgctagtcaagttgttgtttttccttgaacaactttggaaaaatggatttgacagtacataatcagttctactaaccaaagcttgtatttggaaatttactttttgtacaaattgaattatataatgcttaaaatactttgtcactttataagcaaaatgcatagtacttaatttgtttatactgtaaagtatatgttaaatgcttttatcactttgagaataaaaagttactaatgaaaa

SEQ ID NO: 362008 - DNA, 965 bp, Homo Sapiens
gcggccgctgcctgggccgtgcgccgaatctcccccaccacgtgccgggcccgccggaagccctctttgctcaccaggtccctggcagcctctagctcttccagttgtacctcccggaggctttccttgcccagcgcccgggccacttcttcacattggcgccgccgcacagggtactcgctggaggccagggagtggcggacattagagttggtgatgagcacggccagcttggggtccgagagtggcaccaggctggtctccaaggacctgcagtcaatgagcagcgcgtggcctttctgtcccataagtgagatgaactggtccatgatgccacagggcatccctgcgaagctgtgctcggcctgctgacacacctgggcgcgggcagctattgtgcccgagtctggacagagctgctggaggaaggtgtacgtggccacttccaaggatgctgagctggacaggccaccccccaggggcactgagctgaccaccactgcactgaagccagggaggggggcagctgggtagtactgaatcactcccttgacatagttggcccaccgaggagtcccaggctccagcgagcgctgggctgtgggcagtggaaactgcagccgctggggctcatcggcaccctcagaggtggtgaggagagacaccagcccatccttgcgggggctgcccaccagcaccgtcatgagctccagagccataggcagcaccaggccctggttgtagtccgtgtgttccccgatgaggttgacgcggcccggcgctgacacggccagctcgggctcggccccgaactcctcccggaaggctcgccgggcctcggccagcagctccgcgacctggggctgtctcaaagcagccatgacgcgcgcctgcagctctgcacagctgctccggcacagccccgcctcgtgccgaattcaccaccaggcctcgacctagccgat

SEQ ID NO: 362009 - DNA, 1336 bp, Homo Sapiens
  misc_feature (909)..(932): n is a, c, g, or t
ggcccaccggggcccgggccccattaatttttaaatagttagaaccatagtgattaagctaatattggtagacactgaaaaacaggacaaagtgatcaaactaattatagcactgacaggatgcaaaatggaagacagaggtaggtctgcaaacagccacacaggtggaaattccaattgtaaatggttctctttgaaatactcagttttacataaatgcttatccagcagcacgtcataaaccacagggccaaaacaatttcttgtcacgtaaacatggcgttggtagctaaaactcaaatttagcaacaaataattgttttcataggactcataagataaccttaaattgttagatgcttttagggcattggctaattcagaattggctggtattataacagaacttaatttttgcaggcatttaaagattttcatgcattatgtacctgaaggttttgtctcttaattttctttgaaccacacctcttctccttattataagaaaaaccctcttagggtaagggaagcccaaattaactgtcctgaaattttgcattatatttaaaccataatatttgatttacttctgtcaaacaaaacactaccatttgggttctcatttgtagattatttaaaaacatgtttttcctgttaattatcaatgcatttactatcacaaggattaaaaagatcacttcaggtggtggggatgtttcatgaaacaccatggtggggagtaggtagtgggcaggcagagtgacaatcagcttaacctcctttcacctagctgttctttagaaaaacaaaaataaaagtcaaattgctttcagttttcaagagtgaaaatggagacacaagaaggatattcagatgtgcaagcaaattgcttcttttacatccttatannnnnnnnnnnnnnnnnnnnnnnngagacggagtctcgctctgccaccatgcccggcctcacaaagtattttctaaaatataatttgctatagagttcacagatgagcacttttcacattaggtgatatgcaaacaaatcactattggctcagcaggaaacagactttttgtacactctagttaacatgaagttttccaataaaacaaatgacagcgggagggggtagtgaggaattcaactctgtaatgtccacctagaatccaagtaggaaaaaaataaagctattgaaataatttagtaatatcctataggtcaccagtgatttccataaaatgctgcacagatacaaagtcttgagtatgttacttagtagctaaaaagagagccttgtgtgaggcacagctgacttggaacattaaagagcct

SEQ ID NO: 362010 - DNA, 634 bp, Homo Sapiens
ggagtctgtggttttctgttgaagcagtctgaattgactaaaacagtcacttggagtagttataaaccactttcctgttgaaagcagaacatgctgattcaactgttttgttcaatagcaatgatagattttgtttaagtcccctacactttcttatttctaaatgatcaagagtacacttcctggcagtgattaaggagtgtgtatctaacagaaaaaatatatataccctgtgaacccgaatatggaattcagattgtttctgccctcagtatcatacttaaaaaacaagcatacaaacaaacataagggaacaaacagcaaccataaccaaaaacaaacctttaaagggtgcgtttttgctgtgataaatgaatacggtacctctgaaggagaaaaaagtttctcaaatgagcttaaactgcaagtgatttaaaaattagagaatataattcttaaagctattgaaagtttcaaccagaaaacctcaagtggaattttgtatgtaaatgaaatcttgaatgtaagttctgtgattctttaagcaaacaattagctgaaaacttggtattgttggagtttatgtagtaagtgacttggcacccatcagaaaataaagggcattaaattgaaa

SEQ ID NO: 362011 - DNA, 609 bp, Homo Sapiens
tggtttgccctgacttctctacggctctggcttcttcccgaagagatataggagccatgtaagcacgcagtgggtgaactgcttaatttcactacatgttgatgtacttgtcttccgtcctgtaggtcttttctatataactttatgccacccttaaatgaatcattgggtatacctgtcatgttggatcctgtaatcacagttttccctgctcacctttttgtctaagatctattgagaaagggaaatatgggaaggagaaccatttgatcagaatacaaccaatagtctttaagcattgttaaagtatgaaactgaaatacattcaaaacacttaatccttgaggcttgtgatctgagtaattagcaggtatgatgctgggactggaaaatagaaagtaataactaaagggttaatgtgcaacgttattttttggccttgttcatgattttatgttttcagtgtcctgtgtacatatagaattgttaaagttgtcatttccaatatttatattagaaaaattatttagatactttataattttaaccggcatttttaataatgacacttgcatttattgtattgtaataaatttcacttttaacttt

SEQ ID NO: 362012 - DNA, 459 bp, Homo Sapiens
ttattcaaaacactttttatttttaaagcatggcatggcagcatatacacctaaacacatgcatgtgagcatgagaggcctcgctctccaagatcagaagctgggaggggaaggaccttgacgtgctctggagaccagcggtgcccatggggatggcaggtggaggttctgtcctcacaacccctggggttatcgttccagccagaaagcgaagagaccactcacaggaagcaagggcaccgtccggtcctcggcgtggtgtgaccagagctctcatgctcaggcctccaccataacttgctcttcggcatcacggggcatctctcttcttgcccaaacaagcagctttctggaaagaggagtggggatgccacttagcaccattagcccatgtgtggctggtgggggcttgaactgaccacaagtgggaaaggcagagagtgcgccagaaaaacacct

SEQ ID NO: 362013 - DNA, 750 bp, Homo Sapiens
ggcacgaggtgcagacttgcacataaatctcccaagaggcattacccataatctttgaccatgcgctttttccagagtacaatgtgactctagtgttgcacagaacacactttaggaagtgttgcattaactagacacaattgaagtgaactgttccataaaaaattgtgcgttctcttatggacagagtattttacatctcagtgatctcttttattactttttcagctcccaaattataaccagcccccttccttcagtctcttcacctcctcctgcatcaaaaacaaaagaagttccagatggcgaaaatctggaacaagatctctgtaccttcttgatatcgagagcctgcaaaaactcaacactggctaattatttatactggtatgtaaaaataattttctgtttattttcttattacccttaagaattattttttctcatgctataaacacaaagatgatttaaaataagatatgagcaatcatcaaaagtctagatatagtatttatatctaactgtattccctgacagctgggttcatggaaatgcttgttggcatcaacatttctctccctttcactaaggatataactttccaggagctaggatataactggggagggtaatgggtactttcagtttaatatctgtttggcatgtaaagtagttgagtatgatatttcacagttcttcaggagtatatattttcacattatttactaaaacattggaatcatttaaaaa

SEQ ID NO: 362014 - DNA, 620 bp, Homo Sapiens
  misc_feature (109)..(109): n is a, c, g, or t
agctcgcgggacccgacccccgtggggctcccgtgttttgtaggagacttgccagagccgggcacattgagctgtgcaacgccgtgggctgcgtcctttggtcctgtcnccgcagccctggcagggggcatgcggtcgggcaggggctggagggaggcgggggctgcccttgggccacccctcctagtttgggaggagcagatttttgcaataccaagtatagcctatggcagaaaaaatgtctgtaaatatgtttttaaaggtggattttgtttaaaaaatcttaatgaatgagtctgttgtgtgtcatgccagtgagggacgtcagactcggctcagctcggggagccttagccgcccatgcactggggacgctccgctgccgtgccgcctgcactcctcagggcagcctcccccggctctacgggggccgcgtggtgccatccccagggggcatgaccagatgcgtcccaagatgttgatttttactgtgttttataaaatagagtgtagtttacagaaaaagactttaaaagtgatctacatgaggaactgtagatgatgtatttttttcatcccttttgttaactgatttgcaataaaaatgatactgatggtga

SEQ ID NO: 362015 - DNA, 722 bp, Homo Sapiens
gtatcccatcatgtggatgtaccatgattcattggatgtggaccctcctgatggacatttaaatttcttccaatctgttgctattacaaaaagaaaaatgtgtgcatacatctttattcatctgtagaataaattcttagaagtagaatggcagagttaaaaattgtatgtatataattttttatagatattgccaaattgtcttccataaaagttgaaccaattttctctacttttattttgcattctgagtgtggcagaggcaaagctatgtgcataccatagctttttctccccctgaaaacacaactaaactacattgttttcctggcctctcatgcatttaggttggggtcatattacttccctccaagaaaaacaacagttggtatgcctcctccacacttcccacaactgtggaagccagtgatccagatagcatagctattaatacaagatgggtgaaagctgctcaaccgcatcagacagcatgagtggtaagattttattgtgtcaaacgactgcattagttgtgttttgttattatggcagcatagcctagcttagccctaactaattcaataaataaagttgagcattatttgtacatttaaaagcgttttttatgtttgctttacagtggctttccacttttctatcagagaatcccccctcccttatgtaccatgctatattaataaattggaaggagctgctaaaaa

SEQ ID NO: 362016 - DNA, 895 bp, Homo Sapiens
  misc_feature (808)..(826): n is a, c, g, or t
ctgatactggctattaagtttctgcagctgcatactagccagcaagtgaggggcggggtgcaggttgaaggatgggggtttagtgggaggggtggtgtaggagagcctattggagatcccgaggaactagtgggagccccactggccttggttccatttgaggctaccccagggtagtgcagaatggccactgctttgcgatctttcaccgcaaggttggagtaggccacggagctcatctcttggttggcatcctccttcgcaggtgaggtgccacccttgacatcaagtgcaggcctcgacgttgttggcatttcagagccttggcagaagttggataaattggcgggaagtgatgctgccagctggagctgttgtgctctgagaagccgcctgccctggagagagggaagcgcggagctcggtgagccgcaagagaggcggcggagcccccagcccctggcacgcacgccgccgccaccgctaccgcgaaccggtcgcgctcagcgcccgcggccgcgccgttggccacccgaccccggggcgcctgggaaaagcccgcaccgcgccgcgccgccgctgcaccgcacagtgccgcgccaagcagcccctgaccgagctggtgcccgcccgcccgcccgcagcttcggcgccggactccggggcggtggcggtggcggccaccgcgctcccttcccggcgctggggacccggctctcaagcccccattgccgcccggagagccctgacgcacacgcacacggcagcagactggcctcggctaggaatcccaggaaggacagacccnnnnnnnnnnnnnnnnnnnctcccctcaattcccacgtctttataaccggcttatggcattattagcacatgtcctggctcgtccgct

SEQ ID NO: 362017 - DNA, 857 bp, Homo Sapiens
cgctgagctgccgagaggaagctcgctctgcccggctgccctcttgtagtccgccggcgaggggctgttctcggtgaggaggaagagagcagcggacggcacagcacccgcgcgggccctcccacaacagctccagctggcagcatcacttcccgccaatttatccaacttctgccaaggctctgaaatgccaacaacgtcgaggcctgcacttgatgtcaagggtggcacctcacctgcgaaggaggatgccaaccaagagatgagctccgtggcctactccaaccttgcggtgaaagatcgcaaagcagtggccattctgcactaccctggggtagcctcaaatggaaccaaggccagtggggctcccactagttcctcgggatctccaataggctctcctacaaccacccctcccactaaacccccatccttcaacctgcaccccgcccctcacttgctggctagtatgcagctgcagaaacttaatagccagtatcaggggatggctgctgccactccaggccaacccggggaggcaggacccctgcaaaactgggactttggggcccaggcgggaggggcagaatcactctctccttctgctggtgcccagagccctgctatcatcgattcggacccagtggatgaggaagtgctgatgtcgctggtggtggaactggggttggaccgagccaatgagcttccggagctgtggctggggcagaatgagtttgacttcactgcggactttccatctagctgctaatgccaagtgtccctaaagatggaggaataaagccaccaattctgttgtaaataaaaataaagttacttacaaagagaccggttcaaac

SEQ ID NO: 362018 - DNA, 467 bp, Homo Sapiens
tgcaaatgtcatttccctctactgcctcttcctgcctctccccaccctgcccacatccacagaggggagagaagggtcatagctaaatgcaacaaagtctgtatcttgtcccaacctgcttttctgttctgttagcatatcataaagtaagcctttctggtgaaggaaggttgctatgaaactttttttcttggtggaaatggccaagtttaggcactctgctttttgccttacactaatgcttagaaagctgtcttttcagtggtgttgcagcccccagatgtgtggccaacctctgctgcaaaggaatctcttgctgagtccaggccaccaatcaggcaaatagcccatacatttgatcgttgtaaaccatgaagtcttttcttgcaagacgtttttcttctgctgtggtatcttgcccttaaaaattagttttcattaaaaagaaatttgattgaaaataaaaa

SEQ ID NO: 362019 - DNA, 1067 bp, Homo Sapiens
  misc_feature (1019)..(1027): n is a, c, g, or t
cgaagaggcagaaggatctgggcctgtgcgcgacgccccgggggacgaggctcatggagaagtttcgggcggtgctggacctgcacgtcaagcaccacagcgccttgggctacggcctggtgaccctgctgacggcgggcggggagcgcatcttctccgccgtggcattccagtgcccgtgcagcgccgcctggaacctgccctacggcctggtcttcttgctggtgccggcgctcgcgctcttcctcctgggctacgtgctgagcgcacgcacgtggcgcctgctcaccggatgctgctccagcgcccgcgcgagttgcggatcggcgctgcgcggctccctggtgtgcgcgcaaatcagcgcggccgccgcgctcgcgcccctcacctgggtggccgtggcgctgctcgggggcgccttttacgagtgcgcggccaccgggagcgcggccttcgcgcagcgcctgtgcctcggccgcaaccgcagctgcgccgcggagctgccgctggtgccgtgcaaccaggccaaggcgtcggacgtgcaggacctcctgaaggatctgaaggctcagtcgcaggtgttgggctggatcttgatagcagttgttatcatcattcttctgatttttacatctgtcacccgatgcctatctccagttagttttctgcagctgaaattctggaaaatctatttggaacaggagcagcagatccttaaaagtaaagccacagagcatgcaactgaattggcaaaagagaatattaaatgtttctttgagggctcgcatccaaaagaatataacactccaagcatgaaagagtggcagcaaatttcatcactgtatactttcaatccgaagggccagtactacagcatgttgcacaaatatgtcaacagaaaaagagaagactcacagtatcaggtctactgaaggagatacggtgattcctgttcttggctttgtagattcatctggtataaacagcactcctgagttatgacctttcgaatgagtagnnnnnnnnnttgttttgaattattgctttattaaaaaataaacattggg

SEQ ID NO: 362020 - DNA, 488 bp, Homo Sapiens
tcttggtgataaactgtggcactgctacttctttttaaatccactttatgatttcaagatggacacttgtaagatgactcgacacaaggccattgcctggaagccccagagctttcctctgtttgtatggcccgttcatgtcccaggcattgcaacacaaactcctcaagatttcaccacaacatgacaagcattttcctaactgatattagcacaatttaactaataagccccttcgctctctagttggccaggcttaacctaatacacatctaacgtgtgtgccacacggccagtagaaagtttaacttcagcttcagggcaaagatacccactcacaccgtgtcaacgcaagcagtagttcctggcctccagagcagcttacttcccctgaaagaacgctttgttttcctttatgcccttttcctgttgaccacttttacacatttaaatgtaatttgttgtgagaataaatttagctgcataaa

SEQ ID NO: 362021 - DNA, 530 bp, Homo Sapiens
caccaggtgtgcagctccccaccaatactaaaaacatgtccacaggccaggctctatgcttctcatttaggcctcacaacattccagtgaagcagaggcttagaaaagtgatctcagttggcccaagatgacatgagtggtaaatgaagccactggagttcaaagtctggctctcacgtcagttaagcacaggccagattccctttctctccctccacatagctctcacctcctctggcctttttgctgatggcagaggtgtgctcctctttcttctttccaagggtacttcctcaaccctgctacagtccttatcaacacagcattcattctcagggaattgaaagctccaagtcacccttgttactggctccttccatcaagcagacacctcacctaacctggaacatcctttccaccatgctctccccttcatcaagctaactacctctgctcttttccattgtttcaaaacctcttgaaatgcagcagaaaggaaaaggaataaacatttattgagaacctattaa

SEQ ID NO: 362022 - DNA, 534 bp, Homo Sapiens
atgtaagctgtgctgtttagaaacaacatctcagactttacaaagaaatgacaaagaaggcaattgcactttttaagggatatcgacaagcagtttctgttttctaaaggacaaaatacagagtgtgtgtcatttttaattagattctttcccctgctgagttggaaattccagtgcagcactgattgaccacagttgccaatctaaaagcacaaagacagaagtaaagctttatgctaattttatttcaatatgatagaaaatttatcttggtatgtccttttttagataactccagcaggaaactgtaactgctatgtctttaggaaaatgtagaagaaagaacattattattctttaattcctacaaggtactcgaaaaccttaagtgaaaaagatttctatctttttatcttagcgcatttatggaaaaaatattaactatcctgaatattttataattttgtaggaaaaatatgcatctattttttcttgacttcttttatatagtaataaaagttattttggaagctc

SEQ ID NO: 362023 - DNA, 631 bp, Homo Sapiens
  misc_feature (130)..(166): n is a, c, g, or t
aatcttgccaatgagaaggacggacctggatcattttttagcatagtaaaagagagaaaccagagagaatgaattctaacactcaagttttggggggaaagaaaagactttattctttgcagggggtttnnnnnnnnnnnnnnnnnnnnnnnnnnnnnnnnnnnnnttctcaaatcgtttcattatcatattttacagataagaactgaagcgtggcaagattaaggaagttgctcaacttcacatagtcagaacatgactctagggagtagaggctagcgaagtggggtgcaagaggtcatccaaatttcttgaaataccagatctttttacctcatcatatatgttagattgtcagttttatcgttttcttcccagctttattatttgacaaaaaattatatatattcaaggtgtacaatgtgatgactggatataattatacattgtgtaatgattaccaaaatcaaattaagtaaaacatccttcactaatttatgtagtagttcggtgggggggcacttaagcaaatttgtcttagcaaacttcaagtaaacaatacagaattattagctatagtcaacatgttgtacattagattcccagaacttgtcttaaaactgaaaacttg

SEQ ID NO: 362024 - DNA, 545 bp, Homo Sapiens
tgctgtaagtatgtatctttcagggactatatattgacagttccctttgtgtgggcaactcagcttctagatttaagtgttgctgcctcacttctttaaataacaccctctgtgtgaggctggttgtgaccccactggcattacaatcctgctcccttcctcacggccttcccactatatttttccctgctcctaaggatcctgcagtctatttggagagtgaaaacatatccttatgaaaaggaaagcaggaatggaatattatatggaatgtcagatgagtgtaattcaagtcagtatcagaagtgatagttcctggcttggtgccagatgttggaggcctgttgggccaatgacaggaatgtagactttattctggacagcagagaaccatacaaaatctcccctccctgctttggttctgattatgtcacaattctagcatctttcatgaaactagtttttgcactgagcatattagactcaaattatgtgtttatcttaataagtgcctaaatgaatataaataaaatgaatataaatct

SEQ ID NO: 362025 - DNA, 756 bp, Homo Sapiens; identical to SEQ ID NO: 4208
  misc_feature (598)..(615): n is a, c, g, or t

SEQ ID NO: 362026 - DNA, 543 bp, Homo Sapiens
actgtcagaaacttctgtgcatgtatttatatttgccagagtataaacttttatactctgatttttatccttcaatgattgattatactaagaataaatggtcacatatcctaaaagcttcttcatgaaattattagcagaaaccatgtttgtaaccaaagcacatttgccaatgctaactggctgttgtaataataaacagataaggctgcatttgcttcatgccatgtgacctcacagtaaacatctctgcctttgcctgtgtgtgttctgggggaggggggacatggaaaaatattgtttggacattacttgggtgagtgcccatgaaaacatcagtgaacttgtaactattgttttgttttggatttaaggagatgttttagatcagtaacagctaataggaatatgcgagtaaattcagaattgaaacaatttctccttgttctacctatcaccacattttctcaaattgaactctttgttatatgtccatttctattcatgtaacttctttttcattaaacatggatcaaaactgcc

SEQ ID NO: 362027 - DNA, 511 bp, Homo Sapiens
atggccatcgcactctgaaacaacatgctggaaccagtgggccgcaagactacctccaaaaacttcacccaaagccgagcaaaactaaagtgcccctctcctgagaccccttacctctaaaacctgccgaaaagccgactgctcccagaccaggctgaagaagcccccgaggtgctctactgggctgtccaagtggaagcgggagtcggccttgtggtggacatcatcgggaaagtggtctggaggtgcagaaaagctgcccggaggaaaaatcctccaatgagcctgcgaactgtggccctctaggcccgggggtgggtcctcaccctaaactccctatagccacccttttcaccgccctttgccccagccactcccggccaccaggacatgcttcaatgcctggtgccctaggaagcccaggggacagtcacaacttcttggggcctgggcttcttccaatcctatgctcctggaatggatacatttaaataaagtccaaagctatttt

SEQ ID NO: 362028 - DNA, 424 bp, Homo Sapiens
gctgcctttcccaccaccagcctcggtgctctgccccatgctgggaggagggagggagggacaggtgcctggagcccccggaaccctgtttctggaaggccctagctcaggtggcttcagggcctccggaccccccctgggaggggtggccacgtgctggctgcggaacccagggcaggggtgggaggggcctccagcactttttatatttacgtattctccaaagcagtgttcacacgggagccagcctgtggcccccagcctcctggaaaacaggttggcgctggaggagccgggtcttggcatcctggaggtggccccactggtcctggtgctccaggcggggccgtggacccctcacctacattccatagtgggcccgtggggctcctggtgcatcttaataaagtgtgagcagcaaaaa

SEQ ID NO: 362029 - DNA, 451 bp, Homo Sapiens
  misc_feature (14)..(14): n is a, c, g, or t
  misc_feature (21)..(21): n is a, c, g, or t
  misc_feature (60)..(60): n is a, c, g, or t
  misc_feature (69)..(69): n is a, c, g, or t
  misc_feature (135)..(135): n is a, c, g, or t
  misc_feature (402)..(402): n is a, c, g, or t
aaaaatgccgcaanccaaaantgcctttcccaccaccaacctcggtgctctgcccccatnctgggaaanaaggaaaggagggaaaaagtgccctggaacccccggaaccctgtttctggaaaagccctggctcangtggctttcagggctccggaacccccctgggaagggtggccacgtgctggctgcggaacccagggcaggggtgggaggggcctccagcactttttatatttacgtattctccaaagcagtgttcacacgggagccagcctgtggcccccagcctcctggaaaacaggttggcgctggaggagccgggtcttggcatcctggaggtggccccactggtcctggtgctccaggcggggccgtggacccctcacctacattccatagtgngcccgtggggctcctggtgcatcttaataaagtgtgagcagcaaccttg

SEQ ID NO: 362030 - DNA, 752 bp, Homo Sapiens
  misc_feature (58)..(94): n is a, c, g, or t
gaggagaaacgacgtgtattgatctatgggcgaactggagttcaccgcggggcggcgnnnnnnnnnnnnnnnnnnnnnnnnnnnnnnnnnnnnnatcaggccaaatcggccgagctcgaattcgtcgagagcggggcggcggtcatgcgggacgcggatgcagacgcaggcggaggcgctgacggcggggatggccggggtggccacagctgccgcgggggcgtggacacagccgcagctccggccggtggagctcccccagcgcacgcgccaggtccgggcagagacgccgcgtctgcggccagggggtcacgaatgcggccgcacatattcaccctcagcgtgcctttcccgacccccttggaggcggaaatcgcccatgggtccctggcaccagatgccgagccccaccaaagggtggttgggaaggatctcacagtgagtggcaggatcctggtcgtccgctggaaagctgaagactgtcgcctgctccgaatttccgtcatcaactttcttgaccagctttccctggtggtgcggaccatgcagcgctttgggccccccgtttcccgctaagcctggcctgggcaaatggagcgaggtcccactttgcgtctccttgtaggcagtgcgtccatccttccctagggcaggaattcccacagttgctactttcctgggagggcctcatgttttatctggttcttaaatgtttgttactacagaaaataaaactgcgctactaaaaaaaa

SEQ ID NO: 362031 - DNA, 471 bp, Homo Sapiens
  misc_feature (14)..(14): n is a, c, g, or t
tggtaccgcacatnattcaccctcagcgtgcctttcccgacccccttagaggtggaaattgcccatgggtccctggctccagatgccgaaccccaccaaagggtggttgggaaggatctcacagtgagcggcaggatcctggccgtccgctggaaagctgaagactgttgcctgctccgaatttcccttatcaactttctcgaccatctttctctggtggtgcggaccctgcagcactttgggcccccagtttcccgctaagcctggcctgggaaaatggggcgaggtctaaccttgcgtctcctcctaggcagtgcatccatcctccctagggcagggaattcccacagttgctactttcccgggagggcctcatggtcggcctgtactgcctttgtgtgctcaggggtcccttgttttctctggttcttaaatgtttgttaccacagaaaataaaactgagctactatt

SEQ ID NO: 362032 - DNA, 467 bp, Homo Sapiens
  misc_feature (83)..(105): n is a, c, g, or t
tcaagggtcacacagggttaagttcagtaagctgtgatcgtgacatgcctccagcctgggtgaccggagtgagactgtttctnnnnnnnnnnnnnnnnnnnnnnnttcttcttgaggtggggtggaggtggggagcaagaatttgacctggctctgatccctggtgtgttgtgtgggcctctttaacgtttgccactgagccttaacctcactgtacttcactgtacttcacacgcattggtgttaacattttaatcttagaagaccctgacccactgagggtttgttgtgagaattgctgaagccacgtagaagcaccttgaaatctgtaaaaccacaagaaagtactttataaaaggtatccttatttgaagtggataaatcttgtaactcgaaaagttgtgatttagaagacaggattgtttttgaacattaggaattaaaggctatatctggtccttaacaaa

SEQ ID NO: 362033 - DNA, 629 bp, Homo Sapiens
gcggccgcctctgccccccctccccgggcagccagtgccagatgagagcaggagacaaaagtagcattttcctcgtactccggggctggcagcggggccttcccccagcaccacatggctcctggcagccctgccccctgtgccggggtggccgaggcccagccgggcccactggaccgagggacggcggcggccagagactagggggcccgtgggcccatagctggggctggcaccgggcagcctgctggccggcgggacctgccctcctcccccacccgggtgaccggctgggcccagggacgtcattttcacttcctggctttggagaagacgcctccatcctccggcacctcgggtaagtcaccttctttccttctgtcgtgaagacgagccgagggtgctgccatcttgtgccccggtgcctgttacgtgtcctccctctaattggttctccaaactcagaattctatttcagagccctccatcttccgtgcaggaagccctgccaaaaactgcagggaaaatgcagaagccaagcccatttactttcaagatccaaagctacaggctttagaaatcacaataaaaatgaatgtttattatttcacagtagctgcgtcttccat

SEQ ID NO: 362034 - DNA, 768 bp, Homo Sapiens
  misc_feature (13)..(13): n is a, c, g, or t
  misc_feature (29)..(29): n is a, c, g, or t
  misc_feature (74)..(74): n is a, c, g, or t
  misc_feature (122)..(122): n is a, c, g, or t
  misc_feature (156)..(156): n is a, c, g, or t
  misc_feature (222)..(222): n is a, c, g, or t
acccccggggtgnccttaaaaccttggtnaagggcccccgggtaggcaaaattatggaaaggtttagggaaatngggctatggagtatattaaagtacaaccacaaaacccctcggagttcncccaggaagccctaaaccttgagcagtaccttantcaagtggagtatataccttcaagaatacagatttttaaggtaagtagtttttcgtctttgcatcncctaagaccattgttaacaaccttgatattaaacgaagaagtgaatgtaaacctccttttgaacatattttttataaagaaatattttgttaattggagtaagtagtattgttatgaaatcactgtgtaattgttaattgtaaactgcaatgtctattttgtgttgtaacaatgttgccataaaatagctttgctaaatgtgaaatgactttaatcccttttgtcttcaatatacttcataaaggaggaaatgatgatttacacaatttgtcatgaagcttccgtgtttatgagaaattccaagaagtaagagccaagaggacagatattatcagaatatgggacataagaaattgcatatagtgtcaagggtttctatataacaacttaatttatttcccttgcatatatagtaggggttaacattttgctcaatgttaacgggggacataatggacataaaacattggatagctttttatttaaatgagctaaaggtgtgcgtatacacatgcacttataaaattaaagtcatatatgtatata

SEQ ID NO: 362035 - DNA, 619 bp, Homo Sapiens
caggtccaccatgccgttagtaacgaggaacatcgagccaaggcacctgtgccgtcagacgttgcctagcgttagaagcgagctggaatgcgtgaccaacatcaccctggcaaatgtcatccgacagctgggcagcctgagtaaatatgcagaggacatttttggagagctctttactcaggcaaatacctttgcctctcgggtaagctcccttgctgagagggtcgaccgactacaggttaaagtcactcagctggatcccaaggaagaagaagtgtcactgcaaggaatcaacacccgaaaagccttcagaagttccaccattcaagaccagaagctttttgacagaaactctctcccagtgcctgtcttagaaacatacaatacctgtgatactcctccccctctcaacaatcttaccccttacagggacgatggaaaagaggcactcaaattctacacagacccttcatacttctttgatctttggaaggagaagatgctgcaggacaccaaggatatcatgaaagagaagagaaagcataggaaagaaaagaaagataatccaaatcgagggaatgtaaacccacgtaccatcacgacacgtaaggaagagtga

SEQ ID NO: 362036 - DNA, 969 bp, Homo Sapiens
  misc_feature (106)..(170): n is a, c, g, or t
gtagatcatcatcataacagctcccagtgaatcaatgcctccctgtatccacacccctttgtaacatgatattgttgctcttcccatcaagaaatggtctcttttnnnnnnnnnnnnnnnnnnnnnnnnnnnnnnnnnnnnnnnnnnnnnnnnnnnnnnnnnnnnnnnnntgtaacaatatgttgaatttgccatgggcctttaaagcttcaatgttgtgaagagctctgcatgaaattttaaagagactggacctttcatctgcacaacagcagggcacctcgctatagggacaagaaaggaagagagagagagaacatttctgaagtaatagtgaaaaataacagcagaagcaattatttcatcaaagattgcagggagaggctcctccgtgctcctgagaggccgaacacagggtcgccagcacagcttactgctcggtgtctcctgagccacagaggaagacgtggcaggagcacctggtgctaatatatattcatgtctatggcaatgccgaccatctggctggtctgaaccaggataaaagtgaagaattcctctgtgaagacccagctctttctttggctccttttttgaagccatctttgctctgctctcctctgctgcccagaaagttccagagtgaagctcagctctagatgaacaaaaactggttgagtccagagatgcctgagttggagatgaaccttgcaaactttcctcattaccatactaaaaaccccacccaggaaggagcttatctgccatttcctacacatgtgacatatggagaagcatgatcagctacttcacagtctctgcctttactctgcctccgcatacaatggctcagccaactagcctaacgaaagctgttttcaccattgtttgggaggtactgctttgggaaactgccccagctgtcctccttacttgttgtaggtaataaaatccctttgttaaatctta

SEQ ID NO: 362037 - DNA, 585 bp, Homo Sapiens
acatttttcctcatcatccatgaggaaatggatgatttctcttttccatatgtcactgggggaaaggctgcctgtacctctcaagctttgcattttactggaaactgaggcgtcaagatggctgtggcagctagcaaaagcaaagatgctttgtgcatagccttgtgaaaaagtatctttctatgcaataagatgaattttcctcccagaatatttagaaatgtagaagggataacagttcacagccaggtaaaatttaactggtggcttaatgactctgcacctttttctcaggaattctgcctaagttgtctgccttttctaccaccaaaaagacttttagttttctatgctttctcctgaattttggtagggtaaggtatttctatgtcaaaggcacagccttgatgatctcagggaaaaattttaatcactgtgtataatgatactgaaccttgattaataacagaaattcaggatgtaaagccacagaatgggatttattaatgtgggatacctcagactgtttgttttctttctgggaagaaaagtgtgttctataatgaataaatatagagtggttaa

SEQ ID NO: 362038 - DNA, 1110 bp, Homo Sapiens
gctccccgtctcaccgtcttttcgggtgtactggcatgtcctggttcgaacaagccacttccgttggcgccgaactttcggtggaacatgtgtcaaactatggtgcactatcccggcggttcatctggtggccctggaacttggcccaagattttctccgactggagcaatacaatgggttgatcccttcctgcgagctgacactactgagggtgtgccatccttgtactgaggaagaagctacaagcctttttctcgaggagctctccatcgaggggccttaagaaggtcccaccgcctgagcaacaccacgtttcctcatgtcctgcccactcatcaccctgctggagtgtgactcggccccaccagagggccgtgagccctggggcagcacggagcacggcgtaggacgttcggtgctggctcacctggaggcacgcccgcacagtggcacaccacggaggcctgtaccacaccaatgctgaagtcaagctgcaggggttccaggcccggccggagctcccggaggtgatcagcacggagttccagatgcgccttctctggggcagtacagggtgccagcagcagccaggccacggcagctatgagaagttcgacaaggtcctcactgccctgtcccacaagctggaacctgctgtccgctgccagcgagctgtgaccccagggacatttcccctctgcagctgcggacagcgtcaggggcagaggggcacacaactttccccagagcaccccaaggacactgtgatcaacccgagaatgttctgggcttcaactcaagcatctcccattgcacctccagggtcctgcagtggactctgggttccatcccacctgctacatgctcaccaggtctccattgaggaagaacaggaacgccggttcccccaccagcttttgctgctccccttcctgctggggttccctgttttcgagccatgggaggcaggctgctcacgcctcctcactctctgtctgtccctcaccaacaccaaggcctccatctcactgtaaataagtctctgttctgtaaatagatgtacagaagccatgttatttctttcatataataaacttttatgactcttt

SEQ ID NO: 362039 - DNA, 491 bp, Homo Sapiens
  misc_feature (317)..(327): n is a, c, g, or t
actgctgcacaggcaaccaacatacttagtgcccagagccttctctctgggcccaggactcagtgatggggccttacttagccctgcctcctgggtggggtgggggagctgagggatcgtgaggacaagaggtagagggaaaagaaaagaagatggtgtttgaggataggggagggacaggagaggggacagaaaggtcccagagcatgatgatgaaggaaagggatctggcattcatgaagcacctacgatggttcaggcacaaacactgaaacctcaaattggccctggcagaaggggaccatcatagcaaggtnnnnnnnnnnntgcagaaagtgagtttctgtttcaagaacagacttcactagttcagagttgcacagctagtgaggtatggagctgggctttgaatcaggtcagctgcctgaatgcccaacttcttcagcccttggaaggagagggtggggagaagaagaaggaaaagacaagga

SEQ ID NO: 362040 - DNA, 508 bp, Homo Sapiens
attctatatgctagtctcttgtctttagtactaagatggctctattgatgataatacgaacacattttaggttcccaattgctttgggaataaagaattgtgacttagttaatataagttgctttttcaaaaggagaaacagtgtttcccatcattttttaaaattcaggaaaagtggtcttttttaattcagattttgaaggtttggtaagtttattgctaatgttggaccacacgcaagagaaagttagacattattttgtgaccagcattgttaagttgtcacattctgaacaaatcccttaaagacctggaactcatttacattttgcataaaatcctgatgggatttatggtttaaactttgactatactctttgtcttgaatttattaatttccttatcaggcttaaaacttgggggaaagtagacttttgcaaaatatttttttaaaccattaagttttatacaaagtccttctcaaaaaccctgtaaaccctctatctcc

SEQ ID NO: 362041 - DNA, 1168 bp, Homo Sapiens
  misc_feature (638)..(668): n is a, c, g, or t
cagcccctgtttcctggacagtggcggggccaggcctgagggcgggtcgccggggtggcttctggggtagaggtagccataaggcacaaagacgtccgagtccgcccggtaggagagcgtccagttgaagaggttacttgccaggcttcgcagccccggggagtgcgagggcgactcgaagttcatccaaacccagcgctggcccgggggcctggggctggaggtcgccagggcttctgccgccgccgctgcctcctcgtagtccaacacgcgcagatccacctcctcggcagtgtgcgcctggatgccccagggcgggggccagtcggggggccccttcacgaggtcgcggtggtggaaaagcacggcctgagcctctccgtaggacgcgcggtcggtgagcaggcggcagccgctgatgttgaagcgcagccggcagtcagggggcggcctcggggcgctatcgcgccccccgaagggctcccaccacagcagcacgcccaccggtcgcgacggggttggcgacgcccagggcagcggcggcagctgcccccagcaagcgtaggtgatcagcgccgtacacgtcaagccggcggccgccagcacacagacggtccatggcagcctccggcctcggnnnnnnnnnnnnnnnnnnnnnnnnnnnnnnntcggcgagccccacggtgcccccatggcgcgaacaggcagcgctgcctccgctcgccacgcgtccgcaggcgtggaggagcggcaccggctctcatgctgtagctgcggctccagccgtcgctgccgctcgccgctggcccgggaatggaagggggcggtcccagaatgcaaaggccgcgggccctgccctgctcctcccaagtgccgggcggggcgagccgccaggcaaggtgagctggccaggacgcccaaccgggcaccgcccgtccctttcttccactgcgcccggggcccagccggcccgaccaggccccgggagcctcctgcggcgcctccgcccactccttctcccagcccgcgcccgagggcttccgggccgcgccccacaagcgcctcatccgctactcttgattctctctcaactgatccggtttccctctgcgcgcgcccacctgctggcctcgctcactgtggcccgaaccctcgccttcaagaggga

SEQ ID NO: 362042 - DNA, 559 bp, Homo Sapiens
  misc_feature (34)..(34): n is a, c, g, or t
  misc_feature (40)..(40): n is a, c, g, or t
  misc_feature (520)..(520): n is a, c, g, or t
aatcaacatggagcttttaaaggtggctaacggntaactntctgtgccaaggctgtgctgccatcctggatacaggcacacctgtcatcgtaggaccccactgaggaaatccgggccctgcatgcagccattggggaatccccttgctggctggggagtacatcatccggtgctcagaaatcccaaaactccccgcagtctcactcctcattgggggggtctggtttaatctcacggcccaggattacgtcatccagtttgctcagggtgacgtccgcctctgcttgtccggcttccgggccttggacaatcgttcgcctccagtacctgtgtggatcctcggcgacgttttcttgggggcgtatgtgaccgtcttcgaccgcggggacatcagagagcggcgcacggagtgggacatggcgcgcgctcgccctcgcggagcggacctggcgatatggggagaaccgcaggcgcagtaacccgggtgccgcccaggtagaagcatgcgcaccgggtagcnagagtagcgctactcagtaaaaatccaatatttccattg

SEQ ID NO: 362043 - DNA, 866 bp, Homo Sapiens
aatgtggagccttccggggccacactgatccgcatccctcttcatcgagtccaacctggacgcaggatcctgaacctactgaggggatggagagaaccagcagagctccccaagttgggggccccatcccctggggacaagcccatcttcgtacctctctcgaactacagggatgtgagtcacagccccacacagccctcacccctgcgcccttgagccaaactcttcgtttactctcctcttttgctatcaggtgcagtattttggggaaattgggctgggaacgcctccacaaaacttcactgttgcctttgacactggctcctccaatctctgggtcccgtccaggagatgccacttcttcagtgtgccctgctgtgagcttctatgtgggagaataaggctgaatgggggtgaagggaggaggcggggctggacctcagcttctcagaggcttttgaggaactgttcttttatcatgccctcacaggtcagaaagtcaaaggggcagtaggcactggggagattccctcccccatgacacctttctgacctctaacctagggttacaccaccgatttgatcccaaagcctctagctccttccaggccaatgggaccaagttttgccattcaatatggaactgggcgggtagatggcaatcctgagcgaggacagctgactattggtggaatcaagggtgctcagtgatttcggggaggctctctgggagccagccttggtcttcgcttttgccatttgatgggatatggggctcggtttccatctgtctgtggacaggagtcggcccgatggatgtctggttggagcggggctattggataagctgtttctccttttactca

SEQ ID NO: 362044 - DNA, 1856 bp, Homo Sapiens
  misc_feature (225)..(260): n is a, c, g, or t
caggagcacaggatgctacttctgccaaccctacaaaaatactctgcacaaatcttcaaaaaacatccttgtcccactgcgtcacctgcggacagatctcatgtcctggtctccttctaaacctggaggtggggcatgaacagggtggagtcacaggggaaagaaaatgaggccccaggacacctgggttcacacccaggtccccagcgatgtctccaccaccgnnnnnnnnnnnnnnnnnnnnnnnnnnnnnnnnnnnnaatgtggagccttccggggccacactgatccgcatccctcttcatcgagtccaacctggacgcaggatcctgaacctactgaggggatggagagaaccagcagagctccccaagttgggggccccatcccctggggacaagcccatcttcgtacctctctcgaactacagggatgtgcagtattttggggaaattgggctgggaacgcctccacaaaacttcactgttgcctttgacactggctcctccaatctctgggtcccgtccaggagatgccacttcttcagtgtgccctgctggttacaccaccgatttgatcccaaagcctctagctccttccaggccaatgggaccaagtttgccattcaatatggaactgggcgggtagatggaatcctgagcgaggacaagctgactattggtggaatcaagggtgcatcagtgattttcggggaggctctctgggagcccagcctggtcttcgcttttgcccattttgatgggatattgggcctcggttttcccattctgtctgtggaaggagttcggcccccgatggatgtactggtggagcaggggctattggataagcctgtcttctccttttacctcaacagggaccctgaagagcctgatggaggagagctggtcctggggggctcggacccggcacactacatcccacccctcaccttcgtgccagtcacggtccctgcctactggcagatccacatggagcgtgtgaaggtgggcccagggctgactctctgtgccaagggctgtgctgccatcctggatacgggcacgtccctcatcacaggacccactgaggagatccgggccctgcatgcagccattgggggaatccccttgctggctggggagtacatcatcctgtgctcggaaatcccaaagctccccgcagtctccttcctccttgggggggtctggtttaacctcacggcccatgattacgtcatccagactactcgaaatggcgtccgcctctgcttgtccggtttccaggccctggatgtccctccgcctgcagggcccttctggatcctcggtgacgtcttcttggggacgtatgtggccgtcttcgaccgcggggacatgaagagcagcgcccgggtgggcctggcgcgcgctcgcactcgcggagcggacctcggatggggagagactgcgcaggcgcagttccccgggtgacgcccaagtgaagcgcatgcgcagcgggtgggtcgcagtaggtcctgctacccactaaaaatccactatttccattgagcgaccaacatgatgcgacccctcatctgccctatgccggccgcgcccgctctagaggtatcccctccagggggtccaagattcactcaggccctagctttctttagtaaaggcggcccccccgttgtccatccccaaataacttgcctatgcccaatgggcacgtttgttctaaaatttacaggttacccgtcaaagaactccccccggcattgtgaaccccttttggaaaaaaaccccaaaactctccgggagtttggcaaattttttgggaaaaacgggataacctaataacagaattttccg

SEQ ID NO: 362045 - DNA, 485 bp, Homo Sapiens
  misc_feature (145)..(313): n is a, c, g, or t
agtggaggaagagggacagatgaatgccgtggattgcacgtggcctcttgagcagtggctggtccagggctagtgacttgtgtcccatgatccctgtgttgtctctagagcagggattaacctctgcactactgacatgtggggnnnnnnnnnnnnnnnnnnnnnnnnnnnnnnnnnnnnnnnnnnnnnnnnnnnnnnnnnnnnnnnnnnnnnnnnnnnnnnnnnnnnnnnnnnnnnnnnnnnnnnnnnnnnnnnnnnnnnnnnnnnnnnnnnnnnnnnnnnnnnnnnnnnnnnnnnnnnnnnnnnnnnnnnngtctgtagggatttttggctacacacaaaccagtatcgctcatagatcagcaaaccggggcctactagagtctgaacagctgtaatctatgaattctaagtgaaattttaaaaattgttaatttttcctatattgcattaattttaaaaaataaatctgaggcaaataaaaa

SEQ ID NO: 362046 - DNA, 1160 bp, Homo Sapiens
agggccgaggttatcacccctccacccctctttttcaccgacttgggtagggggggaattcccttgctataaaagggggggacgtgagtccttgtctccgccccggagcgtccggcccctccccgggccccgcctccagctcgcctaggaccgcttggagccggcagctcgcctgccaaacccggctgggaacgcctggcagcttttaagagggggcgggcccgggcgtggtggccccaggagcggctgccgcggggaccgggtagtgacgcggcccaagggcggaagtgagaaagttgtctgcgtctcgaggcgagttggcggagctgtgcgcgcggcggggcgatggggggctcgggcagtcgcctgtccaaggagctgctggccgagtaccaggacttgacgttcctgacgaagcaggagatcctcctagcccacaggcggttttgtgagctgcttccccaggagcagcggagcgtggagtcgtcacttcgggcacaagtgcccttcgagcagattctcagccttccagagctcaaggccaaccccttcaaggagcgaatctgcagggtcttctccacatccccagccaaagacagccttagctttgaggacttcctggatctcctcagtgtgttcagtgacacagccacgccagacatcaagtcccattatgccttccgcatctttgactttgatgatgacggaaccttgaacagagaagacctgagccggctggtgaactgcctcacgggagagggcgaggacacacggcttagtgcgtctgagatgaagcagctcatcgacaacatcctggaggagtctgacattgacagggatggaaccatcaacctctctgagttccagcacgtcatctcccgttctccagactttgccagctcctttaagattgtcctgtgacagcagccccagcgtgtgtcctggcaccctgtccaagaacctttctactgctgagctgtggccaaggtcaagcctgtgttgccagtgcgggccaagctggcccagcctggagctggcgctgtgcagcctcaccccgggcaggggcggccctcgttgtcagggcctctcctcactgctgttgtcattgctccgtttgtgtttgtactaatcagtaataaaggtttagaagtttgacccta

SEQ ID NO: 362047 - DNA, 479 bp, Homo Sapiens
  misc_feature (325)..(325): n is a, c, g, or t
tattacgtatgattactcgcagcgatctattgttccatataaccaaaaagcatggtttattcattgaaacacggttgacctgaactcgtgccttaggaattaatgcccccttatggaacctgcctgaattgcacctgcgggtggaggctccggctgtgaagtcactgaacagaacgtcgctgatggagaaaggctcccgcagaaggaacggcctgtaccgtgcgctccggcacaatcgcgtctctggtgtctcactcacggaaagaaacaacctgaaggccatcccgtcggtctgcacgtaaccgtgaagacgtgtggccgcgtncccacctgcggctgggtaccctgcacccggcactgtaggagtcacgtgcagcctttctcaggggactgtcattgaaaaggaaacgtttgatgtctgtgtcagctgtctttgtagttaggaaatagatccaataaagccgtatttttttgctgga

SEQ ID NO: 362048 - DNA, 378 bp, Homo Sapiens
tcaatgctgatcctgccactttactgaaaatcacgttattaacgtttaaaaaacgtatgggaaccatgcaaagacatccacgcccctcagttgctgccgctccagcacctggctccgaagtctgtgcagaaggcgaggctcccgtagtgctcgagagggccttgcacgctccccgtggagggaacaaagctacgtggattttccagcgcgccgcccacttcaccaggcagcctctgggcttcatcctgctcgcgtgacaggtgtgctctgtgctgtcaggaaactgcagggctttgagtataaactgaaaacagcaaaactatgttctcatctcagaggccccttccttctcaccccgaggtcacctgggcccggaga

SEQ ID NO: 362049 - DNA, 472 bp, Homo Sapiens
ttgttcttatcaagcaagaattaagcacatgctaaacgtcttccatttgacttctctactcggtgtctcagacagtgtcttcccagaaaaccaccaccctctacccaaagatgaaacatgctcatgtcatttttctcatggtcacatttaacagttttgacatgttatacttgcgcatagatccaagcgtttcttgggaacctgacttttgagtgtttaataaagccggaagtggtgttgccctgaaccagcagattttcacctgggttctggctccggtgtttaacactggatacatctttgatgtgcgaaagtgagttcatcttcagacacatttggtacatccagaaatagatccaagaaatggggtggttgagtgggtccgcacgaaatgcttgattatgtcagcaacacccaacactgtctgttttccatttgttggttttaatcataaaattgtcaagtgaaaaaa

SEQ ID NO: 362050 - DNA, 375 bp, Homo Sapiens
  misc_feature (262)..(274): n is a, c, g, or t
ggccctgggcccaacagtttgtacttcatgaaacatattgtacattttacatagtttaatttaaaaaataccttttaagctagttgatctttgactgtcttatttattataacctttcagcacattccaaggttttagttactcaggaaggagttaattaaaatgattttattttggtctgatggatgttttttaaaaggaaaattattattatgaaccttcagcctactttcttgagtgccgtaaaagtgcttgtaaatcnnnnnnnnnnnnnaagaagaaagaaaaaaatggtgtttgacgttgatggaaattcaaaaatatatatggaactgaaacattaacttagctaaaataaaaacccatctgtgtttg

SEQ ID NO: 362051 - DNA, 895 bp, Homo Sapiens
gcggccgcattccccaaactcaagcactgatctgaagaagcctctgtgatccacctcgaagaacgcctttctgtaccggtcccgcacacctacagctcactctcacaaagaccccaccttggagtaaacggacagacgcttcccaccagctgggctgggctggctgcagagagcatgcacttgaagttgtatcactccgcccctgcctcacaggcaccttttgacttttgggtggtggagtgagaataagaaggcaccttaccctacatcacggaacccccaaacactctctctgactagccacccgagactgccccgctctcccttcccacactctggggtgcggcagcgctagctcttagccctgtgggtgaacagcggccttgcaaccacattgaggcggcagggagatcatgactcagccgctggggtctgaaaattcttctcctccatcccaccctgccagatggagaagatgcggctcactgcttctccagaccctctcccctggggagggggtgggggagcaggctctcggctactctcggtgatccgaggaggacagggagggctggctctcctgggcaggaggtaaggcactggcagggggaggacgaggtcggcaggtgcttttctgcaaactggggacaattcagtcctgctacatggatccgtggaaggagggcttccacctcaaccaaccccttagacccagggcgaggaactgtgagcttggtgacagggacagctgtcatattcttctgtgaggctgtttttgtctgtttttcctccttgggtctctcagcaggtgggttcgtgcctggtgctccagtgatgggaagaaaacccacctcaccacagctactgcccgtgagatcccgggaattccggaccc

SEQ ID NO: 362052 - DNA, 595 bp, Homo Sapiens
ttttttgtgataacagatcaattttaattctagcacctgaagctatacaagggtatgctctataaacttcatgggactgttgtacacacttgataaagtgacaactgtgcaataccacttagcatctcaaaatcaggaacatactattgaattgcttaaacacaatccacagaattaaaaacaaaatcagatgccatccacagttatactaattatccattaaaagcttacacttaatacttgaaataacaatcaatatctagcagggaatactgaaagtgatttcagagtctcatcctgttgtactctattgggaaggtttcttgagtagttatgtgactggccaaagatgggtacaaccaagaccagaccagcaagtaaaagttctaccacagtttctgtagtttccacttgtttttctttgtcagttaaaagtgaacagtgagaattaaatacttatctttacatatacacaaggtatgctatgaaagcatatctgcttacaaacatataaaaatacttgttaactagtttgataagaaaataatgtataaaagtatatagcaaaaacattaatcatctctactctggaaag

SEQ ID NO: 362053 - DNA, 493 bp, Homo Sapiens
tactgagcttctctgtctctagcgtctcatccttttgggggtttatggataggtaacaagctctctgcagatccaagcaagacagtcaggctggcaggaaatctggtgcacatccagtcaaaggcccaggggaggaaagtgctgctgcacaaacctgtctaaacgttgtgatggccccaatggtcactatagctgctgcccagaagcaggggcagtgaggtctctgttggccttcactgggtggcatttagcatatgagttcttaaccgctccaccttcctgatgggcaagcttggaaacttggcccctggatcctaggtctgagaccacaacctaagttcagcccaggcccaggcatctttctccttctaccactcatatggttctggtcctacccagctcgagttttccctatagccacaggtggcaggaggtttcagtttacttacaaagacaaatgttttaaatgtattatgacttcttcaaggatgtt

SEQ ID NO: 362054 - DNA, 511 bp, Homo Sapiens
cccagactttagatctgtattggtattacctactggacatctctatggacagttccgtatagactcaactcatctgcccaaccaagtatgttcctcctgaattcctctcctggttacttcatcacaatctacataggctcaccagctagaaacatttatgagcttacattccttcttcccatatcttatcagcatatcatatccatttcactccaacactctgtcttgaatttggccctccctctcccctctctactttaattcattggagcatgggatttggagttaggtggttttgggtttgaattccagctctactatttttggttgtgtgatagagttatttaacctctctgagcctcagttccctcgtatgtaaaatgatgataataatacctacctcacagggttgttgtgaggatttaaattagatattgtacgaaaagtgcctagcacagtgcctggcacacagtagagtaggtgctcaataaatggtagctattattattaa

SEQ ID NO: 362055 - DNA, 442 bp, Homo Sapiens
cttggagatgttttcttgggggaaaaaaaatctagccccctgaaacctgttacaatgtttaaatctcccttttttaccttggctgtcataaaatcctcctgtttgagctaaatgtggcccgctgaagtcttaaatgcccatatttttcaggctaaggccatggtggacaaagctaactccactaaaatcctagctgggggtgttggaaaaaacggtacagtgcccctctcaaactccaggctcaagtccgtctcccctccccgcacattataatctactacttctctaaagctgctgcgtagtttgtcttaaagccccaagactggccaaatgtgcacctgagtaaaggtcacccatttcatctgggggctctttcttgacttttaatgaattttcttctgtgaaaaaatgtatttttaataaaaaattttctgtggccagc

SEQ ID NO: 362056 - DNA, 710 bp, Homo Sapiens
tggtaccggtcgggagttgttagggatgggaacagcagtctggaggctgaccacgttattagtgccattccagcttcagtgcctcagtgagctgctccctgctgaggctgcccctctggctcgtgccctgagtgccatcactgcagtgtctgtagctgtggtgaatctgcagtaccaaggagcccatctgcctgtccagggatttggacatttggtgccatcttcagaagatccaggagtcctgggaatcgtgtatgactcagttgctttccctgagcaggacgggagcccccctggcctcagagtgactgtgatgctgggaggttcctggttacagacactggaggctagtggctgtgtcttatctcaggagctgtttcaacagcgggcccaggaagcagctgctacacaattaggactgaaggagatgccgagccactgcttggtccatctacacaagaactgcattccccagtatacactaggtcactggcaaaaactagagtcagctaggcaattcctgactgctcacaggttgcccctgactctggctggagcctcctatgagggagttgctgttaatgactgtatagagagtgggcgccaggcagcagtcagtgtcctgggcacagaacctaacagctgatccccaactctcattcatgaaaataaaaattgctggagcttgaaaacacactacataagacaac

SEQ ID NO: 362057 - DNA, 791 bp, Homo Sapiens
ggacatggctgcagtactgtaccttatcattctgatgaaactgatttggagcacccttttctttgtcgctacatttatttaggggacaaactccatccaggttgactctctctggaatgcggtaataagagctggcaagtaaggctcagagagaagcaaccaactggagttaattgcccatttgggctctttgtataattatggcaaagtagacatttatgttctaattaatatgattacagagaaggctttttctcaggtcaggcttttcatgaaagtattttgagaacaatgaattgcaataaccagcttcacacaagcataactgataaacgcgagtgctattgtagtcttggcaagtgagccaagaacctaggagcagggccattcctactgaaggacgggccccctacggagatgaaatttgtttcctggtgagcacagaatcagaacaaagaacaatatcccaaagaggccctgtgtctaccaggagcttctttttccaaatgtaatggattatgtggaattgtagtgccatcggtttttacttagagcccttgacgtgcttggaccaatatttccttccttcttatgaaccaggtttttccttctgattttcccttttcaacattccttaccagtcaccaaagtttcctgttataatttcttttagcagacaagttataagtcagatttaattagcatcagagttgattttatattagtcagattttggatcatcacagagatctccacaactccttggcttaaacagctccaccggtaaaaaa

SEQ ID NO: 362058 - DNA, 504 bp, Homo Sapiens
ctcctgtgagacagatggaaccttcacaagggcgcctttggttctctgaacatctcctttctcttcttgctttcaattgcttacccactgcctgcccagactttctatccagcctcactgagctgcccactactggaagggaactgggcctcggtggccggggccgcgagctgtgaccacagcaccctcaagcatacggcgctgttcctgccactgtcctgaagatgtgaatgggtggtacgatttcaacactggttaatttcacactccatctccccgctttgtaaatacccatcgggaagagactttttttccatggtgaagagcaataaactctggatgtttgtgcgcgtgtgtggacagtcttatcttccagcatgataggatttgaccattttggtgtaaacatttgtgttttataagatttaccttgtttttatttttctactttgaattgtatacatttggaaagtacccaaataaatgagaagcttctatccttga

SEQ ID NO: 362059 - DNA, 504 bp, Homo Sapiens
  misc_feature (136)..(188): n is a, c, g, or t
ccgcacctgcagtcccctcatgtgctgttctgctgccccactcagctcctggaccctgtcctttcatcccgctaaagcaccccctaaaaccccttcatcactttcattctcagcaaaaagtaattgagcacctccnnnnnnnnnnnnnnnnnnnnnnnnnnnnnnnnnnnnnnnnnnnnnnnnnnnnncagcagttgagttctagggcagggagacagagtttacaagataaggaaaatatatatgtagtatgctgcaagttaactgctgtgtgggaaatccagcagggggtgggatgtgtgatttgaattgagggccacactgcccaggtcgtgctccgtcaaggggtgagcaggagcaacaggggtggctgagtaagggcttgcagctggaggcaacagcacatgcaaaggccctgagccaggatgtgctgcaataagggccactgagggggacagtgtaggttgggggtgaggaatgtattaaaagatgagattgccttct

SEQ ID NO: 362060 - DNA, 421 bp, Homo Sapiens
cctcaaccaaaaaattaattgaaccaccctccctctaggccgcctggggagtcccacactgaaacaaaagaaacagaaaacccctgtccttccccagcagttgaagttcctagggccagggagaacagagtttaacaagataaggaaaaatatatatgtagtatgcctgccaagttaactgcctgtgtgggaaatcccagcagggggtgggatgtgtgatttgaattgagggccacactgccccaggtcgtgctccgtcaaggggtgagcaggagcaacaggggtggctgagtaagggcttgcagctggaggcaacagcacatgcaaaggccctgagccaggatgtgctgcaataagggccactgagggggacagtgtaggttgggggtgaggaatgtattaaaagatgagattgccttct

SEQ ID NO: 362061 - DNA, 102 bp, Homo Sapiens
aaaataaacagctgggaccatcccaaaagacaagccatgcatacaactttggtcatgtatctctgcaaagcatcaaattaaatgcacgcttttgtcatgtcc

SEQ ID NO: 362062 - DNA, 1054 bp, Homo Sapiens
  misc_feature (785)..(785): n is a, c, g, or t
ttttttgacagttctgttaaaaggtttaatattcaaattatacattaaatagaatcaaacaggcagcagcagttttattaagcatcaagtcagttggcatgtgggtggcggagtgcctggtaatggaataatagggtcggcgatgcccgccaagattccagagtaagtcaggtcgctaggtgagttgtgactgattgcttttcctgcagcgcacgtgagcagtatcagccatctctctcctacccgctccacagcctactgctggctgtcctgtatgtgagctagcagctttttaatctacctggaactaaggccaaaaattatcagccctttcgttctggaaggagagctgatctcatttgtcacctgaacaaaaagcaatacttaaactgaattaaaactacccacacgtgaagcttcttggaattgtcagctattgttggcgtaagacctggtaaatgtagagccagtgctgtgccctgacctggagatctaacagacttggcagaaatgcctgtgcccagactgaagagacctggggctcaggaagaggctcggaacgcatgccctctattctatagaaacctgcagggcataggccctgattacattttttgctcttggtaaaaggagtcaatgatacctttgtacttctccaaaactgtgagcccggtcagtttcatcgtgggacccaactctccacccgaaatggagaagtctctctcgagaatggcccacttctggatgtggtagggccgggccgccgcgttcatgttgaccctccnggatcccctcttcgatggcctggtacacggcctcatccttcttctctatgatctcggacactgtggtggctctgctgcccaccctctggcagaactccacagcttgttcagtcagattatcagtctggtcagaggtgtctgggtccagagtgcacttcaaggtgagcagcatggacaggaacttcctctggtccccaatgagcatggcggtgctgatgatgggcagctccatcttcacggcctcctcgatgggcacagggggcacattc

SEQ ID NO: 362063 - DNA, 1156 bp, Homo Sapiens
  misc_feature (644)..(655): n is a, c, g, or t
  misc_feature (657)..(657): n is a, c, g, or t
  misc_feature (659)..(660): n is a, c, g, or t
  misc_feature (663)..(665): n is a, c, g, or t
  misc_feature (667)..(668): n is a, c, g, or t
  misc_feature (670)..(670): n is a, c, g, or t
  misc_feature (672)..(674): n is a, c, g, or t
  misc_feature (678)..(681): n is a, c, g, or t
  misc_feature (686)..(686): n is a, c, g, or t
  misc_feature (730)..(738): n is a, c, g, or t
  misc_feature (952)..(964): n is a, c, g, or t
  misc_feature (1043)..(1043): n is a, c, g, or t
tggaccggtccggaattcccgggatgtcatggcgaccaaacgccttttcggggctacccggacgtgggccggctggggggcctgggagctcctaaaccccgccacttccggaagactcctggcccgggattatgccaagaaaccagttatgaagggggccaaatcgggaaaaggtgcagtgaccagcgaggccctcaaggaccccgacgtatgcacagatcctgtccagctcaccacatatgccatgggcgtcaacatctacaaggaagggcaggatgtacccctgaaaccggatgctgagtaccctgaatggctgttcgagatgaacttgggtcccccaaagaccctggaggagctggaccccgagagccgggagtactggcggcggctgcggaaacagaacatctggcgccacaaccggctgagcaagaacaagaggttgtagcatggagggcccggcatcgctgacccccacgccgagggcttgccgttttcccggaggacgtggacttttgtgagacaagaggcggctccccagcctgggtttccatgtgaccccacagtggggctggaccagggccctggaggccaataaagagctttctgggtagaccctatttccccttggtatagtctggtgtcgnnnnnnnnnnnnanannatnnntnnangnnnccannnntaaanggtccccaggtttccaaggaccacgggggcccctaataaaggtnnnnnnnnncccctctttaaattgccccccgggggtgcccacaaattcgtggggcgcccaaaactttttattttggagaaagggttccccaaaggaagcctcttttttttaaaaaagtggcaagacattggggaccttttttttcctcgggccgttatttaggagaaaacaagcgccacaattttcgtgtcttttttgtgggaggaacaccatattttttcannnnnnnnnnnnnaaatttgtgtggacactcctcacacccctaaataattttcttgcaccgcgggccgggagaaaataaaaattcttttctntcaagggaggtattgggggtaataaaacacagctccgttactagttttggcatcttaccacaaaaaaactctgtcttttttattacagtggacctctttaaaaaaatcctata

SEQ ID NO: 362064 - DNA, 410 bp, Homo Sapiens
  misc_feature (62)..(74): n is a, c, g, or t
  misc_feature (344)..(344): n is a, c, g, or t
  misc_feature (378)..(378): n is a, c, g, or t
tgtaatataaaatagtcatctctacatatactttaatttgatttttaactcttcatgcaccnnnnnnnnnnnnncaattttagctgaatggacaccaagctaggcacatagtgaaaaatcctctgtacaaggttacaaatgtaatgacaagtttgtccatttcaaaataagatttgtacacaacacataaaacccttcatttagatcttgtgtttataacctaacaaatgacattccaggcaactttacaaaagtttaactagcctacattttgacataatacattaatcataatcaaagatatttcttggtcaggatgcacaaggaaagataaagcttaaaanaaacaaatgcaaatgggttccatacttaataggnacgcagtgggggtgtttgggggctgggttgct

SEQ ID NO: 362065 - DNA, 511 bp, Homo Sapiens
  misc_feature (201)..(218): n is a, c, g, or t
ccagtagagtgtagccggatttggagggactggacactcagtgtgaacaagacgaaggcctcaggaggcagtaaaagctgacaagaggagagaaaatgaagcgcctacgggtgcatactggactagcgggcgaaaggccatgactccttagtttggagaaagaactggggccgagattggggaagtttcccagtgcaattnnnnnnnnnnnnnnnnnngaactagaagaattacccaggtctggcttctttcgtgtagcctggggctgagtcgcaggctgagaaatccagtctggccagtagggggctccaccaagcgcagtctcagaatgcccaagagctccaccgtcgcccggggtctccaccaagcgcagtctcagaatgcccaagagccccaccgtcgcccggggtctccaagaggagtgggtcgtggtgggcgttgaagggccgtaaaagacgagcagcccgcgtccgcgtccgtcctcccgggtctccagtccgcaggcggccgc

SEQ ID NO: 362066 - DNA, 242 bp, Homo Sapiens
gggtaaataaaaagagaacccatgcttttatggacactaggtaaacaccttcagcttaaatttttcgttaaatattttagtttattttattgttatcttccaggtgtctaaatctccagtctgtctgttgtactggtaatttaactctgtaatggaatagtttgctgccaactatttatattaagtaatttttaaatatttgtaatattgttgactgactaataaactattaagttattatc

SEQ ID NO: 362067 - DNA, 414 bp, Homo Sapiens
ctggctcttggtctcttagacatcttctcaagattatgctaagagaaatgactgcacccttttcctgagctatggcagtcagacctggcagtggtaactactctacagaactcccaaacctggcaaggatggtgcagattttggcagattatggctttgtccccacccagcactgatgatattatgaaatatgacaccttcaagtataagcaaccaaagaaaactagataaattggacctcataaagtaaaacaaacaaaaaccttttgcttcaaaggataccactaagcaagcgaaaagacaacacatagaatgtgagaaaaaggttgtaaatcctatatatgacaaggcacctgtatccagaataaagaacctcttaaaactcaacaataaaaacacaaataatctaattgt

SEQ ID NO: 362068 - DNA, 277 bp, Homo Sapiens
ctttcttctttcttaatgcctgaaattttctccattggcccgaaagcagtaaaaattgttcattaatcttccgttaggccaataaaagaagggcctcacaagacaaaacaggagccagaagtaaggactgaaggagaaggggagaatagctaatagctatagtatatgtatatgttaaaaactgaatatcccatcatcctatttcatgtatagttgagttctcaaatttgtaagtttttatacatcctttcattgaataaacgtttaattaaatgag

SEQ ID NO: 362069 - DNA, 667 bp, Homo Sapiens
  misc_feature (220)..(235): n is a, c, g, or t
ccccgcagccgcccccgccgccgcagctcgggggcgcggggggcggcagcagcaggcacgagaagagcctggggctgctcactaccaagttcgtgtcgctgctgcaggaggccaaggacggcgttctggatctcaaagcggctgctgatactttggctgtgaggcaaaaaaggagaatttatgatatcaccaatgtcttagagggaattgacttgattgnnnnnnnnnnnnnnnncagtatccagtggaaaggtgtaggtgctggctgtaatactaaagaagtcatagatagattaagatatcttaaagctgaaattgaagatctagaactgaaggaaagagaacttgatcagcagaagttgtggctacagcaaagcatcaaaaatgtgatggacgattccattaataatagattttcctatgtaactcatgaagacatctgtaattgctttaatggtgatacacttttggccattcaggcaccttctggtacacaactggaggtacccattccagaaatgggtcagaatggacaaaagaaataccagatcaatctaaagagtcattcaggacctatccatgtgctgcttataaataaagagtcgagttcatctaagcccgtggttttcctgttcccccactgatgacctcacacagccttcctccc

SEQ ID NO: 362070 - DNA, 923 bp, Homo Sapiens
gcggccgcgggtctcacggcaaagagggtgtggcctaaactctggccgccgccgaaactctggggccgcgcttggccgcgagtacaaagcgggctggtggccgctttgcggcactgccccggccgcgcgcctcccggggggcccacacccctgcgttcctgaaacccttcttttgaaaaatgccctttcgaacgcaaccgtccgccccagagccacgcgggcacggctcgagggaagtttgtttcctttttcaaattgctccggtcaccttaacggtttgagtcttccggagtcacgcccgcagcctcgctgcccccatctggcttgggcagggccgaagctcgtctcccgctttaagagcgcgccagccatttctctgcctgctcttccaggccggctgggcggggggcctcccaacggcttcctctccagttttcaaaggctgcacatttcacttaactatttgaagtatttataggcaaatacaatacgcagggaagcttcccgccccgagacagctcctccacgcaacctaccacagactctgtaattagagtggcctgaagaagccgggagaggctccatgaccccggcaggctctggccaaaccttgctgcgtttcatggagcccctccctgtccgcgcctgggacgcactggccccaacaggttcctcgactcgatattcgctgatatagggtagctctgtggtttcctcgctgactgaacagttggatgacgacataagaaggaaactgagagatgatcaggcaaggccaagccttccgagatttatgaatgaggagcctcccaccctgtagaactgcttggattagaagtgggcaagttattcaagcttacatgcatgcttataaggcttctgttttcacatgtagtaaggtggaggcttgacgacatttgcct

SEQ ID NO: 362071 - DNA, 767 bp, Homo Sapiens
acgaggggcatgaacatttatagttgaaactgtagaaagggtcaggttggaggtgtgtaataaaaaagaattacctaggttgccaaaggtaatttaggaagggtctgatcatttagatgagagttctttggggcttattttctgggtaaggctcatctttaaaaactggcttcagacggggagaggggagaacaatgaattggctctattttctctattgggaattacaggaccattttgattcttagaatgtaaaaagcatatcgctaagtaaatcatcctggaggtcccaagtagctctatgcctgcaatcatggagacacaggcagacagataagcttcatggggaaggcatggggcatcctctgtcttgggatttgtatccatggtggtctggtccctgccttttaatccgtcctctacgcttgggcttttctgttaccaaacagcactatcccaggaactattgtctgcctgggaacactcagtagggagacactttggagacaggaggtgatgaacctttttatgtgcagctggtatgatagaaggaaattgggaaaacttgtatgctaggcacttttgtccagagcctgctgtcccatggagaaaaagttttaagcactgaaaaaatttgattaatgtatttaaatgtattatttgaagcatcattcacttgttgatttttacaatcccatgtcttaaaaaggatgaatccatgttattgtattgtaaataatttagattattaaaatggattgtttaaa

SEQ ID NO: 362072 - DNA, 472 bp, Homo Sapiens
cagcctgttccaatttgccaagcattattaaggaggaataattccataccatgtaaaataccatgatatgctgattatactacattaacaaatttttaagttgcgttcactaaattctgtcctgtttcttcaaaataatatagcttaaattgcatgttaattgtatatcttacctattttgtttttatattattcttacaatataatcatgtatattaacaaacagccctgggattctaatcttcctctgcaactgtcttccaggacttactggcacttattacactgtgataagtggcagaaaagtagaatgaaatattctttttccattagatttgttcttatgtgaccatgtaccaagccagctataaagtattgtatttctgtagaatatggaaaatagtatttgtcttacctttgctaaatgtttgcaatttctaagtaaaccttttatctcctaaaatgaaaaaaa

SEQ ID NO: 362073 - DNA, 476 bp, Homo Sapiens
tgttggaacacacatctgatggatttccagagaataagaagatagaatcatagtgtctgctaaataagacatataagaactctgaagttggaatagatttgactgtattaaatgttggcgagagactctctttgatacattaaaaaaactgtttgcagaagcagttctatggaagagactggaataattatggccggaaaacaagtacccgttttaagtaagacatggttttccatgtaatattttgaattacagcatcttcacctagaagatctcaattgtcttagtcacagagtaggtttatctgggatggatattaattttaatacaggagtgttctgtatcaacatttgggttggtattcagatgggaattcaaatatgaatcctctctggagagggtccaactgggaatcctgctaaaggagcaaagccttgtattacctctggaagacaacaaaaacaattggcaacaac

SEQ ID NO: 362074 - DNA, 264 bp, Homo Sapiens
  misc_feature (214)..(222): n is a, c, g, or t
tttttaaggagtttctaccattaacattttatttaaaggctttgggactctgaaatataatgtttgtagaaatgctatgagccagaccctccacactgtaaaattcccagtgtaaattaatttgttaaatgctcttagaattcctgcaataaagaacacctatctaaccttagttatccctgtgtttcccaaatatatcttactttggagcacnnnnnnnnnagtaccgatttacatcctgggaaatggtgtttaccatgcttt

SEQ ID NO: 362075 - DNA, 1015 bp, Homo Sapiens
gggcttgttgcaacttttcacttctcttgtgtccaggtatgcagcaaaattctgcaatttcaccttaaagatactgttggttttacagatgctctccaacctattttctataagatgaggtagtggtgaactcagataacaaacttctcttctaaactggttctgcttctaagacaagcatctcctgccctctctccttcctccccatctctcgcacgcagtctagagatggactgagccttgcttctcactggcagtgttgagctttggagatgggatggttgctatgccaagccttgtttctctgctcagaagaagtagagaagctattatcaattaaaagcatgctgtgatgtgactcctggaagtgacgtaggagtgagtggcaggttgtttgatttaataggtatcttaatcaagaattaagcttgcaacattggctttgctcagatgcagatggaagtgtgatcacaatcattttgaatccctcttcctcacttttttttctaagaaaataaacattttactgtttttatggatccttgtcttctcccattcatccagctcagtgttttaagatgatcctgggtgcagaagttgagccctcctttgcattgacactgataattagcctatagggctccctacccttccattaagaatctaccaagcattagcaaggctgaaagtggtctaagaggtgaggggacatcctatgactttttaggaaggcctgaaaccaccttgttacctttcattttgttagcaaataaaccatcctattttgtaactctcccccttcaaaatgctacatgagccttgccacttcctttttctcttacttccagcacactagacatagcaaaagtgtttgcctactcaaaaacataatacttttatgctgatgatgggtatttgggagatgtgaaagccaaaagcccctggcagtgggtgggggaatgttgacttgagtgttccagcaggagtttatttttccatactattatggaagaga

SEQ ID NO: 362076 - DNA, 451 bp, Homo Sapiens
gccctgttctgcttgtatcccagtgatacttgggaggtaggaagaaaatgggagtaagagaacaatttggggctgaagggagtgtcagaggcacgttgatccttgttttgttgtcatggaaacttcggggctggtgggacttaggccaaaagctcagaggcacagccaaaatttagaagcttgctactcctacgactcggcctataaggaagagagaagctgtctgtactttggggactacattgctgaaggaaaaaaatcactccctggctaattaagattgcttccaaattgggggaatgtgtgtcatttcctttaccaaggccagtcatccctgcttccacccatggtcaggacagtcagccactacgtgatgctgtataaattggattacaaaccatattcttgttcagcttgcactaatctatataaataaaatatgtactttgaa

SEQ ID NO: 362077 - DNA, 337 bp, Homo Sapiens
ctgaactctcagttctaacgcagggattcaggaattgggctttcagactccttctgcagtgtcacagtccagactttttttaaatgaaggacaccccgcagtggctcacagtgggtcccagggctagcaggagcgtgctggggagccggctctgtctttgttcgcagtgggtcccggtgctggcaggagtgtgctggtgagccggctctgtctttgtaaatccttcaggggtcctacggctgactccaccggacagcccgtcctgggccgtgttaagcaccttttgtagaaatcgtatttttattaaaacatcaaatctgtgttcctgtaaaaaaaa

SEQ ID NO: 362078 - DNA, 1017 bp, Homo Sapiens
  misc_feature (16)..(16): n is a, c, g, or t
ctttccagaactaccnttccagtgccaagaaagtaaaactatttgcaagctctttctggtaataagaatgagggaactcaaaacaaaaaatgctctattatgcaattaaaaagtaaacttaggtaaatcagtttctttttatcaatctctgtcaatttgaattaacggtatttttcaataccatttcaagaatagttaccatactagaactagacaatgttgcaattatctcatatcttacctattcattatcacactagcaaaacagtcctttttaaaaaaaggggagcgatgtggggtgagaaaatctcataaacctcagcaaaagttaatattatgttaattaaaggcagttataattagaaaaattagagttagtcacattgagaaatccccagagtttttaatagctctctttcctaaatactcaaaaaatccagactagaaaaatggaagtgaactgttagataaacacgtaagtactcaacaaatatttaaaaagaaacaaaccaaaaatgggggagttgggggaaacaggatggccttatgaaacactgtggagctacccagcagcaacatttataaaagcttgtgtagatttgcataatgctcctatgcaattcttccccattaggaagacattcctacaaataattcatcactttagattttgatcatagatcatttataatggttatcatggttgtatctttaaaaaatttcatccattaacagttatgacaaacattaggccattctttgcctagtatattattccctcaactattactaatgaaaccaaaacctcagagttgtttgaattagaattaaaatattaagctagaaaagattatttaattcttagagagatacccaaagaatttgatgctgatattatctcccctatcctctcatcacaaccccctggcctgcatttacttccttaattccatctatattcaccacagtgatgtagctaaacaagaacaatattgccctttaataagctgacctcta

SEQ ID NO: 362079 - DNA, 462 bp, Homo Sapiens
  misc_feature (48)..(48): n is a, c, g, or t
cataatatggtatgtttggatgtaggacctcactggtttaaggccacnaaattatttccaaaggaagttactctaaagacactccagattatttccagaaaaatgccaataaggggaatagtttttggggtttattttttattttaaaagaaaattgacttatttaccacaagctatttttttcccttctggctgtaaggtttgtacagactggtttggtaaatgctaaacttttgtgtcttttgcctttttaaaggaattgttaacattggaattgagggtatgtacaaagaagttggtgtcaacaccatttaaaaagtcatattttttcacaaatatagaaaatcattttacataagaattttaagtatttgcaataaatatatgtatatagattgtatgtattcctatattcttatttttcattttattattaagtaaaagatcattaaaagtgaaaat

SEQ ID NO: 362080 - DNA, 500 bp, Homo Sapiens
cgcatgatgtcacaagttattggaagaaatccctccaacctaggttgggacagatgaaggcggcgcttattggtgttcaccaaaacaccagcatggtgtaccagctttggctagatgatgctcaggaaaacacagatcctggtgccgaacatgaggacagggcaggccgaaggagaaagtggaaggaggggagcttctctctcagcctcatccttctgggcctggatgctggagagtcatgaggtgcttcagagtactctgggtgaggagggaaagatggtgcccaccacatggaggccagcctaggtcttgtatgaaacctgtgagctagctgaaagcagagaacccagcagaggattctgggaaggtcctgggggatggcagagccagcagagagagggtatggatccaccaggcataggatggaacagagcactattgaccacagtgaactggggcatgggcaatcaataaacacatattagattaagctataaaaa

SEQ ID NO: 362081 - DNA, 530 bp, Homo Sapiens
  misc_feature (106)..(115): n is a, c, g, or t
cttgaccttgaagcacacagccctgctttcctatcctgggatgttaaatccaaatgcccttagagtccaagtgcagtggtgcctcaataaatgaatgaaaataagnnnnnnnnnngtcctaagaatccatttctttccacctctggatcgtgacccaatatcacctaagaaggagcttgggaggaatgttaagaggtgtggattctcatcctgactcttccacctcttggctttgacttcaggcagaccctggaatttttctgaaattttgcttactctgttaaatgggaatcacaatgccatccgtgcataagaaggcaccccacagacctctatttacagaaagcagaattgactatgggctcccagctgtgacactgaaatccatcatcatgtttatgctgaaaccagattccttgaggctccttctagctagttcctgggtatggaagggatactaaggcaggcccatttctgggagacatgctagacgtgcccttggcaaaacatttgtaattacttttcctgga

SEQ ID NO: 362082 - DNA, 421 bp, Homo Sapiens
accttcctcctccaaaggagatttgttaagaagagagggaaaactggcttagaaacagcagtgctgctgacaaggatcaacaatttcatgatggagtgaatgcccctgccctgcttccccaccccaagcccagtcctacattgcccaaacagcaagggttggagagtggcttaagtggaatgcttcaggggtggtgggttgcaagtggggggagctttgcccaacaggaggttttgaaccatgagggccctctgcccaggtgatgggcattccctaagctgctatggaatctgctccctttggggttttgacctgagatgtttgggaagagagtgagtaatgagaagtttctcctcaaatgaaactagaacagaggaagtaaaagggagattgctcggataatgtctcagacttgtgtgca

SEQ ID NO: 362083 - DNA, 647 bp, Homo Sapiens
  misc_feature (429)..(429): n is a, c, g, or t
ggggcccagggtatgttcacggggcgatgctgccctcccagctggcccatgggtgaccctgggaacattaactgcctcacaacgtttgtgcctcagttacccgtagatgtagtgagggtaacaatacttactctcgttggtgataaggaacagctaacacaacacacagggtttttctgctcccaaaatgggattcttcagtgcaccaaatcgaagaaagcactggagctcacgctggtttctccattgtttctccttaacagtggaaaccgtaacttttgttctagtagcatctagcatgctcaataattatttgtaaataaaagttatacttttccctcccaaaaggggggacaaggtatttgttatgacaagggcttttaaaataataaaaagctccctgcgaaatagcttaacggtcccaaaatnaaaccccgagtcaaccgaatatccataaaaattgttcgggcccgccctccgggcccccccaaagaaacctttttctaaaaacccttttcctttttgggcccgcccggggccccaccgtaaagggtaaaaggagaaacattggggcccaaaaaccggtggttcccccctaaaggaaaaaacccctgggcccattgaaactaaaggggtctttgggattt

SEQ ID NO: 362084 - DNA, 521 bp, Homo Sapiens
ctggggaaacttaaataaggtttgtagtatagttaagaacattgtatcaatattaatttcctgttcttgatcattatactatggttacgtaagatgtcaactttaggagaagcagggccaggagtggaaaggagttctttgtactattttgcaacttttctctccatctaaaattagttagaataacgcccttcatgggaaataaaggcagagcacaaccctgtaaatattacaatcccaaatgtttaatatatgcgtatatagaaaaaagactgggaggaattgcaggaatgtggtgacattgggtatcgctgaatggtggaaattatggtaaggtttgctttcgttttcatattcatctgtactttctaagttttctactcatttgatggtttaatatggtggatccttggaaataacggtgaatgagacaagatgaagtttatctctcatggagcttatcttctaatggggggaaatggaaaatgaatacatgaattaaaatctttgtgcagaaaatt

SEQ ID NO: 362085 - DNA, 514 bp, Homo Sapiens
attatttgttgaaataatggctgaaacttcttaaatttattgtaaaacattaatccacacatccgggaacttcagtgaactttagaataaatgcaaagagatccgcaggcaaatacatcatagtaaaaatgtggaaatccaaagaccaggagaaaaccttgaaagcaccaagtaaaaactacttgtacattttaaggaaagtcatataaaattctgatttgtcatcagaagcaatggaggccagaagcatggaatgacatattcaaagtgccccctaaagaaaaccccaaaacagaaaggttaaccaaggaccctatatctagcaaagtgatctttcaaaaatgaaagcaaaataaagaaattcccagataaacaaaaacagaatttgttgctaccagacccaccttacaagaaatactagagttcttcaggctgaaagtaagtgaccacagacaataattcaaattcacacacaaaaacaaagagcaccaataaaggtaactgtgtaattata

SEQ ID NO: 362086 - DNA, 602 bp, Homo Sapiens
  misc_feature (420)..(530): n is a, c, g, or t
tggaaagcaatcacatagcttacagaatccgtggaaaggctggaggctctgaaaatggagaaaaacaacagaagccaagtgacctaagacacagcctaatcactctaccgtagcttcctgccgagagtgctgccgttctaccacagctggattctatttgctgcacactgacagaatgaaacctaaactagctcctcctaaactgtgtttgaagaaccagtttttaaaattaccaaccccttgcagattgatatttctgtaaagtatgataaaaatgaattactagaaaaatgaaatggggggaaaaggcatgtaaaatacaagcccaaatttttattattcaacttgacagacttcacattacacctttcagtaaattcaatcaaaagataaataatgggccggacaaggtggctcgtnnnnnnnnnnnnnnnnnnnnnnnnnnnnnnnnnnnnnnnnnnnnnnnnnnnnnnnnnnnnnnnnnnnnnnnnnnnnnnnnnnnnnnnnnnnnnnnnnnnnnnnnnnnnnnnttagccctggtggtgcgtgcctgtggtcccagctactcaggatgctgaggttggggggatcactggagccca

SEQ ID NO: 362087 - DNA, 1507 bp, Homo Sapiens
cgcgggcagcagggcccgggtctacgccgaggtgaacagtctgaggagccgcgagtactgggactacgaggctcacgtcccgagctggggtaatcaagatgattaccaactggttcgaaaacttggtcggggaaaatatagtgaagtatttgaggccattaatatcaccaacaatgagagagtggttgtaaaaatcctgaagccagtgaagaaaaagaagataaaacgagaggttaagattctggagaaccttcgtggtggaacaaatatcattaagctgattgacactgtaaaggaccccgtgtcaaagacaccagctttggtatttgaatatatcaataatacagattttaagcaactctaccagatcctgacagactttgatatccggttttatatgtatgaactacttaaagctctggattactgccacagcaaggggaatcatgcacagggatgtgaaacctcacaatgtcatgatagatcaccaacagaaaaagctgcgactgatagattggggtctggcagaattctatcatcctgctcaggagtacaatgttcgtgtagcctcaaggtacttcaagggaccagagctcctcgtggactatcagatgtatgattatagcttggacatgtggagtttgggctgtatgttagcaagcatgatctttcgaagggaaccattcttccatggacaggacaactatgaccagcttgttcgcattgccaaggttctgggtacagaagaactgtatgggtatctgaagaagtatcacatagacctagatccacacttcaacgatatcctgggacaacattcacggaaacgctgggaaaactttatccatagtgagaacagacaccttgtcagccctgaggccctagatcttctggacaaacttctgcgatacgaccatcaacagagactgactgccaaagaggccatggagcacccatacttctaaccctgtggtgaaggagcagtcccaagccttgtccagacaatgctgtgctttccagtggtctcacggcagcacgatgaagactggaaagcgacgggtctgttgcggttctcccacttttccataagcagaacaagaaccaaatcaaacgtcttaacgcgtatagagagatcacgttccgtgagcagacacaaaacggtggcaggtttggcgagcacgaactagaccaagcgaagggcagcccaccaccgtatatcaaacctcacttccgaatgtaaaaggctcacttgcctttggcttcctgttgacttcttcccgacccagaaagcatggggaatgtgaagggtatgcagaatgttgttggttactgttgctccccgagcccctcaactcgtcccgtggccgcctgtttttccagcaaaccacgctaactagctgaccacagactccacagtggggggacgggcgcagtatgtggcatggcggcagttacatattattattttaaaagtatatattattgaataaaaggttttaaaagaaaa

SEQ ID NO: 362088 - DNA, 687 bp, Homo Sapiens
gtattgaagaaacaggggtgggtttgaagtactattttcccagggtggcttcaatctccccacctaggatgtcagccctgtccaaggaccttccctcttctccccagttcctgggcaatcacttcaccttggacaaaggatcagcacagctggcctccagatccacatcaccactcttccactcgattgttcccagatcctccctgcctggcctgctcagaggttccctgttggtaacctggctttatcaaattctcatccctttcccacacccacttctctcctatcaccttcccccaagattacctgaacagggtccatggccactcaacctgtcagcttgcaccatccccacctgccacctacaagtcaggccacatgcctggtcactgaatcatgcaaaactggcctcagtccctaaaaatgatgtggaaaggaaagcccaggatctgacaatgagccctggtggatttgtggggaaaaaatacacagcactccccacctttctttcgttcatctccagggccccacctcagatcaaagcagctctggatgagatgggacctgcagctctccctccacaaggtgactcttagcaacctcatttcgacagtggtttgtagcgtggtgcaccagggccttgttgaacagatccacactgctctaataaagttcccatccttaatg

SEQ ID NO: 362089 - DNA, 321 bp, Homo Sapiens
cggggcaggggaccttacctgtaagacttttaaagattttcctccctcctgtttcaggtgggtcacattctgatgaatgtttcccttgtacagatcccagcttatggccttgacccagccgtcctcacagatgccgggtgaccctctagctctctctgcatctcccaccccccgacaccctgggaccctcgaccccacccttctttcctaccagcccagagccttgtggcttgtacagttttgaaactcccgttctattttatgatggttgataatagtcagtaacctaataaaggaacgtttgttaaaatatcaaaaaaa

SEQ ID NO: 362090 - DNA, 478 bp, Homo Sapiens
  misc_feature (149)..(157): n is a, c, g, or t
attagaatcttgtcttggttccattttgatggctaatatttgttatcttaattaagactatttctgaggtcatgattacttgaaaatattgactaaaactgggtccttagaaattccaggtggagctgatttacctatgactgaggggnnnnnnnnntcaaattttactgataatagtaatgctccaaatgaattaatgacacatctgttcaataaataaagagcttaaatatacaaaacataagaaatctgggcaacaaaacttgtggtctttacttttgaatagctacccaagaaaaggttttaaaggtaaaagttatgagtaatgtcatcacaataagctcttgtttaaaattcttttcttttatgtataattaggtttatgtttcatgtctttttaaaaccttataaaagatttaattatcacatctattcttcaatgtggaaatattaaatattgttggttgtaaaataaaaa

SEQ ID NO: 362091 - DNA, 502 bp, Homo Sapiens
gacctctgtaaaagccacaggtggactgcttctggggacatcaccttcttctgcggggttgccagtcatcggaacgtcagaaacctgaagtgtcatctggggccatggacggagaggggtgggggctaccagtggacccactgactcctggacatcaggatgctctgccatggcaaaggtgttatcatccatgttcttcgtcttcagttcctcctcggcaggcctgcgcctcaccggcttcatgcagctcttcagctgcctggcctcagcctccacgggaccctggcactcgggctgtggctccagctgcggcagctgctgctgctgggggcagccctttcggcatcagtgggtgtgggagcgggtgcgatccggagcaggactgtgtagttgcggccgtggttgttggcccagaaagtgccctcaggggtctcatagcgcaccacgaagtcgaggcgcgccccatcgcccgcgccctcagcaaagggcagctggaaggcaa

SEQ ID NO: 362092 - DNA, 444 bp, Homo Sapiens
  misc_feature (36)..(36): n is a, c, g, or t
aaacttaaaatgggttgccaaatcaacggaaagttnaaaaaacctgaaatgtcaatctggggcccaatggaacggaaaagggtgggggcctaccaagtggaccccactgactccctggaacatcaggaatgctctgccatggcaaaggtgttatcatccatgttcttcgtcttcagttcctcctcggcagcctggccctcaccggcttcatgcagctcttcagctgcctggcctcagcctccacgggaccctggcactcgggctgtggctccagctgcggagctgctgctgctggggccagccttcggcatcagtgggtgtgggagcgggtgcgatccggagcaggactgtgtagttgcggccgtggttgttggcccagaaagtgccctcaggggtctcatagcgcaccacgaagtcgaagcgcgccccatcgcccgcgtttta

SEQ ID NO: 362093 - DNA, 2120 bp, Homo Sapiens
  misc_feature (629)..(629): n is a, c, g, or t
ggaccggtccggaattcccgggattgttgagggagtgagagccacgataggccactgtagcgtgctgcggaggccacaccggcagggagcccaacgagaggtgccctgctcctgcatgccccggataccccagcaggctcggcacccactcagagcccccatttctgctccccaggcactccctgagtgcctacctgcccttgtccttgtcctgggccatgttggctcctgcctcccagctctgaggaggcctctgcaggtagccgacctccctggacgagggggcagctgcctcctctcacctgggctcacactgaggcaagtgcctctcaacccaggataaatggcctttctgaaggcccagagagcatgcctgccccagtgtgggagctgcatccgctccccacctgacagtgatggccaagagcccagtgttcctggagggctcccaaactctggacctgtatgggggtcagggtagacgctggtccctaacggaaaagcgtgaccctcggccccagatggctgaactcgtcactgccagggcgagctgtcacctctgtgagctgataatgccttgcttttaggacctctaatctctgcaagaacccaagctggctctgcctgtnttctcctgagcagctcgcagtgttcaccacactccagcacgactcgggacaggcacgtgcgcccctctgcaccagctggagtccctcaggacacctggctggagctgaaactggaggagcggctctactcggtgctgtgctgcagccgtgtgcctggacctgcccaaggcctccgtgtaccagtgtactaatggtcacttgatgtgcgctggctgttttatccacctactagcagatgcccggctgaaggaggagcaggccacgtgccccaattgtcgttgtgagatcagtaagagcctctgctgccggaacctggccgtggagaaagccgtgagcgagctgccttcagagtgtggcttctgcctgcgccagtttccccgctccctcctggagaggcaccagaaagaggaatgccaggacagggtaacccagtgcaagtacaaacgcatcggctgcccatggcacggccccttccatgagctgacggtgcacgaggctgcgtgcgcccacccgaccaagacaggcagtgagctgatggagatcctggatgggatggaccagagccaccgcaaggagatgcagctgtacaacagcatcttcagcctgctcagcttcgagaagattggctacacagaggtccagttccggccgtaccgcacagacgacttcatcacgcgcctgtactatgagacgcccaggttcacagtgctgaaccagacgtgggtcctgaaggctcgagtcaacgactcggagcgtaaccccaacctgtcctgcaagcgtacgctctccttccagctcctcctcaagagcaaggtcacggcaccgctggagtgctccttcctgctgctcaagggcccctacgacgacgtgaggatcagccccgtcatctaccactttgtcttcaccaacgagagcaacgagacggactacgtgccactgcccatcattgactccgtggagtgcaacaagctgctggctgccaagaacatcaacctgcggctcttcctgttccagatacagaagtagggcggggcctcaggatgtccgaggagcccacgggcggcatcccagcaccgctgccctgtccacctggctggcagctgcttcacaggactatctgatcactttagcaaaggaggagaacaaacgaagccaacacagggcaagtctgcatgcgtgcgcgacggggcccccgcctccggctcacccccccgacccctgcctcccctccttccgagggccgccagaggctgggctgacccgaagaggagacggtgcaccaggcgccccgaggctaagagacggtggcagcaaggaggccgagaggcacagcgaccctgccccagcccttctgtgcagtcaggcggcggtgctgctccatccctgcgggttccggcggggcgcgggggccttgctgacatcagacgggatatccgaatatctgatagcaattaaaaggcagccttgtttcgtaaaaaaaaggatgacaat

SEQ ID NO: 362094 - DNA, 526 bp, Homo Sapiens
  misc_feature (487)..(487): n is a, c, g, or t
gtattcaggaactccttacagagtcaaggacatagtggggtctcaggaaacagtagttgaattggttgggtgagaaagactacatgatctgagttgaaccatatgagaaagcactgaacaccaaagtaccttgatggatcattggatgattggaaagaaaagaacaagtgaaagagggggagattatgaaagagagtaagtgagcattatcagggggaaagagcaaaatgatccacattaagaaatgagaggctctctgaaagaagggaagtctctcccagagtgtgatgtagcatcagataatccacgtaccttctttttgtttctgtttttaaaataaagcacctttctctagtctattattttattttaaacttatttgattaatccatgctatgtgcaataaatgataataagaaatgtttgaatgaaaagtttttagaaaaacaagaaaggccagttggattaatttttttgtatgtgactntattgtcatcccttttcaagaggggaatattaaattaaa
